United States Patent Application Publication US 2007/0054278 A1 - sequence listing, part 13

SEQ ID NO: 91929 - DNA, 201 bp, Homo sapiens
gcatcggcctgtacgcccagcacctggaccactggctgcgctacttccccctgtcccacttcctgttcgtcagcggggagcgtctggtcagcgacccggcyggagaggtcggccgcgtgcaggacttcctgggcctgaaacgggtcgtcacggacaagcacttctacttcaacgccaccaagggcttcccctgcctcaaga

SEQ ID NO: 91930 - DNA, 201 bp, Homo sapiens; identical to SEQ ID NO: 91920

SEQ ID NO: 91931 - DNA, 156 bp, Homo sapiens
agatgacgggccaggacttcggctggggctgagcggcaccctggggatgctcagcaccttgattgacacccgctcgcctggccagagcgggctgcgtgcayatgctgggcagagaggaatatttaagaaataaagcttggacccagatttttccac

SEQ ID NO: 91932 - DNA, 201 bp, Homo sapiens
gaccgtgggggctcctgagaccgtggggactgctgagaccgtggggacggctgagaccgtggggactcctgagaccctggggacggctgagaccatggggwcggctgagaccgtggggactcctgagaccctggggacagctgagaccatggggatgctgagaccgtggggactcctgagaccgctgctgctgggcgttgg

SEQ ID NO: 91933 - DNA, 201 bp, Homo sapiens; identical to SEQ ID NO: 91922

SEQ ID NO: 91934 - DNA, 201 bp, Homo sapiens
accccgacgtccgcgcgctgggctctgagccccacttcttcgacaggtgctacgagcgcggcctcgcctggtaccggatggacgtgggggtgcggcagccycagctgaagcagcccgcgctggtggctgctcatccccaagcttggacccagcgcctgcagagaggaccctgcccaaggccagttggggagtcagtggggg

SEQ ID NO: 91935 - DNA, 201 bp, Homo sapiens; identical to SEQ ID NO: 91923

SEQ ID NO: 91936 - DNA, 201 bp, Homo sapiens; identical to SEQ ID NO: 91927

SEQ ID NO: 91937 - DNA, 175 bp, Homo sapiens
atggctgagactgtggggacggctgagaccgtggggatggctgagaccgtggggactgctgaacctgtggggackcctgagaccgtgggaacagctgagaccgtggggactcagaccgtggggacggctgagaccgtggggactcctgagaccgtggggatggctgagaccgtgg

SEQ ID NO: 91938 - DNA, 201 bp, Homo sapiens; identical to SEQ ID NO: 91924

SEQ ID NO: 91939 - DNA, 201 bp, Homo sapiens; identical to SEQ ID NO: 91925

SEQ ID NO: 91940 - DNA, 201 bp, Homo sapiens; identical to SEQ ID NO: 91926

SEQ ID NO: 91941 - DNA, 185 bp, Homo sapiens
ctaccggcccttcaaccgcaggttctaccagatgacgggccaggacttcggctggggctgagcggcaccctggggatgctcagcaccttgattgacacccrctcgcctggccagagcgggctgcgtgcacatgctgggcagagaggaatatttaagaaataaagcttggacccagatttttccac

SEQ ID NO: 91942 - DNA, 176 bp, Homo sapiens
atggctgagactgtggggacggctgagaccgtggggatggctgagaccgtggggactgctgaacctgtggggactmctgagaccgtgggaacagctgagaccgtggggactcagaccgtggggacggctgagaccgtggggactcctgagaccgtggggatggctgagaccgtggg

SEQ ID NO: 91943 - DNA, 201 bp, Homo sapiens; identical to SEQ ID NO: 91929

SEQ ID NO: 91944 - DNA, 201 bp, Homo sapiens
tcttctaacctctcaacctgcagctttcacctgagtctggcccctccagcgggcagggagtgcggggatgcggatcagctgggaggaggaggggaggggtrcttccacccgaggggaagatgctctcgggacagtttcccgggcagctcctggccagcttccagcccagagtcctcaagtccagggcaccttgggcccagc

SEQ ID NO: 91945 - DNA, 201 bp, Homo sapiens
cagcaggtcggaggaaacagccagaccgagagcagcctgccggggcggagcaggaaggagcgccccacctccctgaacgtgttccccctggctgacggcasggtacgtgcacagatcgggggcaagctcgtgcctgcgggggaccactggcacctgagtgacctcggccagctgcagtccagctccagctaccagtgtcca

SEQ ID NO: 91946 - DNA, 201 bp, Homo sapiens
ctcttctaacctctcaacctgcagctttcacctgagtctggcccctccagcgggcagggagtgcggggatgcggatcagctgggaggaggaggggaggggwgcttccacccgaggggaagatgctctcgggacagtttcccgggcagctcctggccagcttccagcccagagtcctcaagtccagggcaccttgggcccag

SEQ ID NO: 91947 - DNA, 201 bp, Homo sapiens
ccaccatgaagctgtggtgtgccgcgggcgtcaacctgagcgggtggaggcccaatgaggacgacgctgggaatggagtcaagccagcgccaggccgcgaycccctgacctgcgaccgcgaaggagacggcgagcccaagagcgcccacacgtctcccgagaagaagaaggccaaggagctccctgaaatggacgccacct

SEQ ID NO: 91948 - DNA, 169 bp, Homo sapiens
aaattcattgagtttgaagatgctctggaacaagagaagaaagagctgcaaatccaggtggagcactaygagttccagacgcgccagctggagctgaaggccaagaactatgccgatcagatttcccggttggaggagcgggagtcggagatgaagaaggagtacaatg

SEQ ID NO: 91949 - DNA, 201 bp, Homo sapiens
gctacaagaacaaggtgcacgtcatccagcccaagaccatgcagatagaggcgaccatgactccacagaagtcatttgacgcccacccgcggcgggagagycaggtgcggcagctggcgtggatcggcgatggcgtatgggtgtccatccgcctggactccaccctgaggctctaccatgcacacacgcaccagcatctac

SEQ ID NO: 91950 - DNA, 201 bp, Homo sapiens
ctccggccaagcgcccctatccctcggtgaacatccactacaagtcacccaccactgccggcttcagccagcgccgcaaccatgccatgtgcccgatctcsgcaggcagccggcccctggaattcttccctgacgacgactgcacgtcctccgcccgtcgagagcagaagcgcgagcagtaccgccaggtgcgtgagcacg

SEQ ID NO: 91951 - DNA, 201 bp, Homo sapiens
gcccaatgaggacgacgctgggaatggagtcaagccagcgccaggccgcgatcccctgacctgcgaccgcgaaggagacggcgagcccaagagcgcccacrcgtctcccgagaagaagaaggccaaggagctccctgaaatggacgccacctccagccgggtgtggatcctgaccagcaccctgaccaccagcaaggtggt

SEQ ID NO: 91952 - DNA, 105 bp, Homo sapiens
gacgattctcctcaggctttggccctgcaagcaaacccacatatctgctctgtatgtaataaatgtcttaacgtcgtagctgcctgttcctgggcccaaaycgaa

SEQ ID NO: 91953 - DNA, 201 bp, Homo sapiens
tcgggggcaagctcgtgcctgcgggggaccactggcacctgagtgacctcggccagctgcagtccagctccagctaccagtgtccacaggatgaaatgtcygagtcaggccagtcctcggcggccgccacacccagcaccacaggcaccaagtccaacacgcccacatcctccgtgccctcggccgccgtcacacccctca

SEQ ID NO: 91954 - DNA, 201 bp, Homo sapiens
agaagtcgaccatctggcagttcttcagccgcctcttcagctcttcctccagcccccctccggccaagcgcccctatccctcggtgaacatccactacaaktcacccaccactgccggcttcagccagcgccgcaaccatgccatgtgcccgatctcggcaggcagccggcccctggaattcttccctgacgacgactgca

SEQ ID NO: 91955 - DNA, 201 bp, Homo sapiens
gccagagctggacatgtgtccagagacccgcctggaccgcacaggaagcagcccaacccagggcatcgtgaacaaagctttcggcatcaacaccgactccstgtaccatgagctgtcgacggcagggtctgaggtcatcggggatgtggacgaaggggccgacctcctaggtgaaacctccgcaccttctgtttcaggaat

SEQ ID NO: 91956 - DNA, 201 bp, Homo sapiens
ctgcccaggtgcctgcaccccagccggccttctctggggcctccccgtcgtcaagcctctatcctgtctgtccccaccccagctgtcccctgcccagggarctggcataaaagcacgaggcccggctccctggggcagctgcttgagaacagagactgctaccccatcctgcccatgcaggcaggctcttgccagccccgt

SEQ ID NO: 91957 - DNA, 201 bp, Homo sapiens
actgctccatggcccaggcccagctatgcttccatgggcaccgcgatgccgtgaagttctttgtctcggtgccagggaacgtgctggccaccctgaatggsagtgtgctggacagcccagccgagggccctgggccagctgcccctgcctcggaggtcgagggccagaagctgcggaacgtgctggtgctgagcggcgggg

SEQ ID NO: 91958 - DNA, 201 bp, Homo sapiens
ccaacgggggccaggaggacacgcggatgaagaacgtgccggtgccggtgtactgccgccctctggtggagaaggaccccaccatgaagctgtggtgtgcygcgggcgtcaacctgagcgggtggaggcccaatgaggacgacgctgggaatggagtcaagccagcgccaggccgcgatcccctgacctgcgaccgcgaag

SEQ ID NO: 91959 - DNA, 201 bp, Homo sapiens; identical to SEQ ID NO: 91944

SEQ ID NO: 91960 - DNA, 201 bp, Homo sapiens; identical to SEQ ID NO: 91945

SEQ ID NO: 91961 - DNA, 201 bp, Homo sapiens; identical to SEQ ID NO: 91946

SEQ ID NO: 91962 - DNA, 201 bp, Homo sapiens; identical to SEQ ID NO: 91947

SEQ ID NO: 91963 - DNA, 201 bp, Homo sapiens
gtgagaaggcgctgcgcaggcaggcggaggagaaattcattgagtttgaagatgctctggaacaagagaagaaagagctgcaaatccaggtggagcactaygagttccagacgcgccagctggagctgaaggccaagaactatgccgatcagatttcccggttggaggagcgggagtcggagatgaagaaggagtacaatg

SEQ ID NO: 91964 - DNA, 201 bp, Homo sapiens; identical to SEQ ID NO: 91949

SEQ ID NO: 91965 - DNA, 201 bp, Homo sapiens; identical to SEQ ID NO: 91950

SEQ ID NO: 91966 - DNA, 201 bp, Homo sapiens; identical to SEQ ID NO: 91951

SEQ ID NO: 91967 - DNA, 105 bp, Homo sapiens; identical to SEQ ID NO: 91952

SEQ ID NO: 91968 - DNA, 201 bp, Homo sapiens; identical to SEQ ID NO: 91955

SEQ ID NO: 91969 - DNA, 201 bp, Homo sapiens; identical to SEQ ID NO: 91954

SEQ ID NO: 91970 - DNA, 201 bp, Homo sapiens; identical to SEQ ID NO: 91953

SEQ ID NO: 91971 - DNA, 201 bp, Homo sapiens; identical to SEQ ID NO: 91956

SEQ ID NO: 91972 - DNA, 201 bp, Homo sapiens; identical to SEQ ID NO: 91957

SEQ ID NO: 91973 - DNA, 201 bp, Homo sapiens; identical to SEQ ID NO: 91958

SEQ ID NO: 91974 - DNA, 201 bp, Homo sapiens
gctacctggctaaagacggctcgaaattctactgcagccggacacaaaatgaaggccaccccaaatggtttgttcttggtgttgggcaagtcataaaaggyctagacattgctatgacagatatgtgccctggagaaaagcgaaaagtagttatacccccttcatttgcatacggaaaggaaggctatggtagtacttgaa

SEQ ID NO: 91975 - DNA, 201 bp, Homo sapiens
atatttttaagaagaatgaccatgatggtgatggcttcatttctcccaaggaatacaatgtataccaacacgatgaactatagcatatttgtatttctactttttttttttagctatttactgtactttatgtataaaacaaagtcacttttctccaagttgtatttgctatttttcccctatgagaagatattttgatct

SEQ ID NO: 91976 - DNA, 201 bp, Homo sapiens
tttatctgtggggcctttttactgctcagagacaaaagaaagaggagagcaccgaagaagtgaaaatagaagttttgcatcgtccagaaaactgctctaaracaagcaagaagggagacctactaaatgcccattatgacggctacctggctaaagacggctcgaaattctactgcagccggacacaaaatgaaggccacc

SEQ ID NO: 91977 - DNA, 201 bp, Homo sapiens; identical to SEQ ID NO: 91974

SEQ ID NO: 91978 - DNA, 201 bp, Homo sapiens; identical to SEQ ID NO: 91976

SEQ ID NO: 91979 - DNA, 201 bp, Homo sapiens
gctacctggctaaagacggctcgaaattctactgcagccggacacaaaatgaaggccaccccaaatggtttgttcttggtgttgggcaagtcataaaaggyctagacattgctatgacagatatgtgccctggagaaaagcgaaaagtagttatacccccttcatttgcatacggaaaggaaggctatgcagaaggcaaga

SEQ ID NO: 91980 - DNA, 201 bp, Homo sapiens; identical to SEQ ID NO: 91976

SEQ ID NO: 91981 - DNA, 201 bp, Homo sapiens; identical to SEQ ID NO: 91979

SEQ ID NO: 91982 - DNA, 201 bp, Homo sapiens; identical to SEQ ID NO: 91975

SEQ ID NO: 91983 - DNA, 201 bp, Homo sapiens; identical to SEQ ID NO: 91976

SEQ ID NO: 91984 - DNA, 201 bp, Homo sapiens
gctacctggctaaagacggctcgaaattctactgcagccggacacaaaatgaaggccaccccaaatggtttgttcttggtgttgggcaagtcataaaaggyctagacattgctatgacagatatgtgccctggagaaaagcgaaaagtagttatacccccttcatttgcatacggaaaggaaggctatgtacttgaagaag

SEQ ID NO: 91985 - DNA, 201 bp, Homo sapiens; identical to SEQ ID NO: 91976

SEQ ID NO: 91986 - DNA, 201 bp, Homo sapiens
tgaagtgtttgcccctggaccgggctctggtattcagaaacagcgggagccacggaagggccgcctcatcgtgtgtggccatgggacgctggagcgggacrgagtcttctgtctcctcagcgatgatcatggtgcctcctggcgctacggaagtggggtcagcggcatcccctacggtcagcccaagcaggaaaatgattt

SEQ ID NO: 91987 - DNA, 201 bp, Homo sapiens
gccacggaagggccgcctcatcgtgtgtggccatgggacgctggagcgggacggagtcttctgtctcctcagcgatgatcatggtgcctcctggcgctacrgaagtggggtcagcggcatcccctacggtcagcccaagcaggaaaatgatttcaatcctgatgaatgccagccctatgagctcccagatggctcagtcgt

SEQ ID NO: 91988 - DNA, 201 bp, Homo sapiens
gagagcatctccgtggccaaaatcagtgtctatgggacactctgagctgtgccactgccacaggggtattctgccttcaggactctgccttcaggaacacrggtctgtagagggtctgctggagacgcctgaaagacagttccatcttcctttagactccagccttggcaaaatcaccttccctttaccagggaaatcact

SEQ ID NO: 91989 - DNA, 201 bp, Homo sapiens
gactccagccttggcaaaatcaccttccctttaccagggaaatcacttcctttaggactgaaagctaggcgtcctctcccacaaaaaagtcctgccctcawctgagaatactgtctttccatatggctaagtgtggccccaccaccctctctgccctcccgggacattgattggtcctgtcttgggcaggtctagtgagct

SEQ ID NO: 91990 - DNA, 201 bp, Homo sapiens
tggggaaggctgagcctcctctttggtgttgcggtaagataaccgacagggctggtgaaagtccccagatggcaggatatttggtttcagagtaaggactrggtgcaccaccatgactgactatcaatcaaaatgtttgtaacttaaaatttttaatgaaggataatgaatatttgtagagtctctatggttctgtcaatg

SEQ ID NO: 91991 - DNA, 201 bp, Homo sapiens
aagtgtggccccaccaccctctctgccctcccgggacattgattggtcctgtcttgggcaggtctagtgagctgtagaattgaatcaatgtgaactcaggkaactggggaaggctgagcctcctctttggtgttgcggtaagataaccgacagggctggtgaaagtccccagatggcaggatatttggtttcagagtaagg

SEQ ID NO: 91992 - DNA, 201 bp, Homo sapiens
ccacaaaaaagtcctgccctcatctgagaatactgtctttccatatggctaagtgtggccccaccaccctctctgccctcccgggacattgattggtcctrtcttgggcaggtctagtgagctgtagaattgaatcaatgtgaactcagggaactggggaaggctgagcctcctctttggtgttgcggtaagataaccgac

SEQ ID NO: 91993 - DNA, 201 bp, Homo sapiens
gtgaccatggagcaactgctgtgggtgagcgggagacagatcggctcagtggacaccttccgcatcccgctcatcacagccactccgcggggcactcttckcgcctttgctgaggcgaggaaaatgtcctcatccgatgagggggccaagttcatcgccctgcggaggtccatggaccagggcagcacatggtctcctaca

SEQ ID NO: 91994 - DNA, 201 bp, Homo sapiens
tggtgcctcctggcgctacggaagtggggtcagcggcatcccctacggtcagcccaagcaggaaaatgatttcaatcctgatgaatgccagccctatgagytcccagatggctcagtcgtcatcaatgcccgaaaccagaacaactaccactgccactgccgaattgtcctccgcagctatgatgcctgtgatacactaag

SEQ ID NO: 91995 - DNA, 201 bp, Homo sapiens
caactaccactgccactgccgaattgtcctccgcagctatgatgcctgtgatacactaaggccccgtgatgtgaccttcgaccctgagctcgtggaccctktggtagctgcaggagctgtagtcaccagctccggcattgtcttcttctccaacccagcacatccagagttccgagtgaacctgaccctgcgatggagctt

SEQ ID NO: 91996 - DNA, 201 bp, Homo sapiens
ctaaggccccgtgatgtgaccttcgaccctgagctcgtggaccctgtggtagctgcaggagctgtagtcaccagctccggcattgtcttcttctccaaccmagcacatccagagttccgagtgaacctgaccctgcgatggagcttcagcaatggtacctcatggcggaaagagacagtccagctatggccaggccccagt

SEQ ID NO: 91997 - DNA, 201 bp, Homo sapiens
aattagagtccgggaagcgcggcggggcctccagaccggggcgggcttaagggtgacatctgcgctttaaagggtccgggtcagctgactcccgactctgkggagtctagctgccagggtcgcggcagctgcggggagagatgactggggagcgacccagcacggcgctcccggacagacgctgggggccgcggattctgg

SEQ ID NO: 91998 - DNA, 201 bp, Homo sapiens
cctgaccctgcgatggagcttcagcaatggtacctcatggcggaaagagacagtccagctatggccaggccccagtggctattcatccctggcaaccctgkagggcagcatggatggagaggagcaggccccccagctctacgtcctgtatgagaaaggccggaaccactacacagagagcatctccgtggccaaaatcag

SEQ ID NO: 91999 - DNA, 201 bp, Homo sapiens
gtcttcttctccaacccagcacatccagagttccgagtgaacctgaccctgcgatggagcttcagcaatggtacctcatggcggaaagagacagtccagcyatggccaggccccagtggctattcatccctggcaaccctggagggcagcatggatggagaggagcaggccccccagctctacgtcctgtatgagaaaggc

SEQ ID NO: 92000 - DNA, 201 bp, Homo sapiens
tgccagccctatgagctcccagatggctcagtcgtcatcaatgcccgaaaccagaacaactaccactgccactgccgaattgtcctccgcagctatgatgyctgtgatacactaaggccccgtgatgtgaccttcgaccctgagctcgtggaccctgtggtagctgcaggagctgtagtcaccagctccggcattgtcttc

SEQ ID NO: 92001 - DNA, 201 bp, Homo sapiens
ttcctgctgctgtctctggcagcctcctggtccaaggctgagaacgacttcggtctggtgcagccgctggtgaccatggagcaactgctgtgggtgagcgkgagacagatcggctcagtggacaccttccgcatcccgctcatcacagccactccgcggggcactcttctcgcctttgctgaggcgaggaaaatgtcctca

SEQ ID NO: 92002 - DNA, 201 bp, Homo sapiens
agctgcggggagagatgactggggagcgacccagcacggcgctcccggacagacgctgggggccgcggattctgggcttctggggaggctgtagggtttgrgtgtttgccgcgatcttcctgctgctgtctctggcagcctcctggtccaaggctgagaacgacttcggtctggtgcagccgctggtgaccatggagcaac

SEQ ID NO: 92003 - DNA, 201 bp, Homo sapiens
cctggaccgggctctggtattcagaaacagcgggagccacggaagggccgcctcatcgtgtgtggccatgggacgctggagcgggacggagtcttctgtcwcctcagcgatgatcatggtgcctcctggcgctacggaagtggggtcagcggcatcccctacggtcagcccaagcaggaaaatgatttcaatcctgatgaa

SEQ ID NO: 92004 - DNA, 201 bp, Homo sapiens
ctgagcctcctctttggtgttgcggtaagataaccgacagggctggtgaaagtccccagatggcaggatatttggtttcagagtaaggactaggtgcaccmccatgactgactatcaatcaaaatgtttgtaacttaaaatttttaatgaaggataatgaatatttgtagagtctctatggttctgtcaatgcacatcttc

SEQ ID NO: 92005 - DNA, 201 bp, Homo sapiens
cagcggcatcccctacggtcagcccaagcaggaaaatgatttcaatcctgatgaatgccagccctatgagctcccagatggctcagtcgtcatcaatgccygaaaccagaacaactaccactgccactgccgaattgtcctccgcagctatgatgcctgtgatacactaaggccccgtgatgtgaccttcgaccctgagct

SEQ ID NO: 92006 - DNA, 201 bp, Homo sapiens
ggagtcttctgtctcctcagcgatgatcatggtgcctcctggcgctacggaagtggggtcagcggcatcccctacggtcagcccaagcaggaaaatgattwcaatcctgatgaatgccagccctatgagctcccagatggctcagtcgtcatcaatgcccgaaaccagaacaactaccactgccactgccgaattgtcctc

SEQ ID NO: 92007 - DNA, 201 bp, Homo sapiens
cagccgctggtgaccatggagcaactgctgtgggtgagcgggagacagatcggctcagtggacaccttccgcatcccgctcatcacagccactccgcgggscactcttctcgcctttgctgaggcgaggaaaatgtcctcatccgatgagggggccaagttcatcgccctgcggaggtccatggaccagggcagcacatgg

SEQ ID NO: 92008 - DNA, 201 bp, Homo sapiens
cagctatgatgcctgtgatacactaaggccccgtgatgtgaccttcgaccctgagctcgtggaccctgtggtagctgcaggagctgtagtcaccagctccrgcattgtcttcttctccaacccagcacatccagagttccgagtgaacctgaccctgcgatggagcttcagcaatggtacctcatggcggaaagagacagt

SEQ ID NO: 92009 - DNA, 201 bp, Homo sapiens
aggagtagtatttcttttctactccctttgtgctcacaaggccggctgccaggtggcctctaccatgttggtatggagcaaggatgatggtgtttcctggrgcacaccccggaatctctccctggatattggcactgaagtgtttgcccctggaccgggctctggtattcagaaacagcgggagccacggaagggccgcct

SEQ ID NO: 92010 - DNA, 201 bp, Homo sapiens
catccagagttccgagtgaacctgaccctgcgatggagcttcagcaatggtacctcatggcggaaagagacagtccagctatggccaggccccagtggctrttcatccctggcaaccctggagggcagcatggatggagaggagcaggccccccagctctacgtcctgtatgagaaaggccggaaccactacacagagagc

SEQ ID NO: 92011 - DNA, 201 bp, Homo sapiens
gccaagttcatcgccctgcggaggtccatggaccaggaaacagcgggagccacggaagggccgcctcatcgtgtgtggccatgggacgctggagcgggacrgagtcttctgtctcctcagcgatgatcatggtgcctcctggcgctacggaagtggggtcagcggcatcccctacggtcagcccaagcaggaaaatgattt

SEQ ID NO: 92012 - DNA, 201 bp, Homo sapiens; identical to SEQ ID NO: 91987

SEQ ID NO: 92013 - DNA, 201 bp, Homo sapiens; identical to SEQ ID NO: 91988

SEQ ID NO: 92014 - DNA, 201 bp, Homo sapiens; identical to SEQ ID NO: 91989

SEQ ID NO: 92015 - DNA, 201 bp, Homo sapiens; identical to SEQ ID NO: 91990

SEQ ID NO: 92016 - DNA, 201 bp, Homo sapiens; identical to SEQ ID NO: 91991

SEQ ID NO: 92017 - DNA, 201 bp, Homo sapiens; identical to SEQ ID NO: 91992

SEQ ID NO: 92018 - DNA, 201 bp, Homo sapiens
gtgaccatggagcaactgctgtgggtgagcgggagacagatcggctcagtggacaccttccgcatcccgctcatcacagccactccgcggggcactcttckcgcctttgctgaggcgaggaaaatgtcctcatccgatgagggggccaagttcatcgccctgcggaggtccatggaccaggaaacagcgggagccacggaa

SEQ ID NO: 92019 - DNA, 201 bp, Homo sapiens; identical to SEQ ID NO: 91994

SEQ ID NO: 92020 - DNA, 201 bp, Homo sapiens; identical to SEQ ID NO: 91995

SEQ ID NO: 92021 - DNA, 201 bp, Homo sapiens; identical to SEQ ID NO: 91996

SEQ ID NO: 92022 - DNA, 201 bp, Homo sapiens; identical to SEQ ID NO: 91997

SEQ ID NO: 92023 - DNA, 201 bp, Homo sapiens; identical to SEQ ID NO: 91998

SEQ ID NO: 92024 - DNA, 201 bp, Homo sapiens; identical to SEQ ID NO: 91999

SEQ ID NO: 92025 - DNA, 201 bp, Homo sapiens; identical to SEQ ID NO: 92000

SEQ ID NO: 92026 - DNA, 201 bp, Homo sapiens; identical to SEQ ID NO: 92002

SEQ ID NO: 92027 - DNA, 201 bp, Homo sapiens; identical to SEQ ID NO: 92001

SEQ ID NO: 92028 - DNA, 201 bp, Homo sapiens
ccctgcggaggtccatggaccaggaaacagcgggagccacggaagggccgcctcatcgtgtgtggccatgggacgctggagcgggacggagtcttctgtcwcctcagcgatgatcatggtgcctcctggcgctacggaagtggggtcagcggcatcccctacggtcagcccaagcaggaaaatgatttcaatcctgatgaa

SEQ ID NO: 92029 - DNA, 201 bp, Homo sapiens; identical to SEQ ID NO: 92004

SEQ ID NO: 92030 - DNA, 201 bp, Homo sapiens
cagccgctggtgaccatggagcaactgctgtgggtgagcgggagacagatcggctcagtggacaccttccgcatcccgctcatcacagccactccgcgggscactcttctcgcctttgctgaggcgaggaaaatgtcctcatccgatgagggggccaagttcatcgccctgcggaggtccatggaccaggaaacagcggga

SEQ ID NO: 92031 - DNA, 201 bp, Homo sapiens; identical to SEQ ID NO: 92005

SEQ ID NO: 92032 - DNA, 201 bp, Homo sapiens; identical to SEQ ID NO: 92006

SEQ ID NO: 92033 - DNA, 201 bp, Homo sapiens; identical to SEQ ID NO: 92008

SEQ ID NO: 92034 - DNA, 201 bp, Homo sapiens; identical to SEQ ID NO: 92010

SEQ ID NO: 92035 - DNA, 201 bp, Homo sapiens
gcaggctgccctttagagaggtctacctccatgccatcgtgcgagatgctcacggccggaagatgagcaagtctctaggcaatgtcatcgatcccctggaygtcatctatggaatctccctgcagggcctccacaaccagctgctgaacagcaacctggatcccagcgaggtggagaaggccaaagaagggcagaaagctg

SEQ ID NO: 92036 - DNA, 201 bp, Homo sapiens
ccctgcgggccgactacaacctcacccggatccggcctgactgtttcctggaagtggcggatgaggccacgggcgccctggcatcggcggtgtcgggctaygtgcaggccctggccagcgcaggtgtggtggctgttctggccctgggggctcccgccccccagggttgcgctgtggctctggcttctgatcgctgctcca

SEQ ID NO: 92037 - DNA, 201 bp, Homo sapiens
gtgaagatcacccccgcacatgaccaaaatgactatgaagttgggcagcggcacgggctggaggccatcagcatcatggactcccggggggccctcatcartgtgcctccgcctttcctgggcctgcccaggtttgaggccaggaaagcggtgctggtggcgctgaaggagcggggactgttccgtggcattgaggacaac

SEQ ID NO: 92038 - DNA, 201 bp, Homo sapiens
cagcccggaggccatgagagcctggtggaccgctggatccgcagccgcctgacagaggctgtgaggctcagcaatcaaggcttccaggcctacgacttccyggccgtcaccactgcccagtacagcttctggctctatgagctctgtgatgtctacttggagtgcctgaaacctgtactgaatggggtggaccaggtggca

SEQ ID NO: 92039 - DNA, 201 bp, Homo sapiens
gctgcacacctacttggccggggaggcccccactctggctgacctggcggctgtcacagccttgctgctgcctttccgatacgtcctagacccacctgccygccggatctggaataatgtgactcgctggtttgtcacgtgtgtccggcagccagaattccgagccgtgctaggagaagtggttctatactcaggagccag

SEQ ID NO: 92040 - DNA, 201 bp, Homo sapiens
cacccccgcacatgaccaaaatgactatgaagttgggcagcggcacgggctggaggccatcagcatcatggactcccggggggccctcatcaatgtgcctycgcctttcctgggcctgcccaggtttgaggccaggaaagcggtgctggtggcgctgaaggagcggggactgttccgtggcattgaggacaaccccatggt

SEQ ID NO: 92041 - DNA, 201 bp, Homo sapiens
ccctgactcgatggcaccgcatgcgtggggagaccaccctgtggaaccctggctgtgaccatgcaggtattgccacccaggtggtggtggagaagaagctrtggcgtgagcagggactgagccggcaccagctgggccgcgaggcctttctacaggaagtctggaagtggaaggaggagaaaggtgaccggatttaccacc

SEQ ID NO: 92042 - DNA, 201 bp, Homo sapiens
atgggcgtcctaatgtgtcagcagcaaatccccgaggtgtcttcatgatgtgcatcccaccccccaatgtgacaggctccctgcacctgggccatgcactsaccaacgccatccaggactccctgactcgatggcaccgcatgcgtggggagaccaccctgtggaaccctggctgtgaccatgcaggtattgccacccagg

SEQ ID NO: 92043 - DNA, 201 bp, Homo sapiens
gctggtttgtcacgtgtgtccggcagccagaattccgagccgtgctaggagaagtggttctatactcaggagccaggcctctctctcatcagccaggcccygaggctcctgccctcccaaagacagctgctcagctcaagaaagaggcaaagaaacgggagaagctagagaaattccaacagaagcagaagatccaacagc

SEQ ID NO: 92044 - DNA, 201 bp, Homo sapiens
agccctcatagccgctcgctatggggaggctggggagggtcccggatggggaggagcccacccccgcatctgtctccagccacccccgactagcaggactmcctttcccccaccccgcctgccggccctggagcaggggcccggtgggctctgggtgtggggggccacggctgtggcccagctgctgtggccagcaggcct

SEQ ID NO: 92045 - DNA, 201 bp, Homo sapiens
gccctcatagccgctcgctatggggaggctggggagggtcccggatggggaggagcccacccccgcatctgtctccagccacccccgactagcaggactcsctttcccccaccccgcctgccggccctggagcaggggcccggtgggctctgggtgtggggggccacggctgtggcccagctgctgtggccagcaggcctg

SEQ ID NO: 92046 - DNA, 201 bp, Homo sapiens
tgtggtggctgttctggccctgggggctcccgccccccagggttgcgctgtggctctggcttctgatcgctgctccatccacctgcagcttcaggggctgrtggaccctgcacgggagctgggcaagctgcaagccaagcgagttgaggcccagcggcaggcccagcgtctgcgggaacgccgtgctgcctcgggctatcc

SEQ ID NO: 92047 - DNA, 201 bp, Homo sapiens; identical to SEQ ID NO: 92035

SEQ ID NO: 92048 - DNA, 201 bp, Homo sapiens; identical to SEQ ID NO: 92036

SEQ ID NO: 92049 - DNA, 201 bp, Homo sapiens; identical to SEQ ID NO: 92037

SEQ ID NO: 92050 - DNA, 201 bp, Homo sapiens; identical to SEQ ID NO: 92038

SEQ ID NO: 92051 - DNA, 201 bp, Homo sapiens; identical to SEQ ID NO: 92039

SEQ ID NO: 92052 - DNA, 201 bp, Homo sapiens; identical to SEQ ID NO: 92040

SEQ ID NO: 92053 - DNA, 201 bp, Homo sapiens; identical to SEQ ID NO: 92041

SEQ ID NO: 92054 - DNA, 201 bp, Homo sapiens; identical to SEQ ID NO: 92042

SEQ ID NO: 92055 - DNA, 201 bp, Homo sapiens; identical to SEQ ID NO: 92043

SEQ ID NO: 92056 - DNA, 201 bp, Homo sapiens; identical to SEQ ID NO: 92044

SEQ ID NO: 92057 - DNA, 201 bp, Homo sapiens; identical to SEQ ID NO: 92045

SEQ ID NO: 92058 - DNA, 201 bp, Homo sapiens; identical to SEQ ID NO: 92046

SEQ ID NO: 92059 - DNA, 109 bp, Homo sapiens
tacagcccygccgagagcgtgaactatcgctgcggaggggcagacctggaccggtggaaggccgggcggaagtgcgcgcctggggccgccttggttaccgcgttttccg

SEQ ID NO: 92060 - DNA, 156 bp, Homo sapiens
aggtggaagcttacacatctccctcagcctctggtttttcagcacttgggattggggttaaacctttaaaaacggctgtcaggtttgatctcagtgtaacracatggccagtgcctgttccccactcccttgccccaaaaggatctggaacacagg

SEQ ID NO: 92061 - DNA, 201 bp, Homo sapiens
gaacagagctggattccttgtgcctcatatgccccaatgctggtctcagtaaaacactgaggtggaagcttacacatctccctcagcctctggtttttcascacttgggattggggttaaacctttaaaaacggctgtcaggtttgatctcagtgtaacaacatggccagtgcctgttccccactcccttgccccaaaagg

SEQ ID NO: 92062 - DNA, 201 bp, Homo sapiens
cctggggccgccttggttaccgcgttttccgctcctcgctacgtcatcgttgtgagcccgctatcagcggccagcgcgggcgcggccggagaccgtggggmccccggttgccgccccctcgggagccaccatgttggtgataccccccggactgagcgaggaagaggaggctctgcagaagaaattcaacaagctcaagaa

SEQ ID NO: 92063 - DNA, 195 bp, Homo sapiens
tgcctcatatgccccaatgctggtctcagtaaaacactgaggtggaagcttacacatctccctcagcctctggtttttcagcacttgggattggggttaarcctttaaaaacggctgtcaggtttgatctcagtgtaacaacatggccagtgcctgttccccactcccttgccccaaaaggatctggaacacagg

SEQ ID NO: 92064 - DNA, 201 bp, Homo sapiens
gagcgggatcgagaccgagaccgagagggtcctttccgcaggtcggattcattccctgaacggcgagcccctaggaaagggaatactctctatgtatatgkagaagacatgacacccacccttctccgtggggccttctctccttttggaaacatcattgacctctccatggacccacccagaaactgtgccttcgtcacc

SEQ ID NO: 92065 - DNA, 201 bp, Homo sapiens
tggaccggtggaaggccgggcggaagtgcgcgcctggggccgccttggttaccgcgttttccgctcctcgctacgtcatcgttgtgagcccgctatcagcrgccagcgcgggcgcggccggagaccgtggggcccccggttgccgccccctcgggagccaccatgttggtgataccccccggactgagcgaggaagaggag

SEQ ID NO: 92066 - DNA, 201 bp, Homo sapiens
accgcagccatgagaggaaccgggacagagaccgagatcgggagcgggatcgagaccgggatcgagacagagacagagagcgggacagggatcgggatcgrgatcgagatcgagaccgggaacgggacagggatcgggagcgggatcgagaccgagaccgagagggtcctttccgcaggtcggattcattccctgaacggc

SEQ ID NO: 92067 - DNA, 183 bp, Homo sapiens
cccaatgctggtctcagtaaaacactgaggtggaagcttacacatctccctcagcctctggtttttcagcacttgggattggggttaaacctttaaaaacrgctgtcaggtttgatctcagtgtaacaacatggccagtgcctgttccccactcccttgccccaaaaggatctggaacacagg

SEQ ID NO: 92068 - DNA, 109 bp, Homo sapiens; identical to SEQ ID NO: 92059

SEQ ID NO: 92069 - DNA, 155 bp, Homo sapiens
aggtggaagcttacacatctccctcagcctctggtttttcagcacttgggattggggttaaacctttaaaaacggctgtcaggtttgatctcagtgtaacracatggccagtgcctgttccccactcccttgccccaaaaggatctggaacacag

SEQ ID NO: 92070 - DNA, 201 bp, Homo sapiens; identical to SEQ ID NO: 92061

SEQ ID NO: 92071 - DNA, 201 bp, Homo sapiens; identical to SEQ ID NO: 92062

SEQ ID NO: 92072 - DNA, 194 bp, Homo sapiens
tgcctcatatgccccaatgctggtctcagtaaaacactgaggtggaagcttacacatctccctcagcctctggtttttcagcacttgggattggggttaarcctttaaaaacggctgtcaggtttgatctcagtgtaacaacatggccagtgcctgttccccactcccttgccccaaaaggatctggaacacag

SEQ ID NO: 92073 - DNA, 201 bp, Homo sapiens; identical to SEQ ID NO: 92064

SEQ ID NO: 92074 - DNA, 201 bp, Homo sapiens; identical to SEQ ID NO: 92065

SEQ ID NO: 92075 - DNA, 201 bp, Homo sapiens; identical to SEQ ID NO: 92066

SEQ ID NO: 92076 - DNA, 182 bp, Homo sapiens
cccaatgctggtctcagtaaaacactgaggtggaagcttacacatctccctcagcctctggtttttcagcacttgggattggggttaaacctttaaaaacrgctgtcaggtttgatctcagtgtaacaacatggccagtgcctgttccccactcccttgccccaaaaggatctggaacacag

SEQ ID NO: 92077 - DNA, 109 bp, Homo sapiens; identical to SEQ ID NO: 92059

SEQ ID NO: 92078 - DNA, 155 bp, Homo sapiens; identical to SEQ ID NO: 92069

SEQ ID NO: 92079 - DNA, 201 bp, Homo sapiens; identical to SEQ ID NO: 92061

SEQ ID NO: 92080 - DNA, 201 bp, Homo sapiens; identical to SEQ ID NO: 92062

SEQ ID NO: 92081 - DNA, 194 bp, Homo sapiens; identical to SEQ ID NO: 92072

SEQ ID NO: 92082 - DNA, 201 bp, Homo sapiens; identical to SEQ ID NO: 92064

SEQ ID NO: 92083 - DNA, 201 bp, Homo sapiens; identical to SEQ ID NO: 92065

SEQ ID NO: 92084 - DNA, 182 bp, Homo sapiens; identical to SEQ ID NO: 92076

SEQ ID NO: 92085 - DNA, 201 bp, Homo sapiens
cggaaaacgcggtaaccaaggcggccccaggcgcgcacttccgcccggccttccaccggtccaggtctgcccctccgcagcgatagttcacgctctcggcrgggctgtaccggaagttgcctctacttccgcccgttccggggcggggcttacttcgcagcgactacttgccgcacttccgggctgccaggcagctgctgt

SEQ ID NO: 92086 - DNA, 201 bp, Homo sapiens
aggcggccccaggcgcgcacttccgcccggccttccaccggtccaggtctgcccctccgcagcgatagttcacgctctcggcggggctgtaccggaagttscctctacttccgcccgttccggggcggggcttacttcgcagcgactacttgccgcacttccgggctgccaggcagctgctgtggctccaggatgatggag

SEQ ID NO: 92087 - DNA, 201 bp, Homo sapiens
tccaggaactgctgcgtctggctcaggcccacccagccggacctcccaccctcgaccctgtcaatgacctgcagctcaaagatatgtcagttgtagagggygggcactgtgaagctggcagggcgggtggcttgtgccatgagcagccatgagttgctcctcactgagctcatgtttgacaatgcactgagcaccctgcgg

SEQ ID NO: 92088 - DNA, 201 bp, Homo sapiens
ttcagaaacaggccatcctgcacttggaacggcatgactctgtctttgtcgcagctcacacatctgcaggaaaaacagttgtggctgaatatgccattgcyctggcccagaaacacatgacacgcaccatctacacttcgcccatcaaggccctgagcaaccagaagttccgggacttccgaaacacattcggggatgtgg

SEQ ID NO: 92089 - DNA, 201 bp, Homo sapiens
cgcagagcaacgcaaagaggaagaacagagaaacggctatgagaaaaagggccgaagagtgagaagcagagggccttacccgagggggcggcaaccggggkccccacggtctccggccgcgcccgcgctggccgctgatagcgggctcacaacgatgacgtagcgaggagcggaaaacgcggtaaccaaggcggccccagg

SEQ ID NO: 92090 - DNA, 201 bp, Homo sapiens
ctcccctgttggtgatttctatcgcctcattccccagccagccttccagtgggcatttgagccagatgtgtttcagaaacaggccatcctgcacttggaayggcatgactctgtctttgtcgcagctcacacatctgcaggaaaaacagttgtggctgaatatgccattgccctggcccagaaacacatgacacgcaccat

SEQ ID NO: 92091 - DNA, 120 bp, Homo sapiens
cgtagcgcccgcagagcaaygcaaagaggaagaacagagaaacggctatgagaaaaagggccgaagagtgagaagcagagggccttacccgagggggcggcaaccgggggccccacggtc

SEQ ID NO: 92092 - DNA, 201 bp, Homo sapiens
acggctatgagaaaaagggccgaagagtgagaagcagagggccttacccgagggggcggcaaccgggggccccacggtctccggccgcgcccgcgctggcygctgatagcgggctcacaacgatgacgtagcgaggagcggaaaacgcggtaaccaaggcggccccaggcgcgcacttccgcccggccttccaccggtcca

SEQ ID NO: 92093 - DNA, 201 bp, Homo sapiens
gaaagatcttcttactattccacctggtttcaagaaaggcatggactttgcaccaaaagattgtccaactccagctcctggactactaagccttagctgtmtgttggagcctctggatttgggtgggggtgacgaggatgagaatgaggcagtgggacagccaggaggtcccagaggggacactgtttcagcctctccctg

SEQ ID NO: 92094 - DNA, 201 bp, Homo sapiens
gacttcagcaagaggcagcagccaaaattcaagtcagagatgctagggaggcccttctcctccagaggggcacgtagaggcagggaggggcagtggtctgsgagtttcctccagcctgagggagaccatgaagtggtggggttgtagtgagggggctcccccagcctaagggagactgtgaagtggaggttgtagtaagag

SEQ ID NO: 92095 - DNA, 201 bp, Homo sapiens
gagccccagtcccatccgacctacaggcccaaagacacccaaccacaggccagatactgggttacaaagaggtcttgctggagaacacaaatctctcggcyacaacctccttgtctcttcgccggcctccagggccagcctcccagtccttatggggaaatccaactcagtatcccttctggccaggggggatggatgaac

SEQ ID NO: 92096 - DNA, 201 bp, Homo sapiens
gaagtggtggggttgtagtgagggggctcccccagcctaagggagactgtgaagtggaggttgtagtaagagggcttccacagcctgagggaggcttctgkgggagagaagatcttaccccagatcttaagatctgctccctcttcaggaaggatcctccccttgcagccgtgaccactgctgtccaggaactgctgcgtc

SEQ ID NO: 92097 - DNA, 201 bp, Homo sapiens
accagaagttccgggacttccgaaacacattcggggatgtggggctgctcaccggggatgtacagctgcatccggaggcctcctgcctcatcatgaccacrgagatccttcgctccatgctgtacagtggctcagatgttattcgggacctggagtgggtcatctttgatgaggttcactatatcaacgatgtcgagcgtg

SEQ ID NO: 92098 - DNA, 201 bp, Homo sapiens
caacgcattgggagtgatcctacaggtctcctcgaactccaccagcagagtattcacaaccctggtcttgtgtgataagcccttgtcccaggacccacagracagggggccagccactgcagaggtgccctatccagatgacctcgtgggattcaagctgttcctgcctgaagggccttgtgaccacaccgtggtcaagct

SEQ ID NO: 92099 - DNA, 201 bp, Homo sapiens
cagggcggaggggcctggaccccacaggcaccgttatcctgctctgcaagggccgagtgcccgagatggcagacctgcaccgcatgatgatggggaagccrtcccagctgcagtcccagttccgcctcacgtacactatgatcctcaacttgctgcgagtggatgccctcagggtggaggacatgatgaagaggagcttct

SEQ ID NO: 92100 - DNA, 201 bp, Homo sapiens
ccctggggacgctggggatcagctcccaaacaccctcaagcagggaatagaacgtgtccgggctgtggccaagcggattggtgaggtccaggtggcttgtsgcctgaaccagacggtggaggaatttgtgggggagctgaattttgggctggttgaggttgtatatgagtgggcccggggcatgcccttctccgagttggc

SEQ ID NO: 92101 - DNA, 201 bp, Homo sapiens
gaggtcttgctggagaacacaaatctctcggctacaacctccttgtctcttcgccggcctccagggccagcctcccagtccttatggggaaatccaactcrgtatcccttctggccaggggggatggatgaacccaccataacagatctgaacacacgggaggaggctgaggaggagatagactttgagaaagatcttctt

SEQ ID NO: 92102 - DNA, 201 bp, Homo sapiens
ctggggacgctggggatcagctcccaaacaccctcaagcagggaatagaacgtgtccgggctgtggccaagcggattggtgaggtccaggtggcttgtggsctgaaccagacggtggaggaatttgtgggggagctgaattttgggctggttgaggttgtatatgagtgggcccggggcatgcccttctccgagttggcag

SEQ ID NO: 92103 - DNA, 201 bp, Homo sapiens
ggacccacaggacagggggccagccactgcagaggtgccctatccagatgacctcgtgggattcaagctgttcctgcctgaagggccttgtgaccacaccrtggtcaagctccagccaggagatatggctgccatcaccaccaaggtgctccgggtgaatggggagaagatcttggaggacttcagcaagaggcagcagcc

SEQ ID NO: 92104 - DNA, 201 bp, Homo sapiens
gaatgccccatgtaaaaacatgatgataaaacagcaaagcactgttgtgtgcttgagttgctggacagggatgactcagctaagaagacagcgagagaacytcttagaaatatgcttttattatctgcacacagagatatgactgcctccctctaaagcattactatttgggagagggagtcttggggggtgatgggaggt

SEQ ID NO: 92105 - DNA, 201 bp, Homo sapiens
gagatgtgtcgctcactgcggggggcagcccgcctggtaggagagcctgtgctgggtgccaagatggagacagcggctaccttgctacggcgggacatcgkatttgcggccagcctctacacccagtgaatgccccatgtaaaaacatgatgataaaacagcaaagcactgttgtgtgcttgagttgctggacagggatga

SEQ ID NO: 92106 - DNA, 201 bp, Homo sapiens
atgccccatgtaaaaacatgatgataaaacagcaaagcactgttgtgtgcttgagttgctggacagggatgactcagctaagaagacagcgagagaacctyttagaaatatgcttttattatctgcacacagagatatgactgcctccctctaaagcattactatttgggagagggagtcttggggggtgatgggaggtcc

SEQ ID NO: 92107 - DNA, 201 bp, Homo sapiens
gcggccagcctctacacccagtgaatgccccatgtaaaaacatgatgataaaacagcaaagcactgttgtgtgcttgagttgctggacagggatgactcasctaagaagacagcgagagaacctcttagaaatatgcttttattatctgcacacagagatatgactgcctccctctaaagcattactatttgggagaggga

SEQ ID NO: 92108 - DNA, 201 bp, Homo sapiens
acggggcactgggagctgctgaacttgcctggagctccagagagtagccttccccatggcctccctccttgtgccccagatctgcagcaagaagcagaacrgttgtttctgtcatccccagcctggctgcctctgcatggtgtggagcactcagcccgaaaatggcagaggaagacggatccctggtctcttttggctgtc

SEQ ID NO: 92109 - DNA, 201 bp, Homo sapiens
tgtgctgggtgccaagatggagacagcggctaccttgctacggcgggacatcgtatttgcggccagcctctacacccagtgaatgccccatgtaaaaacaygatgataaaacagcaaagcactgttgtgtgcttgagttgctggacagggatgactcagctaagaagacagcgagagaacctcttagaaatatgcttttat

SEQ ID NO: 92110 - DNA, 201 bp, Homo sapiens; identical to SEQ ID NO: 92085

SEQ ID NO: 92111 - DNA, 201 bp, Homo sapiens; identical to SEQ ID NO: 92086

SEQ ID NO: 92112 - DNA, 201 bp, Homo sapiens
gagcggctgcgcttcctactgtcggatcagtcattgctgctgcttcctgagtaccatcagcgagtagaggtgctccgaaccctgggttacgtggacgaggygggcactgtgaagctggcagggcgggtggcttgtgccatgagcagccatgagttgctcctcactgagctcatgtttgacaatgcactgagcaccctgcgg

SEQ ID NO: 92113 - DNA, 201 bp, Homo sapiens; identical to SEQ ID NO: 92088

SEQ ID NO: 92114 - DNA, 201 bp, Homo sapiens; identical to SEQ ID NO: 92089

SEQ ID NO: 92115 - DNA, 201 bp, Homo sapiens; identical to SEQ ID NO: 92090

SEQ ID NO: 92116 - DNA, 120 bp, Homo sapiens; identical to SEQ ID NO: 92091

SEQ ID NO: 92117 - DNA, 201 bp, Homo sapiens; identical to SEQ ID NO: 92092

SEQ ID NO: 92118 - DNA, 201 bp, Homo sapiens; identical to SEQ ID NO: 92093

SEQ ID NO: 92119 - DNA, 201 bp, Homo sapiens; identical to SEQ ID NO: 92094

SEQ ID NO: 92120 - DNA, 201 bp, Homo sapiens; identical to SEQ ID NO: 92095

SEQ ID NO: 92121 - DNA, 201 bp, Homo sapiens; identical to SEQ ID NO: 92096

SEQ ID NO: 92122 - DNA, 201 bp, Homo sapiens; identical to SEQ ID NO: 92097

SEQ ID NO: 92123 - DNA, 201 bp, Homo sapiens
agatggagcggctgcgcttcctactgtcggatcagtcattgctgctgcttcctgagtaccatcagcgagtagaggtgctccgaaccctgggttacgtggaygaggcgggcactgtgaagctggcagggcgggtggcttgtgccatgagcagccatgagttgctcctcactgagctcatgtttgacaatgcactgagcaccc

SEQ ID NO: 92124 - DNA, 201 bp, Homo sapiens; identical to SEQ ID NO: 92098

SEQ ID NO: 92125 - DNA, 201 bp, Homo sapiens; identical to SEQ ID NO: 92099

SEQ ID NO: 92126 - DNA, 201 bp, Homo sapiens; identical to SEQ ID NO: 92100

SEQ ID NO: 92127 - DNA, 201 bp, Homo sapiens; identical to SEQ ID NO: 92101

SEQ ID NO: 92128 - DNA, 201 bp, Homo sapiens
agaaggagatggagcggctgcgcttcctactgtcggatcagtcattgctgctgcttcctgagtaccatcagcgagtagaggtgctccgaaccctgggttaygtggacgaggcgggcactgtgaagctggcagggcgggtggcttgtgccatgagcagccatgagttgctcctcactgagctcatgtttgacaatgcactga

SEQ ID NO: 92129 - DNA, 201 bp, Homo sapiens; identical to SEQ ID NO: 92102

SEQ ID NO: 92130 - DNA, 201 bp, Homo sapiens; identical to SEQ ID NO: 92103

SEQ ID NO: 92131 - DNA, 201 bp, Homo sapiens; identical to SEQ ID NO: 92104

SEQ ID NO: 92132 - DNA, 201 bp, Homo sapiens; identical to SEQ ID NO: 92105

SEQ ID NO: 92133 - DNA, 201 bp, Homo sapiens; identical to SEQ ID NO: 92106

SEQ ID NO: 92134 - DNA, 201 bp, Homo sapiens; identical to SEQ ID NO: 92107

SEQ ID NO: 92135 - DNA, 201 bp, Homo sapiens; identical to SEQ ID NO: 92108

SEQ ID NO: 92136 - DNA, 201 bp, Homo sapiens; identical to SEQ ID NO: 92109

SEQ ID NO: 92137 - DNA, 201 bp, Homo sapiens; identical to SEQ ID NO: 92085

SEQ ID NO: 92138 - DNA, 201 bp, Homo sapiens; identical to SEQ ID NO: 92112

SEQ ID NO: 92139 - DNA, 201 bp, Homo sapiens; identical to SEQ ID NO: 92086

SEQ ID NO: 92140 - DNA, 201 bp, Homo sapiens; identical to SEQ ID NO: 92088

SEQ ID NO: 92141 - DNA, 201 bp, Homo sapiens; identical to SEQ ID NO: 92089

SEQ ID NO: 92142 - DNA, 201 bp, Homo sapiens; identical to SEQ ID NO: 92090

SEQ ID NO: 92143 - DNA, 120 bp, Homo sapiens; identical to SEQ ID NO: 92091

SEQ ID NO: 92144 - DNA, 201 bp, Homo sapiens; identical to SEQ ID NO: 92092

SEQ ID NO: 92145 - DNA, 201 bp, Homo sapiens; identical to SEQ ID NO: 92093

SEQ ID NO: 92146 - DNA, 201 bp, Homo sapiens; identical to SEQ ID NO: 92095

SEQ ID NO: 92147 - DNA, 201 bp, Homo sapiens; identical to SEQ ID NO: 92123

SEQ ID NO: 92148 - DNA, 201 bp, Homo sapiens; identical to SEQ ID NO: 92097

SEQ ID NO: 92149 - DNA, 201 bp, Homo sapiens; identical to SEQ ID NO: 92098

SEQ ID NO: 92150 - DNA, 201 bp, Homo sapiens; identical to SEQ ID NO: 92099

SEQ ID NO: 92151 - DNA, 201 bp, Homo sapiens
ccctggggacgctggggatcagctcccaaacaccctcaagcagggaatagaacgtgtccgggctgtggccaagcggattggtgaggtccaggtggcttgtsgcctgaaccagacggtggaggaatttgtgggggagctgaattttgggctggttgaggttgtatatgagtgggcccggggcatggtgagtacctgaggttt

SEQ ID NO: 92152 - DNA, 201 bp, Homo sapiens; identical to SEQ ID NO: 92101

SEQ ID NO: 92153 - DNA, 201 bp, Homo sapiens
ctggggacgctggggatcagctcccaaacaccctcaagcagggaatagaacgtgtccgggctgtggccaagcggattggtgaggtccaggtggcttgtggsctgaaccagacggtggaggaatttgtgggggagctgaattttgggctggttgaggttgtatatgagtgggcccggggcatggtgagtacctgaggtttgg

SEQ ID NO: 92154 - DNA, 201 bp, Homo sapiens; identical to SEQ ID NO: 92128

SEQ ID NO: 92155 - DNA, 201 bp, Homo sapiens; identical to SEQ ID NO: 92103

SEQ ID NO: 92156 - DNA, 201 bp, Homo sapiens; identical to SEQ ID NO: 92104

SEQ ID NO: 92157 - DNA, 201 bp, Homo sapiens; identical to SEQ ID NO: 92105

SEQ ID NO: 92158 - DNA, 201 bp, Homo sapiens; identical to SEQ ID NO: 92106

SEQ ID NO: 92159 - DNA, 201 bp, Homo sapiens; identical to SEQ ID NO: 92107

SEQ ID NO: 92160 - DNA, 201 bp, Homo sapiens; identical to SEQ ID NO: 92108

SEQ ID NO: 92161 - DNA, 201 bp, Homo sapiens; identical to SEQ ID NO: 92109

SEQ ID NO: 92162 - DNA, 201 bp, Homo sapiens; identical to SEQ ID NO: 92085

SEQ ID NO: 92163 - DNA, 201 bp, Homo sapiens; identical to SEQ ID NO: 92112

SEQ ID NO: 92164 - DNA, 201 bp, Homo sapiens; identical to SEQ ID NO: 92086

SEQ ID NO: 92165 - DNA, 201 bp, Homo sapiens; identical to SEQ ID NO: 92088

SEQ ID NO: 92166 - DNA, 201 bp, Homo sapiens; identical to SEQ ID NO: 92089

SEQ ID NO: 92167 - DNA, 201 bp, Homo sapiens; identical to SEQ ID NO: 92090

SEQ ID NO: 92168 - DNA, 120 bp, Homo sapiens; identical to SEQ ID NO: 92091

SEQ ID NO: 92169 - DNA, 201 bp, Homo sapiens; identical to SEQ ID NO: 92092

SEQ ID NO: 92170 - DNA, 201 bp, Homo sapiens; identical to SEQ ID NO: 92093

SEQ ID NO: 92171 - DNA, 201 bp, Homo sapiens; identical to SEQ ID NO: 92095

SEQ ID NO: 92172 - DNA, 201 bp, Homo sapiens; identical to SEQ ID NO: 92123

SEQ ID NO: 92173 - DNA, 201 bp, Homo sapiens; identical to SEQ ID NO: 92097

SEQ ID NO: 92174 - DNA, 201 bp, Homo sapiens; identical to SEQ ID NO: 92098

SEQ ID NO: 92175 - DNA, 201 bp, Homo sapiens; identical to SEQ ID NO: 92099

SEQ ID NO: 92176 - DNA, 201 bp, Homo sapiens; identical to SEQ ID NO: 92100

SEQ ID NO: 92177 - DNA, 201 bp, Homo sapiens; identical to SEQ ID NO: 92101

SEQ ID NO: 92178 - DNA, 201 bp, Homo sapiens; identical to SEQ ID NO: 92102

SEQ ID NO: 92179 - DNA, 201 bp, Homo sapiens; identical to SEQ ID NO: 92128

SEQ ID NO: 92180 - DNA, 201 bp, Homo sapiens; identical to SEQ ID NO: 92103

SEQ ID NO: 92181 - DNA, 201 bp, Homo sapiens; identical to SEQ ID NO: 92104

SEQ ID NO: 92182 - DNA, 201 bp, Homo sapiens; identical to SEQ ID NO: 92105

SEQ ID NO: 92183 - DNA, 201 bp, Homo sapiens; identical to SEQ ID NO: 92106

SEQ ID NO: 92184 - DNA, 201 bp, Homo sapiens; identical to SEQ ID NO: 92107

SEQ ID NO: 92185 - DNA, 201 bp, Homo sapiens; identical to SEQ ID NO: 92108

SEQ ID NO: 92186 - DNA, 201 bp, Homo sapiens; identical to SEQ ID NO: 92109

SEQ ID NO: 92187 - DNA, 201 bp, Homo sapiens
ctctgctcttctcaggggaggtagactgcacagacccccaagccccatccacacagcccccaacctgctatgtggagctcaagacctccaaggagatgcahagccctggccaatggaggagtttctacagacacaagctcctgaaatggtgggctcagtcattcctcccaggggtcccgaatgttgttgctggcttccgta

SEQ ID NO: 92188 - DNA, 201 bp, Homo sapiens
ccacagaccctgccctctactctgggccctttcctttctaccggcgcccttcggaactgggctgcttctccctggatgctcaacgccagtaccatggagawgcccgagccctgcgctactatagcccaccccccactaacggtccaggccccaactttgacctcagagacggatacccggatcgataccagccccgggacg

SEQ ID NO: 92189 - DNA, 201 bp, Homo sapiens
ggggagctttgaggacctcatggatcccagggggaccaagagaggagctgagaagacagaggtagctgagcctcggaacaaactacctcgtccagcacctwctctgcccacagaccctgccctctactctgggccctttcctttctaccggcgcccttcggaactgggctgcttctccctggatgctcaacgccagtacca

SEQ ID NO: 92190 - DNA, 201 bp, Homo sapiens
ccttctgctctgtgctacgcagccgcctgggaagccaccctctgctcttctcaggggaggtagactgcacagacccccaagccccatccacacagcccccracctgctatgtggagctcaagacctccaaggagatgcacagccctggccaatggaggagtttctacagacacaagctcctgaaatggtgggctcagtcat

SEQ ID NO: 92191 - DNA, 201 bp, Homo sapiens
cccacagaccctgccctctactctgggccctttcctttctaccggcgcccttcggaactgggctgcttctccctggatgctcaacgccagtaccatggagwtgcccgagccctgcgctactatagcccaccccccactaacggtccaggccccaactttgacctcagagacggatacccggatcgataccagccccgggac

SEQ ID NO: 92192 - DNA, 201 bp, Homo sapiens
atcacctccgccaggccgggccccacgccggccgcggattggctccctccaagggcacgcacgcccggggactcgttggcggcgtggaggggcgccggtgkccacgttggtgtcaacctccttcgtgaagctcacacctcccccgccccgggaggggtttgcccgccactgtcgctgaatgattgcatcatcgaaagcaga

SEQ ID NO: 92193 - DNA, 107 bp, Homo sapiens
acctcccatcaccccccaagactccctctcccaaatagtaatgctttagagggaggcagtcatatctctgtgtgcagataataaaagcatatttctaagargttctc

SEQ ID NO: 92194 - DNA, 201 bp, Homo sapiens
ccagggggaccaagagaggagctgagaagacagaggtagctgagcctcggaacaaactacctcgtccagcaccttctctgcccacagaccctgccctctaytctgggccctttcctttctaccggcgcccttcggaactgggctgcttctccctggatgctcaacgccagtaccatggagatgcccgagccctgcgctact

SEQ ID NO: 92195 - DNA, 201 bp, Homo sapiens
ctggctcctggaacaccgaggccggttggaggggggtccaggctggctggcagaggccatagtgacgtggcgggggcacctgacaaaactgctgacgacaycgtatgagcggcaggagggctggcagctggcagcctcccggttccagggaacactatacctgagtgaagtggagacaccgaacgctcgggcccagaggct

SEQ ID NO: 92196 - DNA, 109 bp, Homo sapiens
ggacctcccatcaccccccaagactccctctcccaaatagtaatgctttagagggaggcagtcatatctctgtgtgcagataataaaagcatatttctaaraggttctc

SEQ ID NO: 92197 - DNA, 201 bp, Homo sapiens; identical to SEQ ID NO: 92187

SEQ ID NO: 92198 - DNA, 201 bp, Homo sapiens; identical to SEQ ID NO: 92188

SEQ ID NO: 92199 - DNA, 201 bp, Homo sapiens
ctgcttgtcttaggacctcatggatcccagggggaccaagagaggagctgagaagacagaggtagctgagcctcggaacaaactacctcgtccagcacctwctctgcccacagaccctgccctctactctgggccctttcctttctaccggcgcccttcggaactgggctgcttctccctggatgctcaacgccagtacca

SEQ ID NO: 92200 - DNA, 201 bp, Homo sapiens; identical to SEQ ID NO: 92190

SEQ ID NO: 92201 - DNA, 201 bp, Homo sapiens; identical to SEQ ID NO: 92191

SEQ ID NO: 92202 - DNA, 201 bp, Homo sapiens
ggcaaggaaagaggcaggatgagagcttggccgcggtggcgtctgaggggcctgaatgtttcaaggccagagcctggcgatcaggtggctcgcttagtcckaaaccagtcatccttctccaggcctcctctgtagaatggaaactctgtacccctgcttgtcttaggacctcatggatcccagggggaccaagagaggagc

SEQ ID NO: 92203 - DNA, 201 bp, Homo sapiens; identical to SEQ ID NO: 92192

SEQ ID NO: 92204 - DNA, 201 bp, Homo sapiens; identical to SEQ ID NO: 92194

SEQ ID NO: 92205 - DNA, 107 bp, Homo sapiens; identical to SEQ ID NO: 92193

SEQ ID NO: 92206 - DNA, 201 bp, Homo sapiens; identical to SEQ ID NO: 92195

SEQ ID NO: 92207 - DNA, 109 bp, Homo sapiens; identical to SEQ ID NO: 92196

SEQ ID NO: 92208 - DNA, 201 bp, Homo sapiens
gaatgttgttgctggcttccgtaacccagacggttttgtctcttccctcaagacctttcctaccatgaagatgtttgaatatgtcagggtaagggaacgaygttgcagctcccacccgtatccccaaacaccaagaccacaggtctagcatccagggcaacagcctgccttctctcctcccaccacccccactgcccatct

SEQ ID NO: 92209 - DNA, 201 bp, Homo sapiens; identical to SEQ ID NO: 92189

SEQ ID NO: 92210 - DNA, 201 bp, Homo sapiens
ctctgctcttctcaggggaggtagactgcacagacccccaagccccatccacacagcccccaacctgctatgtggagctcaagacctccaaggagatgcahagccctggccaatggaggagtttctacaggttcaggatcggggtgggcagggcgagagcttaggcttgaaggctgggaaagggacttggggaggagggtg

SEQ ID NO: 92211 - DNA, 201 bp, Homo sapiens
ccttctgctctgtgctacgcagccgcctgggaagccaccctctgctcttctcaggggaggtagactgcacagacccccaagccccatccacacagcccccracctgctatgtggagctcaagacctccaaggagatgcacagccctggccaatggaggagtttctacaggttcaggatcggggtgggcagggcgagagctt

SEQ ID NO: 92212 - DNA, 201 bp, Homo sapiens; identical to SEQ ID NO: 92194

SEQ ID NO: 92213 - DNA, 201 bp, Homo sapiens; identical to SEQ ID NO: 92195

SEQ ID NO: 92214 - DNA, 201 bp, Homo sapiens
ccaacctgctatgtggagctcaagacctccaaggagatgcacagccctggccaatggaggagtttctacaggttcaggatcggggtgggcagggcgagagsttaggcttgaaggctgggaaagggacttggggaggagggtgaaggcagaatggagggtgcacgaggggtcccactgatcccttgcttttcctgtcagaca

SEQ ID NO: 92215 - DNA, 201 bp, Homo sapiens
ttgtctcttccctcaagacctttcctaccatgaagatgtttgaatatgtcagggtaagggaacgatgttgcagctcccacccgtatccccaaacaccaagrccacaggtctagcatccagggcaacagcctgccttctctcctcccaccacccccactgcccatcttctgcctcctcctctgcctgctccagaatgaccgt

SEQ ID NO: 92216 - DNA, 201 bp, Homo sapiens
tttgtctcttccctcaagacctttcctaccatgaagatgtttgaatatgtcagggtaagggaacgatgttgcagctcccacccgtatccccaaacaccaasaccacaggtctagcatccagggcaacagcctgccttctctcctcccaccacccccactgcccatcttctgcctcctcctctgcctgctccagaatgaccg

SEQ ID NO: 92217 - DNA, 201 bp, Homo sapiens
cccaacctgctatgtggagctcaagacctccaaggagatgcacagccctggccaatggaggagtttctacaggttcaggatcggggtgggcagggcgagascttaggcttgaaggctgggaaagggacttggggaggagggtgaaggcagaatggagggtgcacgaggggtcccactgatcccttgcttttcctgtcagac

SEQ ID NO: 92218 - DNA, 201 bp, Homo sapiens
cttatgtacatgggatacaaatttgagcagtacatgtgtgcaggtgagttgcccctgcttcatagcccccttccccttcccagaggttgagagccccccamgcctgctgctgcttctctccttgtgcagacaaacctggaagctccccagacccctctggggaggttaacaccaacgtggccttctgctctgtgctacgca

SEQ ID NO: 92219 - DNA, 201 bp, Homo sapiens
ggagcttatgtacatgggatacaaatttgagcagtacatgtgtgcaggtgagttgcccctgcttcatagcccccttccccttcccagaggttgagagcccsccacgcctgctgctgcttctctccttgtgcagacaaacctggaagctccccagacccctctggggaggttaacaccaacgtggccttctgctctgtgcta

SEQ ID NO: 92220 - DNA, 201 bp, Homo sapiens
ttatgtacatgggatacaaatttgagcagtacatgtgtgcaggtgagttgcccctgcttcatagcccccttccccttcccagaggttgagagccccccackcctgctgctgcttctctccttgtgcagacaaacctggaagctccccagacccctctggggaggttaacaccaacgtggccttctgctctgtgctacgcag

SEQ ID NO: 92221 - DNA, 201 bp, Homo sapiens; identical to SEQ ID NO: 92188

SEQ ID NO: 92222 - DNA, 201 bp, Homo sapiens; identical to SEQ ID NO: 92191

SEQ ID NO: 92223 - DNA, 201 bp, Homo sapiens; identical to SEQ ID NO: 92192

SEQ ID NO: 92224 - DNA, 104 bp, Homo sapiens
acctcccatcaccccccaagactccctctcccaaatagtaatgctttagagggaggcagtcatatctctgtgtgcagataataaaagcatatttctaagargtt

SEQ ID NO: 92225 - DNA, 106 bp, Homo sapiens
ggacctcccatcaccccccaagactccctctcccaaatagtaatgctttagagggaggcagtcatatctctgtgtgcagataataaaagcatatttctaaraggtt

SEQ ID NO: 92226 - DNA, 201 bp, Homo sapiens; identical to SEQ ID NO: 92188

SEQ ID NO: 92227 - DNA, 201 bp, Homo sapiens; identical to SEQ ID NO: 92199

SEQ ID NO: 92228 - DNA, 201 bp, Homo sapiens; identical to SEQ ID NO: 92191

SEQ ID NO: 92229 - DNA, 201 bp, Homo sapiens; identical to SEQ ID NO: 92202

SEQ ID NO: 92230 - DNA, 201 bp, Homo sapiens; identical to SEQ ID NO: 92192

SEQ ID NO: 92231 - DNA, 201 bp, Homo sapiens; identical to SEQ ID NO: 92194

SEQ ID NO: 92232 - DNA, 104 bp, Homo sapiens; identical to SEQ ID NO: 92224

SEQ ID NO: 92233 - DNA, 201 bp, Homo sapiens; identical to SEQ ID NO: 92195

SEQ ID NO: 92234 - DNA, 106 bp, Homo sapiens; identical to SEQ ID NO: 92225

SEQ ID NO: 92235 - DNA, 201 bp, Homo sapiens; identical to SEQ ID NO: 92188

SEQ ID NO: 92236 - DNA, 201 bp, Homo sapiens; identical to SEQ ID NO: 92189

SEQ ID NO: 92237 - DNA, 201 bp, Homo sapiens; identical to SEQ ID NO: 92191

SEQ ID NO: 92238 - DNA, 201 bp, Homo sapiens; identical to SEQ ID NO: 92192

SEQ ID NO: 92239 - DNA, 201 bp, Homo sapiens; identical to SEQ ID NO: 92194

SEQ ID NO: 92240 - DNA, 104 bp, Homo sapiens; identical to SEQ ID NO: 92224

SEQ ID NO: 92241 - DNA, 201 bp, Homo sapiens; identical to SEQ ID NO: 92195

SEQ ID NO: 92242 - DNA, 106 bp, Homo sapiens; identical to SEQ ID NO: 92225

SEQ ID NO: 92243 - DNA, 201 bp, Homo sapiens
gctctcctcacctcagctgagctcctttgaaagtgattcaagggactatgtcactcagcctcatttgctggaccaaatctggagggagaacccctaaaacycctaagtgaggttgcccagggggttgtccccaggtggggggaagcaggggagagaaaatggtagccatttttacattgttttgtatagtatttattgatt

SEQ ID NO: 92244 - DNA, 201 bp, Homo sapiens
ctgccatccagcagcgagccattctaccttgtatcaagggttatgatgtgattgctcaagcccaatctgggactgggaaaacggccacatttgccatatcrattctgcagcagattgaattagatctaaaagccacccaggccttggtcctagcacccactcgagaattggctcagcagatacagaaggtggtcatggcac

SEQ ID NO: 92245 - DNA, 201 bp, Homo sapiens
aagccacccaggccttggtcctagcacccactcgagaattggctcagcagatacagaaggtggtcatggcactaggagactacatgggcgcctcctgtcaygcctgtatcgggggcaccaacgtgcgtgctgaggtgcagaaactgcagatggaagctccccacatcatcgtgggtacccctggccgtgtgtttgatatgc

SEQ ID NO: 92246 - DNA, 201 bp, Homo sapiens
catcgagagtaactggaatgagattgttgacagctttgatgacatgaacctctcggagtcccttctccgtggcatctacgcctatggttttgagaagcccyctgccatccagcagcgagccattctaccttgtatcaagggttatgatgtgattgctcaagcccaatctgggactgggaaaacggccacatttgccatatc

SEQ ID NO: 92247 - DNA, 201 bp, Homo sapiens
ggatggagcccgaaggcgtcatcgagagtaactggaatgagattgttgacagctttgatgacatgaacctctcggagtcccttctccgtggcatctacgcstatggttttgagaagccctctgccatccagcagcgagccattctaccttgtatcaagggttatgatgtgattgctcaagcccaatctgggactgggaaaa

SEQ ID NO: 92248 - DNA, 201 bp, Homo sapiens
tcgggggcaccaacgtgcgtgctgaggtgcagaaactgcagatggaagctccccacatcatcgtgggtacccctggccgtgtgtttgatatgcttaaccgsagatacctgtcccccaaatacatcaagatgtttgtactggatgaagctgacgaaatgttaagccgtggattcaaggaccagatctatgacatattccaaa

SEQ ID NO: 92249 - DNA, 201 bp, Homo sapiens
acgagacgtgattatgagggagtttcgttctggctctagcagagttttgattaccactgacctgctggccagaggcattgatgtgcagcaggtttctttastcatcaactatgaccttcccaccaacagggaaaactatatccacagaatcggtcgaggtggacggtttggccgtaaaggtgtggctattaacatggtgac

SEQ ID NO: 92250 - DNA, 201 bp, Homo sapiens
aaaaaaaaaacactaatccatttccctaacctagtaacctccagatcccagaggctctcctcacctcagctgagctcctttgaaagtgattcaagggactrtgtcactcagcctcatttgctggaccaaatctggagggagaacccctaaaacccctaagtgaggttgcccagggggttgtccccaggtggggggaagcag

SEQ ID NO: 92251 - DNA, 201 bp, Homo sapiens; identical to SEQ ID NO: 92245

SEQ ID NO: 92252 - DNA, 201 bp, Homo sapiens; identical to SEQ ID NO: 92244

SEQ ID NO: 92253 - DNA, 201 bp, Homo sapiens; identical to SEQ ID NO: 92246

SEQ ID NO: 92254 - DNA, 201 bp, Homo sapiens; identical to SEQ ID NO: 92247

SEQ ID NO: 92255 - DNA, 201 bp, Homo sapiens; identical to SEQ ID NO: 92248

SEQ ID NO: 92256 - DNA, 201 bp, Homo sapiens; identical to SEQ ID NO: 92245

SEQ ID NO: 92257 - DNA, 201 bp, Homo sapiens; identical to SEQ ID NO: 92244

SEQ ID NO: 92258 - DNA, 201 bp, Homo sapiens; identical to SEQ ID NO: 92246

SEQ ID NO: 92259 - DNA, 201 bp, Homo sapiens; identical to SEQ ID NO: 92247

SEQ ID NO: 92260 - DNA, 201 bp, Homo sapiens; identical to SEQ ID NO: 92248

SEQ ID NO: 92261 - DNA, 201 bp, Homo sapiens; identical to SEQ ID NO: 92249

SEQ ID NO: 92262 - DNA, 201 bp, Homo sapiens; identical to SEQ ID NO: 92243

SEQ ID NO: 92263 - DNA, 201 bp, Homo sapiens; identical to SEQ ID NO: 92245

SEQ ID NO: 92264 - DNA, 201 bp, Homo sapiens; identical to SEQ ID NO: 92244

SEQ ID NO: 92265 - DNA, 201 bp, Homo sapiens; identical to SEQ ID NO: 92246

SEQ ID NO: 92266 - DNA, 201 bp, Homo sapiens; identical to SEQ ID NO: 92247

SEQ ID NO: 92267 - DNA, 201 bp, Homo sapiens; identical to SEQ ID NO: 92248

SEQ ID NO: 92268 - DNA, 201 bp, Homo sapiens; identical to SEQ ID NO: 92250

SEQ ID NO: 92269 - DNA, 201 bp, Homo sapiens; identical to SEQ ID NO: 92249

SEQ ID NO: 92270 - DNA, 201 bp, Homo sapiens
gcattccctcccagcctttgaggccgggtgcagtggctcacgcctgtaatcccagcactttgggaggccgaggcgggtggatcacttgaggtcaggagttygagaccagcctggccaataaggtgaaaccctgtctctactaaaaatacaaaaattagccgagcatggtggcctgtgcctgtaaacccagctactcaggag

SEQ ID NO: 92271 - DNA, 201 bp, Homo sapiens; identical to SEQ ID NO: 92270

SEQ ID NO: 92272 - DNA, 201 bp, Homo sapiens
ctgaagcagctgctggatttggagctgcggagccagggcgagtcacagaagcagatcctggagcggtgtcgggctgtgattcgctacagtgtcaagactgrtcaccctcggttcttcaaccagctcttctctgggttggatccccatgctctggccgggcgcattatcactgagagcctcaacaccagccagtacacatat

SEQ ID NO: 92273 - DNA, 201 bp, Homo sapiens
tggaaggagcctgaggagctgaagcagctgctggatttggagctgcggagccagggcgagtcacagaagcagatcctggagcggtgtcgggctgtgattcsctacagtgtcaagactggtcaccctcggttcttcaaccagctcttctctgggttggatccccatgctctggccgggcgcattatcactgagagcctcaac

SEQ ID NO: 92274 - DNA, 115 bp, Homo sapiens
gcttggggacgcacrgagaggtgcagctgggccgtccagcatcaaacactagcctccacacgtggaaaagaccctgactcccacagtagactagtcttatgggagtcctggctct

SEQ ID NO: 92275 - DNA, 201 bp, Homo sapiens; identical to SEQ ID NO: 92270

SEQ ID NO: 92276 - DNA, 201 bp, Homo sapiens; identical to SEQ ID NO: 92272

SEQ ID NO: 92277 - DNA, 201 bp, Homo sapiens; identical to SEQ ID NO: 92273

SEQ ID NO: 92278 - DNA, 142 bp, Homo sapiens
tagcgggggcagcctcagagcgggtgagcttggggacgcacrgagaggtgcagctggctacctgtgcaccctgcctccggctctcctgagcagagagatcctgatggctgactcagaagcactcccctcccttgctggggac

SEQ ID NO: 92279 - DNA, 201 bp, Homo sapiens; identical to SEQ ID NO: 92270

SEQ ID NO: 92280 - DNA, 201 bp, Homo sapiens; identical to SEQ ID NO: 92272

SEQ ID NO: 92281 - DNA, 201 bp, Homo sapiens; identical to SEQ ID NO: 92273

SEQ ID NO: 92282 - DNA, 142 bp, Homo sapiens; identical to SEQ ID NO: 92278

SEQ ID NO: 92283 - DNA, 201 bp, Homo sapiens
ccatgctgggtgtgttcctggtctccgcagtggcccatgagtatatcttctgcttcgtcctggggttcttctatcccgtcatgctgatactcttccttgtyattggaggaatgttgaacttcatgatgcatgaccagcgcaccggcccggcatggaacgtgctgatgtggaccatgctgtttctaggccagggaatccagg

SEQ ID NO: 92284 - DNA, 201 bp, Homo sapiens
actgcgaaggaaggaggcaacacgggcaagggctgcctgctgcccgctggagaccgcaccatggagccaggcggggcccgtctgcgtctgcagaggacagragggctgggaggggagcgggagcgccaaccctgtggagatggaaacactgagacgcacagagccccggacttggtacaatggacccgacacatggaggct

SEQ ID NO: 92285 - DNA, 201 bp, Homo sapiens
atcttggtcctgccatacctagaggtcgggacagacgacgctacctgcccagacaccaccaagttctctgcctgcaaaacctgggaccaggactcctgtcygcattcccaaatttggctctgagtcgaggcaacctgcacacaagaccccaccaaggaatgtgcaaggactgagatctgcagacttgtgggtaactgatca

SEQ ID NO: 92286 - DNA, 107 bp, Homo sapiens
gggggaactcagaggaactggggccaccaaggttggaaaagggtttggttcttgactttgtattccttccaatacagcaataaactttgtctccctttttattcatt

SEQ ID NO: 92287 - DNA, 106 bp, Homo sapiens
ggggaactcagaggaactggggccaccaaggttggaaaagggtttggttcttgactttgtattccttccaatacagcaataaactttgtctccctttttattcatt

SEQ ID NO: 92288 - DNA, 105 bp, Homo sapiens
gggaactcagaggaactggggccaccaaggttggaaaagggtttggttcttgactttgtattccttccaatacagcaataaactttgtctccctttttattcatt

SEQ ID NO: 92289 - DNA, 104 bp, Homo sapiens
ggaactcagaggaactggggccaccaaggttggaaaagggtttggttcttgactttgtattccttccaatacagcaataaactttgtctccctttttattcatt

SEQ ID NO: 92290 - DNA, 201 bp, Homo sapiens
ggtgcccatgtttctgtccaccctgttggcgccgtaccaggccctacggctgtgggccaggggcacctggacgcaggcgacgggcctgggctgtgcgctgytagccgcccacgccgtggtgctctgcgcgctgccggtccacgtggccgtggagcatcagctcccgccggcctcccgttgtgtcctggtcttcgagcaggt

SEQ ID NO: 92291 - DNA, 201 bp, Homo sapiens
gagcccttcagcacccgtgccctggtgctctctatcctgcatgccacgttgccaggcatcttcatgctgctgctcatcttctttgccttcctccattgctrgctcaacgcctttgccgagatgctacgatttggagacaggatgttctaccgggactggtggaactcaacgtccttctccaactactaccgcacttggaac

SEQ ID NO: 92292 - DNA, 201 bp, Homo sapiens
tgctacgatttggagacaggatgttctaccgggactggtggaactcaacgtccttctccaactactaccgcacttggaacgtggtggtccatgactggctstacagctacgtgtatcaggatgggctgcggctccttggtgcccgggcccgaggggtagccatgctgggtgtgttcctggtctccgcagtggcccatgagt

SEQ ID NO: 92293 - DNA, 201 bp, Homo sapiens
gggtgcccatgtttctgtccaccctgttggcgccgtaccaggccctacggctgtgggccaggggcacctggacgcaggcgacgggcctgggctgtgcgctkctagccgcccacgccgtggtgctctgcgcgctgccggtccacgtggccgtggagcatcagctcccgccggcctcccgttgtgtcctggtcttcgagcagg

SEQ ID NO: 92294 - DNA, 201 bp, Homo sapiens
gagcatcagctcccgccggcctcccgttgtgtcctggtcttcgagcaggttaggttcctgatgaaaagctactccttcctgagagaggctgtgcctgggayccttcgtgccagacgaggtgaggggatccaggcccccagtttctccagctacctctacttcctcttctgcccaacactcatctacagggagacttaccct

SEQ ID NO: 92295 - DNA, 201 bp, Homo sapiens
ggtccatgactggctgtacagctacgtgtatcaggatgggctgcggctccttggtgcccgggcccgaggggtagccatgctgggtgtgttcctggtctcckcagtggcccatgagtatatcttctgcttcgtcctggggttcttctatcccgtcatgctgatactcttccttgtcattggaggaatgttgaacttcatgat

SEQ ID NO: 92296 - DNA, 177 bp, Homo sapiens
cgcccatgtaacatcactagcgaccggtgacctctttttcccccttgcctggctcctgtggtggcaggctgggcacraggaccatgctgggccggagcctccgagaacctgactttgaaaccaaaagttggctaaggagaagaatgtcatgtcctccacctgtcctcaagctgatca

SEQ ID NO: 92297 - DNA, 134 bp, Homo sapiens
cgcccatgtaacatcactagcgaccggtgacctmtttttcccccttgcctggctcctgtggtggcaggctgggcacgaggaccatgctgggccggagcctccgagaacctgactttgaaaccaaaagttggcta

SEQ ID NO: 92298 - DNA, 201 bp, Homo sapiens
agcctctgtctctctaaaacagtaaacatatcttacaaattaaaatgacttttaggctgggtgcagtggctcacacctgtaatcccagcactttgggaggscaaggcgagcggatcatgaggtcagaagatctagaacagcctggtcaacatggtgaaaccccgtctctactaaaaatacaaaaattagccaggcttagtg

SEQ ID NO: 92299 - DNA, 201 bp, Homo sapiens
ttgctcaattcttgtaattaggttcttgttaatagtcattccatggaattactttttaaaattcctgtgacaattaataataaataacgtgtcagcatttrgtaagcatccactaagtgtacaatacttctacaataacacaagatacctgttcctcaaagacaatgcattctgccataatgttcattaaagagtttacag

SEQ ID NO: 92300 - DNA, 201 bp, Homo sapiens
gtgcccaggatgatatttttacacaagctgtaaatatggcaggattgccagcagtgagtatccctgttgcactctcaaaccaagggttgccaataggactrcagtttattggacgtgcgttttgtgaccagcagcttcttacagtagccaaatggtttgaaaaacaagtacagtttcctgttattcaacttcaagaactca

SEQ ID NO: 92301 - DNA, 201 bp, Homo sapiens
ccaaaagttggctaaggagaagaatgtcatgtcctccacctgtcctcaagctgatcagtgcatcacccttcatccactacactaagtgtagaggtttctgyggcactgaaacaaggccaaattacaccaacagagctctgtcaaaaatgtctctctcttatcaagaagaccaagtttctaaatgcctacattactgtgtca

SEQ ID NO: 92302 - DNA, 201 bp, Homo sapiens
ccaggaatcttaaccagatgtgtggatgatgcagcaattgtgttgggtgcactggccggacctgaccccagggactctaccacagtacatgaacctattartaaaccattcatgcttcccagtttggcagatgtgagcaaactatgtataggaattccaaaggaatatcttgtaccggaattatcaagtgaagtacagtct

SEQ ID NO: 92303 - DNA, 129 bp, Homo sapiens
cgcccatgtaacatcactagcgaccggtracctctttttcccccttgcctggctcctgtggtggcaggctgggcacgaggaccatgctgggccggagcctccgagaacctgactttgaaaccaaaagtt

SEQ ID NO: 92304 - DNA, 201 bp, Homo sapiens
tctctaaaacagtaaacatatcttacaaattaaaatgacttttaggctgggtgcagtggctcacacctgtaatcccagcactttgggagggcaaggcgagyggatcatgaggtcagaagatctagaacagcctggtcaacatggtgaaaccccgtctctactaaaaatacaaaaattagccaggcttagtggcgggcatct

SEQ ID NO: 92305 - DNA, 201 bp, Homo sapiens
taaaacagtaaacatatcttacaaattaaaatgacttttaggctgggtgcagtggctcacacctgtaatcccagcactttgggagggcaaggcgagcggawcatgaggtcagaagatctagaacagcctggtcaacatggtgaaaccccgtctctactaaaaatacaaaaattagccaggcttagtggcgggcatctgtag

SEQ ID NO: 92306 - DNA, 198 bp, Homo sapiens
agtgacaattaaagatggctgcgcccatgtaacatcactagcgaccggtgacctctttttcccccttgcctggctcctgtggtggcaggctgggcacraggaccatgctgggccggagcctccgagaagtttctgcggcactgaaacaaggccaaattacaccaacagagctctgtcaaaaatgtctctctcttatca

SEQ ID NO: 92307 - DNA, 155 bp, Homo sapiens
agtgacaattaaagatggctgcgcccatgtaacatcactagcgaccggtgacctmtttttcccccttgcctggctcctgtggtggcaggctgggcacgaggaccatgctgggccggagcctccgagaagtttctgcggcactgaaacaaggccaa

SEQ ID NO: 92308 - DNA, 201 bp, Homo sapiens; identical to SEQ ID NO: 92298

SEQ ID NO: 92309 - DNA, 201 bp, Homo sapiens; identical to SEQ ID NO: 92299

SEQ ID NO: 92310 - DNA, 201 bp, Homo sapiens; identical to SEQ ID NO: 92300

SEQ ID NO: 92311 - DNA, 201 bp, Homo sapiens
cactagcgaccggtgacctctttttcccccttgcctggctcctgtggtggcaggctgggcacgaggaccatgctgggccggagcctccgagaagtttctgyggcactgaaacaaggccaaattacaccaacagagctctgtcaaaaatgtctctctcttatcaagaagaccaagtttctaaatgcctacattactgtgtca

SEQ ID NO: 92312 - DNA, 201 bp, Homo sapiens; identical to SEQ ID NO: 92302

SEQ ID NO: 92313 - DNA, 150 bp, Homo sapiens
agtgacaattaaagatggctgcgcccatgtaacatcactagcgaccggtracctctttttcccccttgcctggctcctgtggtggcaggctgggcacgaggaccatgctgggccggagcctccgagaagtttctgcggcactgaaacaag

SEQ ID NO: 92314 - DNA, 201 bp, Homo sapiens; identical to SEQ ID NO: 92304

SEQ ID NO: 92315 - DNA, 201 bp, Homo sapiens; identical to SEQ ID NO: 92305

SEQ ID NO: 92316 - DNA, 201 bp, Homo sapiens
gttggatcgcgagcggtgtctgcttgtcccgccgagggctcccaggacagggcagggatctagggggtttgcgcacctgctttttaatgccccgccccccyttttttttttaaagtggagggggtgaaagtgagggaggagaatggacagaatactgactggaacgttaattcgagcatttcatatgcgaagagcggaata

SEQ ID NO: 92317 - DNA, 201 bp, Homo sapiens
gtactacctctcctaggagcactgtcatgcctgcttgggtgatagataaatatgggaagaatgaagtgcttcgattcactcagaacatgatgatgcctatyatacactatccaaatgaagtcattgtcaaagttcacgctgccagtgtaaatcctatagacgttaatatgagaagtggttatggagctacagctttaaata

SEQ ID NO: 92318 - DNA, 201 bp, Homo sapiens
agacttgtgtacttagaagaaatgcatgcactgcggtttgcttctggagaagcaaagttgtccaaaagccttcagttagaaggattagtactacctctccwaggagcactgtcatgcctgcttgggtgatagataaatatgggaagaatgaagtgcttcgattcactcagaacatgatgatgcctatcatacactatccaa

SEQ ID NO: 92319 - DNA, 174 bp, Homo sapiens
gccatcccggcggctaaggagagcgggcaggcaaggagattccgggccagggtcgcggcggcagtcggcaagcrttcgattctctggcgttggatcgcgagcggtgtctgcttgtcccgccgagggctcccaggacagggcagggatctagggggtttgcgcacctgcttttta

SEQ ID NO: 92320 - DNA, 201 bp, Homo sapiens
tatgcgaagagcggaataacagttccgtattcttctttcagtttctccattagattagcttcattttcgaatgctccgttttgcatgcttaattttgaaastagcccgtggtttggcagaatttgactgaattcaggggtgagagtttgatccagtccaagtgtatttgaatttgagcacgcagttcaaccagtgtttaca

SEQ ID NO: 92321 - DNA, 201 bp, Homo sapiens
ggcaggcaaggagattccgggccagggtcgcggcggcagtcggcaagcgttcgattctctggcgttggatcgcgagcggtgtctgcttgtcccgccgaggsctcccaggacagggcagggatctagggggtttgcgcacctgctttttaatgccccgcccccccttttttttttaaagtggagggggtgaaagtgagggag

SEQ ID NO: 92322 - DNA, 159 bp, Homo sapiens
gccatcccggcggctaaggagagcgggcaggcaaggagattccgggccagggtcgcggyggcagtcggcaagcgttcgattctctggcgttggatcgcgagcggtgtctgcttgtcccgccgagggctcccaggacagggcagggatctagggggtttg

SEQ ID NO: 92323 - DNA, 201 bp, Homo sapiens; identical to SEQ ID NO: 92316

SEQ ID NO: 92324 - DNA, 201 bp, Homo sapiens; identical to SEQ ID NO: 92317

SEQ ID NO: 92325 - DNA, 201 bp, Homo sapiens; identical to SEQ ID NO: 92318

SEQ ID NO: 92326 - DNA, 174 bp, Homo sapiens; identical to SEQ ID NO: 92319

SEQ ID NO: 92327 - DNA, 201 bp, Homo sapiens; identical to SEQ ID NO: 92320

SEQ ID NO: 92328 - DNA, 201 bp, Homo sapiens; identical to SEQ ID NO: 92321

SEQ ID NO: 92329 - DNA, 159 bp, Homo sapiens; identical to SEQ ID NO: 92322

SEQ ID NO: 92330 - DNA, 201 bp, Homo sapiens
ccaggaggcatctcacaacgtccccaaccagagttccgagtcacttgctggtgaatacaacacacacaatggaccttccacaccagcgaaagagggagacrcagacaggccgcaccgggcctccgacgggaagctccgaggccggtctaagaggagcagtgacccgtccccggcaggggacaatgagattgaggaaaagca

SEQ ID NO: 92331 - DNA, 201 bp, Homo sapiens
tcagcacctcacccactggacagagcccatacacctaccagatgcacggcacaacagggttctatcaaggaggaaatggactgggcaacgcagccggtttygggagtgtgcaccaggactatccttcctaccccggcttcccccagagccagtacccccagtattacggctcatcctacaaccctccctacgtcccggcca

SEQ ID NO: 92332 - DNA, 201 bp, Homo sapiens
caacgtccccaaccagagttccgagtcacttgctggtgaatacaacacacacaatggaccttccacaccagcgaaagagggagacacagacaggccgcacygggcctccgacgggaagctccgaggccggtctaagaggagcagtgacccgtccccggcaggggacaatgagattgaggaaaagcaacttaaggatgtatt

SEQ ID NO: 92333 - DNA, 201 bp, Homo sapiens
accagagttccgagtcacttgctggtgaatacaacacacacaatggaccttccacaccagcgaaagagggagacacagacaggccgcaccgggcctccgaygggaagctccgaggccggtctaagaggagcagtgacccgtccccggcaggggacaatgagattgaggaaaagcaacttaaggatgtattcaagcaaaaca

SEQ ID NO: 92334 - DNA, 201 bp, Homo sapiens
cttctccagatcttgcccacgtgtcctcccccgccagccttccacagccatggcagcctacggccagacgcagtacagtgcggggatccagcaggctaccycctatacagcttacccacctccagcacaagcctatggaatcccttcctacagcatcaagacagaagacagcttgaaccattcccctggccagagtggatt

SEQ ID NO: 92335 - DNA, 201 bp, Homo sapiens
acaaaagcaaggaattgccaatttggggggtgcctggtgatgaggaggggatgggtttgtcttgtcttctttttaatttatggactagtctcattactccrgaattatgctcttgtacctgtgtggctgggtttcttagtcgttggtttggtttggttttttgaactggtatgtagggtggttcacagttctaatgtaagc

SEQ ID NO: 92336 - DNA, 201 bp, Homo sapiens
aatttatggactagtctcattactccagaattatgctcttgtacctgtgtggctgggtttcttagtcgttggtttggtttggttttttgaactggtatgtrgggtggttcacagttctaatgtaagcactctcttctccaagttgtgctttgtggggacaatcattctttgaacattagagaggaaggcagttcaagctgt

SEQ ID NO: 92337 - DNA, 201 bp, Homo sapiens
atgctcttgtacctgtgtggctgggtttcttagtcgttggtttggtttggttttttgaactggtatgtagggtggttcacagttctaatgtaagcactctmttctccaagttgtgctttgtggggacaatcattctttgaacattagagaggaaggcagttcaagctgttgaaaagactattgcttatttttgtttttaaa

SEQ ID NO: 92338 - DNA, 201 bp, Homo sapiens; identical to SEQ ID NO: 92331

SEQ ID NO: 92339 - DNA, 201 bp, Homo sapiens
tggtgatcggtgatggtgtggaagaggagcaaggagcgaaaaagcacaacatgcctttctggcggatatcctgccacgcagacctggaggcactgaggcaygccctggagctggagtatttatagcaggatcagcagcatctccacctgccatctcaccctcagaccccctcgccttccccacctccccaccgagaactcc

SEQ ID NO: 92340 - DNA, 201 bp, Homo sapiens
gtacccaacattggcttcggagtatttgactttggggaaaagggctggctcggagtctagactcttctgtaagactcacagaacaaaagcaaggaattgcyaatttggggggtgcctggtgatgaggaggggatgggtttgtcttgtcttctttttaatttatggactagtctcattactccagaattatgctcttgtacc

SEQ ID NO: 92341 - DNA, 201 bp, Homo sapiens
ccaggaggcatctcacaacgtccccaaccagagttccgagtcacttgctggtgaatacaacacacacaatggaccttccacaccagcgaaagagggagacrcagacaggccgcaccgggcctccgacgggaagctccgaggccggtctaagaggagcagtgacccgtccccggcaggggacaatgagattgagcgtgtgtt

SEQ ID NO: 92342 - DNA, 201 bp, Homo sapiens
caacgtccccaaccagagttccgagtcacttgctggtgaatacaacacacacaatggaccttccacaccagcgaaagagggagacacagacaggccgcacygggcctccgacgggaagctccgaggccggtctaagaggagcagtgacccgtccccggcaggggacaatgagattgagcgtgtgttcgtgtgggacttgga

SEQ ID NO: 92343 - DNA, 201 bp, Homo sapiens
tacccaacattggcttcggagtatttgactttggggaaaagggctggctcggagtctagactcttctgtaagactcacagaacaaaagcaaggaattgccratttggggggtgcctggtgatgaggaggggatgggtttgtcttgtcttctttttaatttatggactagtctcattactccagaattatgctcttgtacct

SEQ ID NO: 92344 - DNA, 201 bp, Homo sapiens
accagagttccgagtcacttgctggtgaatacaacacacacaatggaccttccacaccagcgaaagagggagacacagacaggccgcaccgggcctccgaygggaagctccgaggccggtctaagaggagcagtgacccgtccccggcaggggacaatgagattgagcgtgtgttcgtgtgggacttggatgagacaataa

SEQ ID NO: 92345 - DNA, 201 bp, Homo sapiens; identical to SEQ ID NO: 92334

SEQ ID NO: 92346 - DNA, 201 bp, Homo sapiens; identical to SEQ ID NO: 92341

SEQ ID NO: 92347 - DNA, 201 bp, Homo sapiens; identical to SEQ ID NO: 92331

SEQ ID NO: 92348 - DNA, 201 bp, Homo sapiens; identical to SEQ ID NO: 92342

SEQ ID NO: 92349 - DNA, 201 bp, Homo sapiens; identical to SEQ ID NO: 92344

SEQ ID NO: 92350 - DNA, 122 bp, Homo sapiens
tggtgatcggtgatggtgtggaagaggagcaaggagcgaaaaagcacaacatgcctttctggcggatatcctgccacgcagacctggaggcactgaggcaygccctggagctggagtattta

SEQ ID NO: 92351 - DNA, 201 bp, Homo sapiens; identical to SEQ ID NO: 92334

SEQ ID NO: 92352 - DNA, 201 bp, Homo sapiens; identical to SEQ ID NO: 92335

SEQ ID NO: 92353 - DNA, 201 bp, Homo sapiens; identical to SEQ ID NO: 92336

SEQ ID NO: 92354 - DNA, 201 bp, Homo sapiens; identical to SEQ ID NO: 92337

SEQ ID NO: 92355 - DNA, 201 bp, Homo sapiens; identical to SEQ ID NO: 92331

SEQ ID NO: 92356 - DNA, 201 bp, Homo sapiens; identical to SEQ ID NO: 92339

SEQ ID NO: 92357 - DNA, 201 bp, Homo sapiens; identical to SEQ ID NO: 92340

SEQ ID NO: 92358 - DNA, 201 bp, Homo sapiens; identical to SEQ ID NO: 92341

SEQ ID NO: 92359 - DNA, 201 bp, Homo sapiens; identical to SEQ ID NO: 92342

SEQ ID NO: 92360 - DNA, 201 bp, Homo sapiens; identical to SEQ ID NO: 92343

SEQ ID NO: 92361 - DNA, 201 bp, Homo sapiens; identical to SEQ ID NO: 92344

SEQ ID NO: 92362 - DNA, 201 bp, Homo sapiens; identical to SEQ ID NO: 92334

SEQ ID NO: 92363 - DNA, 201 bp, Homo sapiens
atgccatgatcgagaagaagctggaaccactgtcacaggatgaagaccagcacgcggacctgacccagagccgccgcccacttaccagctgcaccattttyctgggatatacatccaacctcatcagttcaggcatccgtgagaccattcgctaccttgtgcagcacaacatggtggacgtattggtgaccacagctggcg

SEQ ID NO: 92364 - DNA, 201 bp, Homo sapiens
accggcttccaagcaaccaacttcgggcgcgctgtacagcaagtcaatgccatgatcgagaagaagctggaaccactgtcacaggatgaagaccagcacgsggacctgacccagagccgccgcccacttaccagctgcaccattttcctgggatatacatccaacctcatcagttcaggcatccgtgagaccattcgctac

SEQ ID NO: 92365 - DNA, 201 bp, Homo sapiens
tacagcaagtcaatgccatgatcgagaagaagctggaaccactgtcacaggatgaagaccagcacgcggacctgacccagagccgccgcccacttaccagytgcaccattttcctgggatatacatccaacctcatcagttcaggcatccgtgagaccattcgctaccttgtgcagcacaacatggtggacgtattggtga

SEQ ID NO: 92366 - DNA, 201 bp, Homo sapiens
tcgggcgcgctgtacagcaagtcaatgccatgatcgagaagaagctggaaccactgtcacaggatgaagaccagcacgcggacctgacccagagccgccgsccacttaccagctgcaccattttcctgggatatacatccaacctcatcagttcaggcatccgtgagaccattcgctaccttgtgcagcacaacatggtgg

SEQ ID NO: 92367 - DNA, 145 bp, Homo sapiens
cggtctttcgcccaaagcacgttccctacttcctgtgctcttgcrgagacgcgcgcgtcggggtttaacgcgtttctgggccgccgtaagcccggcctaggggcagctttgactcgagagccggctataggcgcatggaaggttc

SEQ ID NO: 92368 - DNA, 109 bp, Homo sapiens
cggtctttygcccaaagcacgttccctacttcctgtgctcttgcggagacgcgcgcgtcggggtttaacgcgtttctgggccgccgtaagcccggcctaggggcagctt

SEQ ID NO: 92369 - DNA, 201 bp, Homo sapiens
ggatcaataggatcggaaacctgctggtgcccaatgagaattactgcaagtttgaggactggctgatgcccattctggaccagatggtgatggagcagaayacagagggtgtaaagtggacgccttctaagatgatcgcccggctgggcaaggagatcaacaacccagagtccgtgtattactgggcccagaagaaccaca

SEQ ID NO: 92370 - DNA, 201 bp, Homo sapiens
ggcctggtcctggacatcgttgagggtgcccgaccagacgaggctgtctcctggggcaagatccgggtggatgcacagcccgtcaaggtctatgctgacgyctccctggtcttccccctgcttgtggctgaaacctttgcccagaagatggatgccttcatgcatgagaagaacgaggactgagcggctgcggtcccagga

SEQ ID NO: 92371 - DNA, 201 bp, Homo sapiens
agtgcctggcgcccacatacttgggcgagtttagcctcagggggaaggagctccgggagaacgggatcaataggatcggaaacctgctggtgcccaatgasaattactgcaagtttgaggactggctgatgcccattctggaccagatggtgatggagcagaacacagagggtgtaaagtggacgccttctaagatgatcg

SEQ ID NO: 92372 - DNA, 201 bp, Homo sapiens
tgcccaatgagaattactgcaagtttgaggactggctgatgcccattctggaccagatggtgatggagcagaacacagagggtgtaaagtggacgccttcyaagatgatcgcccggctgggcaaggagatcaacaacccagagtccgtgtattactgggcccagaagaaccacatccctgtgtttagtcccgcacttacag

SEQ ID NO: 92373 - DNA, 201 bp, Homo sapiens
acttcaaccgcggtgtgaattaccgcgcactgctggaggccttcggcaccaccggcttccaagcaaccaacttcgggcgcgctgtacagcaagtcaatgcyatgatcgagaagaagctggaaccactgtcacaggatgaagaccagcacgcggacctgacccagagccgccgcccacttaccagctgcaccattttcctgg

SEQ ID NO: 92374 - DNA, 201 bp, Homo sapiens
gtccggggctacgacttcaaccgcggtgtgaattaccgcgcactgctggaggccttcggcaccaccggcttccaagcaaccaacttcgggcgcgctgtacrgcaagtcaatgccatgatcgagaagaagctggaaccactgtcacaggatgaagaccagcacgcggacctgacccagagccgccgcccacttaccagctgc

SEQ ID NO: 92375 - DNA, 161 bp, Homo sapiens
cggtctttcgcccaaagcacgttccctacttcctgtgctcttgcggagacgcgcgcgtcgrggtttaacgcgtttctgggccgccgtaagcccggcctaggggcagctttgactcgagagccggctataggcgcatggaaggttccctggaacgggaggcg

SEQ ID NO: 92376 - DNA, 201 bp, Homo sapiens
tgatcgagaagaagctggaaccactgtcacaggatgaagaccagcacgcggacctgacccagagccgccgcccacttaccagctgcaccattttcctgggrtatacatccaacctcatcagttcaggcatccgtgagaccattcgctaccttgtgcagcacaacatggtggacgtattggtgaccacagctggcggcgtgg

SEQ ID NO: 92377 - DNA, 201 bp, Homo sapiens
ttctggaccagatggtgatggagcagaacacagagggtgtaaagtggacgccttctaagatgatcgcccggctgggcaaggagatcaacaacccagagtcsgtgtattactgggcccagaagaaccacatccctgtgtttagtcccgcacttacagacggctcgctgggcgacatgatcttcttccattcctacaagaacc

SEQ ID NO: 92378 - DNA, 145 bp, Homo sapiens; identical to SEQ ID NO: 92367

SEQ ID NO: 92379 - DNA, 201 bp, Homo sapiens; identical to SEQ ID NO: 92369

SEQ ID NO: 92380 - DNA, 201 bp, Homo sapiens; identical to SEQ ID NO: 92376

SEQ ID NO: 92381 - DNA, 201 bp, Homo sapiens
ggtatctgaagtccttccatgtctgtgtctcggtccttggtcctgttggtgggtcccctggcttcagcctgctccatcctctgcctcataggcctcctctygccagcactggacgctgcctcccatggcggtcagcaggcagggctctgttgggtggtaggccagcgactgcaccacaccggaacccacaggcagggccag

SEQ ID NO: 92382 - DNA, 201 bp, Homo sapiens; identical to SEQ ID NO: 92364

SEQ ID NO: 92383 - DNA, 201 bp, Homo sapiens; identical to SEQ ID NO: 92363

SEQ ID NO: 92384 - DNA, 201 bp, Homo sapiens
aacctttgcccagaagatggatgccttcatgcatgagaagaacgaggactgagcggctgcggtcccaggaaggtcttaccccctcttctatttattaattkgcagacccagcccctcccctactttttggtcagctacgtctctagaataagatggtatctgaagtccttccatgtctgtgtctcggtccttggtcctgtt

SEQ ID NO: 92385 - DNA, 201 bp, Homo sapiens; identical to SEQ ID NO: 92365

SEQ ID NO: 92386 - DNA, 201 bp, Homo sapiens; identical to SEQ ID NO: 92366

SEQ ID NO: 92387 - DNA, 109 bp, Homo sapiens; identical to SEQ ID NO: 92368

SEQ ID NO: 92388 - DNA, 201 bp, Homo sapiens; identical to SEQ ID NO: 92370

SEQ ID NO: 92389 - DNA, 201 bp, Homo sapiens; identical to SEQ ID NO: 92371

SEQ ID NO: 92390 - DNA, 201 bp, Homo sapiens; identical to SEQ ID NO: 92372

SEQ ID NO: 92391 - DNA, 201 bp, Homo sapiens; identical to SEQ ID NO: 92373

SEQ ID NO: 92392 - DNA, 161 bp, Homo sapiens; identical to SEQ ID NO: 92375

SEQ ID NO: 92393 - DNA, 201 bp, Homo sapiens; identical to SEQ ID NO: 92374

SEQ ID NO: 92394 - DNA, 201 bp, Homo sapiens; identical to SEQ ID NO: 92377

SEQ ID NO: 92395 - DNA, 136 bp, Homo sapiens
tctgcctcataggcctcctctcgccagcactggacgctgcctcccatggcggtcagcaggcagggctctgttgggtggtaggccagcgactgcaccacacyggaacccacaggcagggccagagccagcgcaccct

SEQ ID NO: 92396 - DNA, 145 bp, Homo sapiens; identical to SEQ ID NO: 92367

SEQ ID NO: 92397 - DNA, 201 bp, Homo sapiens; identical to SEQ ID NO: 92369

SEQ ID NO: 92398 - DNA, 201 bp, Homo sapiens; identical to SEQ ID NO: 92376

SEQ ID NO: 92399 - DNA, 201 bp, Homo sapiens; identical to SEQ ID NO: 92381

SEQ ID NO: 92400 - DNA, 201 bp, Homo sapiens; identical to SEQ ID NO: 92364

SEQ ID NO: 92401 - DNA, 201 bp, Homo sapiens; identical to SEQ ID NO: 92363

SEQ ID NO: 92402 - DNA, 201 bp, Homo sapiens; identical to SEQ ID NO: 92384

SEQ ID NO: 92403 - DNA, 201 bp, Homo sapiens; identical to SEQ ID NO: 92365

SEQ ID NO: 92404 - DNA, 201 bp, Homo sapiens; identical to SEQ ID NO: 92366

SEQ ID NO: 92405 - DNA, 109 bp, Homo sapiens; identical to SEQ ID NO: 92368

SEQ ID NO: 92406 - DNA, 201 bp, Homo sapiens
caggagtttgatggctctgactcaggtgcccgaccagacgaggctgtctcctggggcaagatccgggtggatgcacagcccgtcaaggtctatgctgacgyctccctggtcttccccctgcttgtggctgaaacctttgcccagaagatggatgccttcatgcatgagaagaacgaggactgagcggctgcggtcccagga

SEQ ID NO: 92407 - DNA, 201 bp, Homo sapiens; identical to SEQ ID NO: 92371

SEQ ID NO: 92408 - DNA, 201 bp, Homo sapiens; identical to SEQ ID NO: 92372

SEQ ID NO: 92409 - DNA, 201 bp, Homo sapiens; identical to SEQ ID NO: 92373

SEQ ID NO: 92410 - DNA, 161 bp, Homo sapiens; identical to SEQ ID NO: 92375

SEQ ID NO: 92411 - DNA, 201 bp, Homo sapiens; identical to SEQ ID NO: 92374

SEQ ID NO: 92412 - DNA, 201 bp, Homo sapiens; identical to SEQ ID NO: 92377

SEQ ID NO: 92413 - DNA, 136 bp, Homo sapiens; identical to SEQ ID NO: 92395

SEQ ID NO: 92414 - DNA, 145 bp, Homo sapiens; identical to SEQ ID NO: 92367

SEQ ID NO: 92415 - DNA, 201 bp, Homo sapiens; identical to SEQ ID NO: 92369

SEQ ID NO: 92416 - DNA, 201 bp, Homo sapiens
tgatcgagaagaagctggaaccactgtcacaggatgaagaccagcacgcggacctgacccagagccgccgcccacttaccagctgcaccattttcctgggrtatacatccaacctcatcagttcaggcatccgtgagaccattcgctaccttgtgcagcacaacatgcagagctccctcataagagtcactggacaaggat

SEQ ID NO: 92417 - DNA, 201 bp, Homo sapiens; identical to SEQ ID NO: 92381

SEQ ID NO: 92418 - DNA, 201 bp, Homo sapiens; identical to SEQ ID NO: 92364

SEQ ID NO: 92419 - DNA, 201 bp, Homo sapiens
atgccatgatcgagaagaagctggaaccactgtcacaggatgaagaccagcacgcggacctgacccagagccgccgcccacttaccagctgcaccattttyctgggatatacatccaacctcatcagttcaggcatccgtgagaccattcgctaccttgtgcagcacaacatgcagagctccctcataagagtcactggac

SEQ ID NO: 92420 - DNA, 201 bp, Homo sapiens; identical to SEQ ID NO: 92384

SEQ ID NO: 92421 - DNA, 201 bp, Homo sapiens
tacagcaagtcaatgccatgatcgagaagaagctggaaccactgtcacaggatgaagaccagcacgcggacctgacccagagccgccgcccacttaccagytgcaccattttcctgggatatacatccaacctcatcagttcaggcatccgtgagaccattcgctaccttgtgcagcacaacatgcagagctccctcataa

SEQ ID NO: 92422 - DNA, 201 bp, Homo sapiens
tcgggcgcgctgtacagcaagtcaatgccatgatcgagaagaagctggaaccactgtcacaggatgaagaccagcacgcggacctgacccagagccgccgsccacttaccagctgcaccattttcctgggatatacatccaacctcatcagttcaggcatccgtgagaccattcgctaccttgtgcagcacaacatgcaga

SEQ ID NO: 92423 - DNA, 109 bp, Homo sapiens; identical to SEQ ID NO: 92368

SEQ ID NO: 92424 - DNA, 201 bp, Homo sapiens; identical to SEQ ID NO: 92371

SEQ ID NO: 92425 - DNA, 201 bp, Homo sapiens; identical to SEQ ID NO: 92406

SEQ ID NO: 92426 - DNA, 201 bp, Homo sapiens; identical to SEQ ID NO: 92372

SEQ ID NO: 92427 - DNA, 201 bp, Homo sapiens; identical to SEQ ID NO: 92373

SEQ ID NO: 92428 - DNA, 161 bp, Homo sapiens; identical to SEQ ID NO: 92375

SEQ ID NO: 92429 - DNA, 201 bp, Homo sapiens; identical to SEQ ID NO: 92374

SEQ ID NO: 92430 - DNA, 201 bp, Homo sapiens; identical to SEQ ID NO: 92377

SEQ ID NO: 92431 - DNA, 136 bp, Homo sapiens; identical to SEQ ID NO: 92395

SEQ ID NO: 92432 - DNA, 201 bp, Homo sapiens; identical to SEQ ID NO: 92363

SEQ ID NO: 92433 - DNA, 201 bp, Homo sapiens; identical to SEQ ID NO: 92364

SEQ ID NO: 92434 - DNA, 201 bp, Homo sapiens; identical to SEQ ID NO: 92365

SEQ ID NO: 92435 - DNA, 201 bp, Homo sapiens; identical to SEQ ID NO: 92366

SEQ ID NO: 92436 - DNA, 145 bp, Homo sapiens; identical to SEQ ID NO: 92367

SEQ ID NO: 92437 - DNA, 109 bp, Homo sapiens; identical to SEQ ID NO: 92368

SEQ ID NO: 92438 - DNA, 201 bp, Homo sapiens; identical to SEQ ID NO: 92369

SEQ ID NO: 92439 - DNA, 201 bp, Homo sapiens; identical to SEQ ID NO: 92406

SEQ ID NO: 92440 - DNA, 201 bp, Homo sapiens; identical to SEQ ID NO: 92371

SEQ ID NO: 92441 - DNA, 201 bp, Homo sapiens; identical to SEQ ID NO: 92372

SEQ ID NO: 92442 - DNA, 201 bp, Homo sapiens; identical to SEQ ID NO: 92373

SEQ ID NO: 92443 - DNA, 201 bp, Homo sapiens; identical to SEQ ID NO: 92374

SEQ ID NO: 92444 - DNA, 161 bp, Homo sapiens; identical to SEQ ID NO: 92375

SEQ ID NO: 92445 - DNA, 201 bp, Homo sapiens; identical to SEQ ID NO: 92376

SEQ ID NO: 92446 - DNA, 201 bp, Homo sapiens; identical to SEQ ID NO: 92377

SEQ ID NO: 92447 - DNA, 201 bp, Homo sapiens; identical to SEQ ID NO: 92363

SEQ ID NO: 92448 - DNA, 201 bp, Homo sapiens; identical to SEQ ID NO: 92364

SEQ ID NO: 92449 - DNA, 201 bp, Homo sapiens; identical to SEQ ID NO: 92365

SEQ ID NO: 92450 - DNA, 201 bp, Homo sapiens; identical to SEQ ID NO: 92366

SEQ ID NO: 92451 - DNA, 145 bp, Homo sapiens; identical to SEQ ID NO: 92367

SEQ ID NO: 92452 - DNA, 109 bp, Homo sapiens; identical to SEQ ID NO: 92368

SEQ ID NO: 92453 - DNA, 201 bp, Homo sapiens; identical to SEQ ID NO: 92369

SEQ ID NO: 92454 - DNA, 201 bp, Homo sapiens; identical to SEQ ID NO: 92406

SEQ ID NO: 92455 - DNA, 201 bp, Homo sapiens; identical to SEQ ID NO: 92371

SEQ ID NO: 92456 - DNA, 201 bp, Homo sapiens; identical to SEQ ID NO: 92372

SEQ ID NO: 92457 - DNA, 201 bp, Homo sapiens; identical to SEQ ID NO: 92373

SEQ ID NO: 92458 - DNA, 201 bp, Homo sapiens; identical to SEQ ID NO: 92374

SEQ ID NO: 92459 - DNA, 161 bp, Homo sapiens; identical to SEQ ID NO: 92375

SEQ ID NO: 92460 - DNA, 201 bp, Homo sapiens; identical to SEQ ID NO: 92376

SEQ ID NO: 92461 - DNA, 201 bp, Homo sapiens; identical to SEQ ID NO: 92377

SEQ ID NO: 92462 - DNA, 201 bp, Homo sapiens
gcttccaagcaaccaacttcgggcgcgctgtacagcaagtcaatgccatgcacgcggacctgacccagagccgccgcccacttaccagctgcaccattttyctgggatatacatccaacctcatcagttcaggcatccgtgagaccattcgctaccttgtgcagcacaacatggtggacgtattggtgaccacagctggcg

SEQ ID NO: 92463 - DNA, 201 bp, Homo sapiens
cgcggtgtgaattaccgcgcactgctggaggccttcggcaccaccggcttccaagcaaccaacttcgggcgcgctgtacagcaagtcaatgccatgcacgsggacctgacccagagccgccgcccacttaccagctgcaccattttcctgggatatacatccaacctcatcagttcaggcatccgtgagaccattcgctac

SEQ ID NO: 92464 - DNA, 201 bp, Homo sapiens
tcggcaccaccggcttccaagcaaccaacttcgggcgcgctgtacagcaagtcaatgccatgcacgcggacctgacccagagccgccgcccacttaccagytgcaccattttcctgggatatacatccaacctcatcagttcaggcatccgtgagaccattcgctaccttgtgcagcacaacatggtggacgtattggtga

SEQ ID NO: 92465 - DNA, 201 bp, Homo sapiens
tgctggaggccttcggcaccaccggcttccaagcaaccaacttcgggcgcgctgtacagcaagtcaatgccatgcacgcggacctgacccagagccgccgsccacttaccagctgcaccattttcctgggatatacatccaacctcatcagttcaggcatccgtgagaccattcgctaccttgtgcagcacaacatggtgg

SEQ ID NO: 92466 - DNA, 145 bp, Homo sapiens; identical to SEQ ID NO: 92367

SEQ ID NO: 92467 - DNA, 109 bp, Homo sapiens; identical to SEQ ID NO: 92368

SEQ ID NO: 92468 - DNA, 201 bp, Homo sapiens; identical to SEQ ID NO: 92369

SEQ ID NO: 92469 - DNA, 201 bp, Homo sapiens; identical to SEQ ID NO: 92406

SEQ ID NO: 92470 - DNA, 201 bp, Homo sapiens; identical to SEQ ID NO: 92371

SEQ ID NO: 92471 - DNA, 201 bp, Homo sapiens; identical to SEQ ID NO: 92372

SEQ ID NO: 92472 - DNA, 201 bp, Homo sapiens
acttcaaccgcggtgtgaattaccgcgcactgctggaggccttcggcaccaccggcttccaagcaaccaacttcgggcgcgctgtacagcaagtcaatgcyatgcacgcggacctgacccagagccgccgcccacttaccagctgcaccattttcctgggatatacatccaacctcatcagttcaggcatccgtgagacca

SEQ ID NO: 92473 - DNA, 201 bp, Homo sapiens
gtccggggctacgacttcaaccgcggtgtgaattaccgcgcactgctggaggccttcggcaccaccggcttccaagcaaccaacttcgggcgcgctgtacrgcaagtcaatgccatgcacgcggacctgacccagagccgccgcccacttaccagctgcaccattttcctgggatatacatccaacctcatcagttcaggc

SEQ ID NO: 92474 - DNA, 161 bp, Homo sapiens; identical to SEQ ID NO: 92375

SEQ ID NO: 92475 - DNA, 201 bp, Homo sapiens
aagcaaccaacttcgggcgcgctgtacagcaagtcaatgccatgcacgcggacctgacccagagccgccgcccacttaccagctgcaccattttcctgggrtatacatccaacctcatcagttcaggcatccgtgagaccattcgctaccttgtgcagcacaacatggtggacgtattggtgaccacagctggcggcgtgg

SEQ ID NO: 92476 - DNA, 201 bp, Homo sapiens; identical to SEQ ID NO: 92377

SEQ ID NO: 92477 - DNA, 145 bp, Homo sapiens; identical to SEQ ID NO: 92367

SEQ ID NO: 92478 - DNA, 201 bp, Homo sapiens; identical to SEQ ID NO: 92369

SEQ ID NO: 92479 - DNA, 201 bp, Homo sapiens; identical to SEQ ID NO: 92376

SEQ ID NO: 92480 - DNA, 201 bp, Homo sapiens; identical to SEQ ID NO: 92381

SEQ ID NO: 92481 - DNA, 201 bp, Homo sapiens; identical to SEQ ID NO: 92364

SEQ ID NO: 92482 - DNA, 201 bp, Homo sapiens; identical to SEQ ID NO: 92363

SEQ ID NO: 92483 - DNA, 201 bp, Homo sapiens; identical to SEQ ID NO: 92384

SEQ ID NO: 92484 - DNA, 201 bp, Homo sapiens; identical to SEQ ID NO: 92365

SEQ ID NO: 92485 - DNA, 201 bp, Homo sapiens; identical to SEQ ID NO: 92366

SEQ ID NO: 92486 - DNA, 109 bp, Homo sapiens; identical to SEQ ID NO: 92368

SEQ ID NO: 92487 - DNA, 201 bp, Homo sapiens; identical to SEQ ID NO: 92406

SEQ ID NO: 92488 - DNA, 201 bp, Homo sapiens; identical to SEQ ID NO: 92371

SEQ ID NO: 92489 - DNA, 201 bp, Homo sapiens; identical to SEQ ID NO: 92372

SEQ ID NO: 92490 - DNA, 201 bp, Homo sapiens; identical to SEQ ID NO: 92373

SEQ ID NO: 92491 - DNA, 161 bp, Homo sapiens; identical to SEQ ID NO: 92375

SEQ ID NO: 92492 - DNA, 201 bp, Homo sapiens; identical to SEQ ID NO: 92374

SEQ ID NO: 92493 - DNA, 201 bp, Homo sapiens; identical to SEQ ID NO: 92377

SEQ ID NO: 92494 - DNA, 136 bp, Homo sapiens; identical to SEQ ID NO: 92395

SEQ ID NO: 92495 - DNA, 201 bp, Homo sapiens
tgtaaccagacagggcagatgacagctggatttcttgactggccacagggcacattcgcctcccaggtgatgctggagggggacaagttgaaagtggagcrggagatcgatgggggcctggagaccctgcgcctgaagctgccagctgtggtgacagctgacctgaggctcaacgagccccgctacgccacgctgcccaac

SEQ ID NO: 92496 - DNA, 201 bp, Homo sapiens
ctgctgggcaaacaggccatcgatgatgactgtaaccagacagggcagatgacagctggatttcttgactggccacagggcacattcgcctcccaggtgaygctggagggggacaagttgaaagtggagcgggagatcgatgggggcctggagaccctgcgcctgaagctgccagctgtggtgacagctgacctgaggctc

SEQ ID NO: 92497 - DNA, 201 bp, Homo sapiens
tgcaggtctgtgactcggacacaaggttggaccccatggcactgctggagctcgtgcgggtactggacgaggacccccgggtaggggctgttggtggggaygtgcggatccttaaccctctggactcctgggtcagcttcctaagcagcctgcgatactgggtagccttcaatgtggagcgggcttgtcagagctacttcc

SEQ ID NO: 92498 - DNA, 201 bp, Homo sapiens
gccgcctcaagggtcttcaggggaggccagaggagagctgctgggccccgagccacgaacttgctgggtggttctctgggcctcagtttccctcctctgcmaaacgagggggtcagcccaagattcttcagtctggactatattgggactgggacttctgggtctccagggagggtatttattggtcagggtgtgggatct

SEQ ID NO: 92499 - DNA, 201 bp, Homo sapiens
cttcccgcgcagccgaggcctaccacttggccgcgggggccggcgcctacgtgggctactgggtggccatgttgacgctgtactgggtgggcgtgcggagrctttgccggcggcggaccgggggctaccgcgtccaggtgtgagtccagccacgcggatgccgcctcaagggtcttcaggggaggccagaggagagctgct

SEQ ID NO: 92500 - DNA, 201 bp, Homo sapiens
cgctggcctccgatcgctacggcctcctggccttcggcctctacggggccttcctttcagcgcacctggtggcgcagagcctcttcgcgtacctggagcaycggcgggtggcggcggcggcgcgggggccgctggatgcagccaccgcgcgcagtgtggcgctgaccatctccgcctaccaggaggaccccgcgtacctgc

SEQ ID NO: 92501 - DNA, 175 bp, Homo sapiens
cggagagaagagagagcccggccagacccactgcgatgagacagcaggacgcgcccaagcccactcctgcagccygccgctgctccggcctggcccggagggtgctgaccatcgccttcgccctgctcatcctgggcctcatgacctgggcctacgccgccggggtgccgctggc

SEQ ID NO: 92502 - DNA, 201 bp, Homo sapiens
caccatgcgtggatgacctacgaggcggtggtctccggcctgttccccttcttcgtggcggccactgtgctgcgtctgttctacgcgggccgcccttgggygctgctgtgggtgctgctgtgcgtgcagggcgtggcactggccaaggcggccttcgcggcctggctgcggggctgcctgcgcatggtgcttctgtcgctc

SEQ ID NO: 92503 - DNA, 201 bp, Homo sapiens
cgtacctgcgccagtgcctggcgtccgcccgcgccctgctgtacccgcgcgcgcggctgcgcgtcctcatggtggtggatggcaaccgcgccgaggacctmtacatggtcgacatgttccgcgaggtcttcgctgacgaggaccccgccacgtacgtgtgggacggcaactaccaccagccctgggaacccgcggcggcgg

SEQ ID NO: 92504 - DNA, 201 bp, Homo sapiens
gcgtgtgcgtggcgcagcgctggggcggcaagcgcgaggtcatgtacacagccttcaaggcgctcggagattcggtggactacgtgcaggtctgtgactcrgacacaaggttggaccccatggcactgctggagctcgtgcgggtactggacgaggacccccgggtaggggctgttggtggggacgtgcggatccttaacc

SEQ ID NO: 92505 - DNA, 201 bp, Homo sapiens
acctgcgccagtgcctggcgtccgcccgcgccctgctgtacccgcgcgcgcggctgcgcgtcctcatggtggtggatggcaaccgcgccgaggacctctayatggtcgacatgttccgcgaggtcttcgctgacgaggaccccgccacgtacgtgtgggacggcaactaccaccagccctgggaacccgcggcggcgggcg

SEQ ID NO: 92506 - DNA, 201 bp, Homo sapiens
gggaacccgcggcggcgggcgcggtgggcgccggagcctatcgggaggtggaggcggaggatcctgggcggctggcagtggaggcgctggtgaggactcgyaggtgcgtgtgcgtggcgcagcgctggggcggcaagcgcgaggtcatgtacacagccttcaaggcgctcggagattcggtggactacgtgcaggtctgtg

SEQ ID NO: 92507 - DNA, 201 bp, Homo sapiens
cagcctgccgctgctccggcctggcccggagggtgctgaccatcgccttcgccctgctcatcctgggcctcatgacctgggcctacgccgccggggtgcckctggcctccgatcgctacggcctcctggccttcggcctctacggggccttcctttcagcgcacctggtggcgcagagcctcttcgcgtacctggagcacc

SEQ ID NO: 92508 - DNA, 201 bp, Homo sapiens; identical to SEQ ID NO: 92497

SEQ ID NO: 92509 - DNA, 201 bp, Homo sapiens; identical to SEQ ID NO: 92498

SEQ ID NO: 92510 - DNA, 201 bp, Homo sapiens; identical to SEQ ID NO: 92499

SEQ ID NO: 92511 - DNA, 201 bp, Homo sapiens; identical to SEQ ID NO: 92500

SEQ ID NO: 92512 - DNA, 185 bp, Homo sapiens
tgggagagcaagccggagagaagagagagcccggccagacccactgcgatgagacaggacgcgcccaagcccactcctgcagccygccgctgctccggcctggcccggagggtgctgaccatcgccttcgccctgctcatcctgggcctcatgacctgggcctacgccgccggggtgccgctggc

SEQ ID NO: 92513 - DNA, 201 bp, Homo sapiens; identical to SEQ ID NO: 92502

SEQ ID NO: 92514 - DNA, 201 bp, Homo sapiens; identical to SEQ ID NO: 92503

SEQ ID NO: 92515 - DNA, 201 bp, Homo sapiens; identical to SEQ ID NO: 92504

SEQ ID NO: 92516 - DNA, 201 bp, Homo sapiens; identical to SEQ ID NO: 92505

SEQ ID NO: 92517 - DNA, 201 bp, Homo sapiens; identical to SEQ ID NO: 92506

SEQ ID NO: 92518 - DNA, 201 bp, Homo sapiens; identical to SEQ ID NO: 92507

SEQ ID NO: 92519 - DNA, 201 bp, Homo sapiens
cggaggcccgcacgggacacggggccccagtttccgccccggaagcccaggacacggctccagtggcggcgcggcccagggcgcaggcgcgggtgtcggtyccaccgcgcgtcgtcctcgccccggccccggccaatcccttcgaatttggccgaggccgggaaatactagctaatcacggcgcgcgctgttgacgccggc

SEQ ID NO: 92520 - DNA, 201 bp, Homo sapiens
tctccggccgtccagcccgcgccgcgtcacctcccctcccggagcgaagggccctgctcgcccgaggacggaggcccgcacgggacacggggccccagttyccgccccggaagcccaggacacggctccagtggcggcgcggcccagggcgcaggcgcgggtgtcggtcccaccgcgcgtcgtcctcgccccggccccggc

SEQ ID NO: 92521 - DNA, 201 bp, Homo sapiens
cgcagccaggggccaacgagagccgacgctgggcgggcagcgtccgggagcccctccgaccctgcgctcccctcgtccgcgccctgaccccgcgtctccgrccgtccagcccgcgccgcgtcacctcccctcccggagcgaagggccctgctcgcccgaggacggaggcccgcacgggacacggggccccagtttccgccc

SEQ ID NO: 92522 - DNA, 201 bp, Homo sapiens
ctcagctaatttttgcaattttaatttactttatttttaaatttaatttttgtatttttagtagagacagggtttcaccatgttggccaggatggtctctyttgaccttgtgatccactcgcctcggcctcccaaagttctgggattacgcaggtgtgagccaccgtacctggcccttttttttttatttttaagacaagg

SEQ ID NO: 92523 - DNA, 201 bp, Homo sapiens; identical to SEQ ID NO: 92519

SEQ ID NO: 92524 - DNA, 201 bp, Homo sapiens; identical to SEQ ID NO: 92520

SEQ ID NO: 92525 - DNA, 201 bp, Homo sapiens; identical to SEQ ID NO: 92521

SEQ ID NO: 92526 - DNA, 116 bp, Homo sapiens
tactgaagttcagtgataactctgagcagtttcattgtgatcactgtaaatggtaatcagttggaattctcctaaatgtcttccagacactagtaaaaaamgacctgaaaattgtt

SEQ ID NO: 92527 - DNA, 201 bp, Homo sapiens
agagaagccgctgggggagctatggaagtgacccaaggctgcccactggagacgcctctccctgcagtcccccgagaggtgggagactcgcggaaggcccygtccccagcggagtccagaccccacaacttcaggagctctttcccggcagcagagatctgcaggctgcctcttctgccccggagctggggtgcactgggg

SEQ ID NO: 92528 - DNA, 201 bp, Homo sapiens
cgaagctgtccatgaggacatccgcgtgctctctgaggacgccatccgcactgccacagagaagccgctgggggagctatggaagtgacccaaggctgcccactggagacgcctctccctgcagtcccccgagaggtgggagactcgcggaaggccccgtccccagcggagtccagaccccacaacttcaggagctctttc

SEQ ID NO: 92529 - DNA, 201 bp, Homo sapiens
tcgtggacagatacgcattttctggtgtggccttcaccggtgccaaggagaatttttccctagactggtgtaaacagccagacgtgggccttcccaaaccygacctggtcctgttcctccagttacagctggcggatgctgccaagcggggagcgtttggccatgagcgctatgagaacggggctttccaggagcgggcgc

SEQ ID NO: 92530 - DNA, 201 bp, Homo sapiens
taattaaggaaaagttgagccagggcgtgaccctcgtcgtggacagatacgcattttctggtgtggccttcaccggtgccaaggagaatttttccctagaytggtgtaaacagccagacgtgggccttcccaaacccgacctggtcctgttcctccagttacagctggcggatgctgccaagcggggagcgtttggccatg

SEQ ID NO: 92531 - DNA, 201 bp, Homo sapiens
ctgggggagctatggaagtgacccaaggctgcccactggagacgcctctccctgcagtcccccgagaggtgggagactcgcggaaggccccgtccccagcrgagtccagaccccacaacttcaggagctctttcccggcagcagagatctgcaggctgcctcttctgccccggagctggggtgcactggggacccccgtgg

SEQ ID NO: 92532 - DNA, 201 bp, Homo sapiens
agaggtgggagactcgcggaaggccccgtccccagcggagtccagaccccacaacttcaggagctctttcccggcagcagagatctgcaggctgcctcttytgccccggagctggggtgcactggggacccccgtggtggggaccttggcagtgtggacatgagcagagcgatggagcagtctcctgccctctcccctgtc

SEQ ID NO: 92533 - DNA, 201 bp, Homo sapiens
ggtgccaaggagaatttttccctagactggtgtaaacagccagacgtgggccttcccaaacccgacctggtcctgttcctccagttacagctggcggatgmtgccaagcggggagcgtttggccatgagcgctatgagaacggggctttccaggagcgggcgctccggtgtttccaccagctcatgaaagacacgactttg

SEQ ID NO: 92534 - DNA, 201 bp, Homo sapiens
cactgccacagagaagccgctgggggagctatggaagtgacccaaggctgcccactggagacgcctctccctgcagtcccccgagaggtgggagactcgcrgaaggccccgtccccagcggagtccagaccccacaacttcaggagctctttcccggcagcagagatctgcaggctgcctcttctgccccggagctggggt

SEQ ID NO: 92535 - DNA, 129 bp, Homo sapiens
ggcccagggcgcaggcgcgggtgtcggtyccaccgcgcgtcgtcctcgccccggccccggccaatcccttcgaatttggccgaggccgggaaatactagctaatcacggcgcgcgctgttgacgccggc

SEQ ID NO: 92536 - DNA, 201 bp, Homo sapiens; identical to SEQ ID NO: 92529

SEQ ID NO: 92537 - DNA, 201 bp, Homo sapiens; identical to SEQ ID NO: 92530

SEQ ID NO: 92538 - DNA, 201 bp, Homo sapiens; identical to SEQ ID NO: 92533

SEQ ID NO: 92539 - DNA, 116 bp, Homo sapiens; identical to SEQ ID NO: 92526

SEQ ID NO: 92540 - DNA, 201 bp, Homo sapiens; identical to SEQ ID NO: 92519

SEQ ID NO: 92541 - DNA, 201 bp, Homo sapiens; identical to SEQ ID NO: 92520

SEQ ID NO: 92542 - DNA, 201 bp, Homo sapiens; identical to SEQ ID NO: 92521

SEQ ID NO: 92543 - DNA, 201 bp, Homo sapiens
gaggatcactcggtgcacctgcttttttctgcaaatcgctgggaacaagtaatttttccctagactggtgtaaacagccagacgtgggccttcccaaaccygacctggtcctgttcctccagttacagctggcggatgctgccaagcggggagcgtttggccatgagcgctatgagaacggggctttccaggagcgggcgc

SEQ ID NO: 92544 - DNA, 201 bp, Homo sapiens
cttctgagttcctacttgcaaaagaaaagtgacgtggaggatcactcggtgcacctgcttttttctgcaaatcgctgggaacaagtaatttttccctagaytggtgtaaacagccagacgtgggccttcccaaacccgacctggtcctgttcctccagttacagctggcggatgctgccaagcggggagcgtttggccatg

SEQ ID NO: 92545 - DNA, 201 bp, Homo sapiens
ctgggaacaagtaatttttccctagactggtgtaaacagccagacgtgggccttcccaaacccgacctggtcctgttcctccagttacagctggcggatgmtgccaagcggggagcgtttggccatgagcgctatgagaacggggctttccaggagcgggcgctccggtgtttccaccagctcatgaaagacacgactttg

SEQ ID NO: 92546 - DNA, 116 bp, Homo sapiens; identical to SEQ ID NO: 92526

SEQ ID NO: 92547 - DNA, 201 bp, Homo sapiens
gcgaggtccagctgcatctctacggccagcactaccgagtctacacccacagcttcctctgctatggccgtgaccaggtcctccagaggctgctggccagygccctccagacccacggcttccacccctgctggccgaggggcttttccacccaagtgctgctcggggatgtgtaccagtcaccatgcaccatggcccagc

SEQ ID NO: 92548 - DNA, 201 bp, Homo sapiens
gccgagatctggtttctgggctcttcagcttctcctcctgccccttctcccgatgctctttcaatggggtcttccagcccccagtggctgggaactttgtsgccttctctgccttcttctacactgtggactttttgcggacttcgatggggctgcccgtggccaccctgcagcagctggaggcagccgcagtgaatgtct

SEQ ID NO: 92549 - DNA, 201 bp, Homo sapiens
ctctcgggccaggaagagggggtgtttggctgggtgactgccaactacctgctggagaacttcatcaagtacggctgggtgggccggtggttccggccacrgaaggggacactgggggccatggacctggggggtgcctctacccagatcacttttgagacaaccagtccagctgaggacagagccagcgaggtccagctg

SEQ ID NO: 92550 - DNA, 201 bp, Homo sapiens
ggccagcacagctcctgtgatgttccaggtgggggcatctccagctatgcagacaacccttctggggccagccagagtcttgttggatgcctcgaacaggygcttcaggatgtgcccaaagagagacacgcgggcacacccctctacctgggagccacagcgggtatgcgcctgctcaacctgaccaatccagaggcctcg

SEQ ID NO: 92551 - DNA, 201 bp, Homo sapiens
gcctcgccggcctcctactgctgtgcgtccccacccgcgacgtccgggagccgcccgccctcaagtatggcatcgtcctggacgctggttcttcacacacrtccatgtttatctacaagtggccggcagacaaggagaacgacacaggcattgtgggccagcacagctcctgtgatgttccaggtgggggcatctccagct

SEQ ID NO: 92552 - DNA, 201 bp, Homo sapiens; identical to SEQ ID NO: 92547

SEQ ID NO: 92553 - DNA, 201 bp, Homo sapiens; identical to SEQ ID NO: 92548

SEQ ID NO: 92554 - DNA, 201 bp, Homo sapiens; identical to SEQ ID NO: 92549

SEQ ID NO: 92555 - DNA, 201 bp, Homo sapiens; identical to SEQ ID NO: 92550

SEQ ID NO: 92556 - DNA, 201 bp, Homo sapiens; identical to SEQ ID NO: 92551

SEQ ID NO: 92557 - DNA, 201 bp, Homo sapiens
cagctttgacagccattgtcaggagaggcccagtgaatatattgccaccatcttggagctcagtgcccttgtagagaaaagaagccagcatatcctccagyacatggactttctgtattacctctcccatgacgggcggcgcttccacagggcctgccgcctggtgcatgacttcacagacgctgtcatccgggagcggcg

SEQ ID NO: 92558 - DNA, 201 bp, Homo sapiens
gcccttggagttggggctttggtgatggtgaacaagagagatctagacgtgcagagtgcatttgagtttctggaagatcagagcttcagagattatctcargttagactccggagtctcagagatagtataatttgtgtgtgtgtgtgtgtgtgtgtgtgtgtgtgtgtgtgtgtgtcttgctttctcttcaggatgaaga

SEQ ID NO: 92559 - DNA, 201 bp, Homo sapiens
gtgtgtgtgtgtgtgtgtgtcttgctttctcttcaggatgaagatgggaaggcattgtcagatgaggatataagagcagaggctgacaccttcatgtttgsaggccatgacaccacggccagtggcctctcctgggtcctgtacaaccttgcgaggcacccagaataccaggagcgctgccgacaggaggtgcaagagctt

SEQ ID NO: 92560 - DNA, 193 bp, Homo sapiens
ctcccagcagaagaggagaagaggttgtgtgggacaagctgctcccgacagaaggatgtcgctgctgagcctgccctggctgggcctcagacyggtggcaatgtccccatggctactcctgctgctggttgtgggctcctggctactcgcccgcatcctggcttggacctatgccttctataacaactgccgc

SEQ ID NO: 92561 - DNA, 121 bp, Homo sapiens
ctcccagcagaagaggagaasaggttgtgtgggacaagctgctcccgacagaaggatgtcgctgctgagcctgccctggctgggcctcagaccggtggcaatgtccccatggctactcctg

SEQ ID NO: 92562 - DNA, 201 bp, Homo sapiens
cttccatttcaacatcctgaagtcctatataacgatcttcaacaagagtgcaaacatcatgcttgacaagtggcagcacctggcctcagagggcagcagtygtctggacatgtttgagcacatcagcctcatgaccttggacagtctacagaaatgcatcttcagctttgacagccattgtcaggagaggcccagtgaata

SEQ ID NO: 92563 - DNA, 201 bp, Homo sapiens
taacaactgccgccggctccagtgtttcccacagcccccaaaacggaactggttttggggtcacctgggcctgatcactcctacagaggagggcttgaagractcgacccagatgtcggccacctattcccagggctttacggttcctgaagccctggctgggagaagggatactgctgagtggcggtgacaagtggagcc

SEQ ID NO: 92564 - DNA, 201 bp, Homo sapiens
agtggagggggcagggttttgatgaggaaaatccaacatcacctcaccccaaaacacacacaagtgtctctccaaggctgctggacataggaaatcccackggcaaaccttctttgtctcacctgcaggtctacgaccccttccgctttgacccagagaacagcaaggggaggtcacctctggcttttattcctttctccg

SEQ ID NO: 92565 - DNA, 201 bp, Homo sapiens
agccatggaagatgcttgagaaagggaaggtcacagataggttttagagatgactttattgcatgcagcccacagggcactgctaattctgaaactgtgargagcatgatattttattcaacttataagttagtgtgttagtctttcacatttttatgtgtatctatatgtctatgtctttgtctatgtctgtatctatga

SEQ ID NO: 92566 - DNA, 201 bp, Homo sapiens
atcccactggcaaaccttctttgtctcacctgcaggtctacgaccccttccgctttgacccagagaacagcaaggggaggtcacctctggcttttattccyttctccgcagggcccaggaactgcatcgggcaggcgttcgccatggcggagatgaaagtggtcctggcgttgatgctgctgcacttccggttcctgccag

SEQ ID NO: 92567 - DNA, 201 bp, Homo sapiens
tcccagcagaagaggagaagaggttgtgtgggacaagctgctcccgacagaaggatgtcgctgctgagcctgccctggctgggcctcagaccggtggcaaygtccccatggctactcctgctgctggttgtgggctcctggctactcgcccgcatcctggcttggacctatgccttctataacaactgccgccggctccag

SEQ ID NO: 92568 - DNA, 201 bp, Homo sapiens
gaaggtcacagataggttttagagatgactttattgcatgcagcccacagggcactgctaattctgaaactgtgaggagcatgatattttattcaacttayaagttagtgtgttagtctttcacatttttatgtgtatctatatgtctatgtctttgtctatgtctgtatctatgataaaagatgcaccaaacccctggat

SEQ ID NO: 92569 - DNA, 201 bp, Homo sapiens
tgtcaggtgaaataaattggttttgatccaaagggcactgggagccatggaagatgcttgagaaagggaaggtcacagataggttttagagatgactttaytgcatgcagcccacagggcactgctaattctgaaactgtgaggagcatgatattttattcaacttataagttagtgtgttagtctttcacatttttatgt

SEQ ID NO: 92570 - DNA, 201 bp, Homo sapiens
gcaggcgttcgccatggcggagatgaaagtggtcctggcgttgatgctgctgcacttccggttcctgccagaccacactgagccccgcaggaagctggaaytgatcatgcgcgccgagggcgggctttggctgcgggtggagcccctgaatgtaggcttgcagtgactttctgacccatccacctgtttttttgcagattg

SEQ ID NO: 92571 - DNA, 201 bp, Homo sapiens
tcagggtattgatgattttttcaaagacaaagccaagtccaagactttggatttcattgatgtgcttctgctgagcaaggtaggtttctctatgatctgartttaggtgagagaatagagcttcatgtcaaatgtcaggtgaaataaattggttttgatccaaagggcactgggagccatggaagatgcttgagaaaggga

SEQ ID NO: 92572 - DNA, 201 bp, Homo sapiens
gggcactgctaattctgaaactgtgaggagcatgatattttattcaacttataagttagtgtgttagtctttcacatttttatgtgtatctatatgtctaygtctttgtctatgtctgtatctatgataaaagatgcaccaaacccctggatcacagcagcccattaattatttacagcagtaacagcaggtggagtagga

SEQ ID NO: 92573 - DNA, 176 bp, Homo sapiens
cttccggttcctgccagaccacactgagccccgcaggaagctggaattgatcatgcgcgccgagggcgggctttggctgcgggtggagcccctgaatgtargcttgcagtgactttctgacccatccacctgtttttttgcagattgtcatgaataaaacggtgctgtcacctctg

SEQ ID NO: 92574 - DNA, 201 bp, Homo sapiens
ttcaacttataagttagtgtgttagtctttcacatttttatgtgtatctatatgtctatgtctttgtctatgtctgtatctatgataaaagatgcaccaarcccctggatcacagcagcccattaattatttacagcagtaacagcaggtggagtaggatggtagtgctggctccccattcctagggcaacacaatgtttt

SEQ ID NO: 92575 - DNA, 201 bp, Homo sapiens
tccccaaaggcattacctgcctcatcgatattataggggtccatcacaacccaactgtgtggccggatcctgaggtgctgccttccccattcaccaccacyacccccatcctctacttttgtgtgtgtgtgtgtgaattccaaggttcctagtggagggggcagggttttgatgaggaaaatccaacatcacctcacccca

SEQ ID NO: 92576 - DNA, 201 bp, Homo sapiens
cctgtaaatgcacaagaatttgcaccaaggagaggggcccccacgttatgagtattatagcttatataggacagctagctcatatgctccttctttattayagggtgaaagttagagacagagaaagagagagagagagaatgctttgttctggcgtataaactacccctctcctgtgagatggcaatttctagagtttta

SEQ ID NO: 92577 - DNA, 201 bp, Homo sapiens
accaccacccccatcctctacttttgtgtgtgtgtgtgtgaattccaaggttcctagtggagggggcagggttttgatgaggaaaatccaacatcacctcrccccaaaacacacacaagtgtctctccaaggctgctggacataggaaatcccactggcaaaccttctttgtctcacctgcaggtctacgaccccttccgc

SEQ ID NO: 92578 - DNA, 201 bp, Homo sapiens
ttatagcttatataggacagctagctcatatgctccttctttattacagggtgaaagttagagacagagaaagagagagagagagaatgctttgttctggmgtataaactacccctctcctgtgagatggcaatttctagagttttataacccaaatatcttctggaaagataagattctctgggtttaccactctagaat

SEQ ID NO: 92579 - DNA, 201 bp, Homo sapiens
gatcactcctacagaggagggcttgaaggactcgacccagatgtcggccacctattcccagggctttacggttcctgaagccctggctgggagaagggatmctgctgagtggcggtgacaagtggagccgccaccgtcggatgctgacgcccgccttccatttcaacatcctgaagtcctatataacgatcttcaacaaga

SEQ ID NO: 92580 - DNA, 201 bp, Homo sapiens
ttgtctcacctgcaggtctacgaccccttccgctttgacccagagaacagcaaggggaggtcacctctggcttttattcctttctccgcagggcccaggarctgcatcgggcaggcgttcgccatggcggagatgaaagtggtcctggcgttgatgctgctgcacttccggttcctgccagaccacactgagccccgcagg

SEQ ID NO: 92581 - DNA, 201 bp, Homo sapiens
ctaacctccaaggcaaattgccattcaaatatcctgtaccccaggttgccagtatctttttctctgaaagtctgtattatgcagaaaaatgaaaatattcragaaccattgattcctgtcaccagggtccaaagaggaggcaaaggatctgggggaagcccttggagttggggctttggtgatggtgaacaagagagatct

SEQ ID NO: 92582 - DNA, 201 bp, Homo sapiens
tacttttgtgtgtgtgtgtgtgaattccaaggttcctagtggagggggcagggttttgatgaggaaaatccaacatcacctcaccccaaaacacacacaastgtctctccaaggctgctggacataggaaatcccactggcaaaccttctttgtctcacctgcaggtctacgaccccttccgctttgacccagagaacagc

SEQ ID NO: 92583 - DNA, 201 bp, Homo sapiens
caaggggaggtcacctctggcttttattcctttctccgcagggcccaggaactgcatcgggcaggcgttcgccatggcggagatgaaagtggtcctggcgytgatgctgctgcacttccggttcctgccagaccacactgagccccgcaggaagctggaattgatcatgcgcgccgagggcgggctttggctgcgggtgga

SEQ ID NO: 92584 - DNA, 201 bp, Homo sapiens
gttgccagtatctttttctctgaaagtctgtattatgcagaaaaatgaaaatattcgagaaccattgattcctgtcaccagggtccaaagaggaggcaaargatctgggggaagcccttggagttggggctttggtgatggtgaacaagagagatctagacgtgcagagtgcatttgagtttctggaagatcagagcttca

SEQ ID NO: 92585 - DNA, 201 bp, Homo sapiens
tttgatgaggaaaatccaacatcacctcaccccaaaacacacacaagtgtctctccaaggctgctggacataggaaatcccactggcaaaccttctttgtytcacctgcaggtctacgaccccttccgctttgacccagagaacagcaaggggaggtcacctctggcttttattcctttctccgcagggcccaggaactgc

SEQ ID NO: 92586 - DNA, 201 bp, Homo sapiens
ccactcagggtattgatgattttttcaaagacaaagccaagtccaagactttggatttcattgatgtgcttctgctgagcaaggtaggtttctctatgatrtgaatttaggtgagagaatagagcttcatgtcaaatgtcaggtgaaataaattggttttgatccaaagggcactgggagccatggaagatgcttgagaaa

SEQ ID NO: 92587 - DNA, 201 bp, Homo sapiens
ggacgacctggcccagctgcccttcctgaccatgtgcgtgaaggagagcctgaggttacatcccccagctcccttcatctcccgatgctgcacccaggacrttgttctcccagatggccgagtcatccccaaaggcattacctgcctcatcgatattataggggtccatcacaacccaactgtgtggccggatcctgaggt

SEQ ID NO: 92588 - DNA, 201 bp, Homo sapiens
aggatataagagcagaggctgacaccttcatgtttggaggccatgacaccacggccagtggcctctcctgggtcctgtacaaccttgcgaggcacccagartaccaggagcgctgccgacaggaggtgcaagagcttctgaaggaccgcgatcctaaagagattgaatgggacgacctggcccagctgcccttcctgacca

SEQ ID NO: 92589 - DNA, 201 bp, Homo sapiens
atatattgccaccatcttggagctcagtgcccttgtagagaaaagaagccagcatatcctccagcacatggactttctgtattacctctcccatgacgggyggcgcttccacagggcctgccgcctggtgcatgacttcacagacgctgtcatccgggagcggcgtcgcaccctccccactcagggtattgatgatttttt

SEQ ID NO: 92590 - DNA, 201 bp, Homo sapiens
gtgaatatattgccaccatcttggagctcagtgcccttgtagagaaaagaagccagcatatcctccagcacatggactttctgtattacctctcccatgaygggcggcgcttccacagggcctgccgcctggtgcatgacttcacagacgctgtcatccgggagcggcgtcgcaccctccccactcagggtattgatgatt

SEQ ID NO: 92591 - DNA, 201 bp, Homo sapiens; identical to SEQ ID NO: 92557

SEQ ID NO: 92592 - DNA, 201 bp, Homo sapiens
actttggatttcattgatgtgcttctgctgagcaaggatgaagatgggaaggcattgtcagatgaggatataagagcagaggctgacaccttcatgtttgsaggccatgacaccacggccagtggcctctcctgggtcctgtacaaccttgcgaggcacccagaataccaggagcgctgccgacaggaggtgcaagagctt

SEQ ID NO: 92593 - DNA, 201 bp, Homo sapiens
cagggctttacggtatggctgggtcccatcatccccttcatcgttttatgccaccctgacaccatccggtctatcaccaatgcctcagctgccattgcacycaaggataatctcttcatcaggttcctgaagccctggctgggagaagggatactgctgagtggcggtgacaagtggagccgccaccgtcggatgctgacg

SEQ ID NO: 92594 - DNA, 193 bp, Homo sapiens; identical to SEQ ID NO: 92560

SEQ ID NO: 92595 - DNA, 201 bp, Homo sapiens
acggaactggttttggggtcacctgggcctgatcactcctacagaggagggcttgaaggactcgacccagatgtcggccacctattcccagggctttacgrtatggctgggtcccatcatccccttcatcgttttatgccaccctgacaccatccggtctatcaccaatgcctcagctgccattgcacccaaggataatct

SEQ ID NO: 92596 - DNA, 121 bp, Homo sapiens; identical to SEQ ID NO: 92561

SEQ ID NO: 92597 - DNA, 201 bp, Homo sapiens; identical to SEQ ID NO: 92562

SEQ ID NO: 92598 - DNA, 201 bp, Homo sapiens
taacaactgccgccggctccagtgtttcccacagcccccaaaacggaactggttttggggtcacctgggcctgatcactcctacagaggagggcttgaagractcgacccagatgtcggccacctattcccagggctttacggtatggctgggtcccatcatccccttcatcgttttatgccaccctgacaccatccggtc

SEQ ID NO: 92599 - DNA, 201 bp, Homo sapiens; identical to SEQ ID NO: 92567

SEQ ID NO: 92600 - DNA, 201 bp, Homo sapiens
tccatcacaacccaactgtgtggccggatcctgaggtctacgaccccttccgctttgacccagagaacagcaaggggaggtcacctctggcttttattccyttctccgcagggcccaggaactgcatcgggcaggcgttcgccatggcggagatgaaagtggtcctggcgttgatgctgctgcacttccggttcctgccag

SEQ ID NO: 92601 - DNA, 201 bp, Homo sapiens; identical to SEQ ID NO: 92570

SEQ ID NO: 92602 - DNA, 201 bp, Homo sapiens
cttccggttcctgccagaccacactgagccccgcaggaagctggaattgatcatgcgcgccgagggcgggctttggctgcgggtggagcccctgaatgtargcttgcagtgactttctgacccatccacctgtttttttgcagattgtcatgaataaaacggtgctgtcacctctgcctgggcctcactgacagcctgcag

SEQ ID NO: 92603 - DNA, 101 bp, Homo sapiens
ggcttgcagtgactttctgacccatccacctgtttttttgcagattgtcatgaataaaacggtgctgtcacctctgcctgggcctcactgacagcctgcar

SEQ ID NO: 92604 - DNA, 201 bp, Homo sapiens
accctgacaccatccggtctatcaccaatgcctcagctgccattgcacccaaggataatctcttcatcaggttcctgaagccctggctgggagaagggatmctgctgagtggcggtgacaagtggagccgccaccgtcggatgctgacgcccgccttccatttcaacatcctgaagtcctatataacgatcttcaacaaga

SEQ ID NO: 92605 - DNA, 201 bp, Homo sapiens; identical to SEQ ID NO: 92583

SEQ ID NO: 92606 - DNA, 201 bp, Homo sapiens
tggccggatcctgaggtctacgaccccttccgctttgacccagagaacagcaaggggaggtcacctctggcttttattcctttctccgcagggcccaggarctgcatcgggcaggcgttcgccatggcggagatgaaagtggtcctggcgttgatgctgctgcacttccggttcctgccagaccacactgagccccgcagg

SEQ ID NO: 92607 - DNA, 201 bp, Homo sapiens
tttggatttcattgatgtgcttctgctgagcaaggatgaagatgggaaggcattgtcagatgaggatataagagcagaggctgacaccttcatgtttggargccatgacaccacggccagtggcctctcctgggtcctgtacaaccttgcgaggcacccagaataccaggagcgctgccgacaggaggtgcaagagcttct

SEQ ID NO: 92608 - DNA, 201 bp, Homo sapiens; identical to SEQ ID NO: 92587

SEQ ID NO: 92609 - DNA, 201 bp, Homo sapiens; identical to SEQ ID NO: 92588

SEQ ID NO: 92610 - DNA, 201 bp, Homo sapiens; identical to SEQ ID NO: 92589

SEQ ID NO: 92611 - DNA, 201 bp, Homo sapiens; identical to SEQ ID NO: 92590

SEQ ID NO: 92612 - DNA, 201 bp, Homo sapiens; identical to SEQ ID NO: 92557

SEQ ID NO: 92613 - DNA, 201 bp, Homo sapiens; identical to SEQ ID NO: 92592

SEQ ID NO: 92614 - DNA, 201 bp, Homo sapiens; identical to SEQ ID NO: 92593

SEQ ID NO: 92615 - DNA, 201 bp, Homo sapiens
ctggcatgggaaactgggggtttcctggtaaatggactcctagcaaactcccaaggattcaggatgtcgctgctgagcctgccctggctgggcctcagacyggtggcaatgtccccatggctactcctgctgctggttgtgggctcctggctactcgcccgcatcctggcttggacctatgccttctataacaactgccgc

SEQ ID NO: 92616 - DNA, 201 bp, Homo sapiens; identical to SEQ ID NO: 92595

SEQ ID NO: 92617 - DNA, 122 bp, Homo sapiens
ctgggggtggcagggctggaargtcctggcctgggatgaagaggggactgcctaaggctggggtggctccaagatgctggcatgggaaactgggggtttcctggtaaatggactcctagcaa

SEQ ID NO: 92618 - DNA, 201 bp, Homo sapiens; identical to SEQ ID NO: 92562

SEQ ID NO: 92619 - DNA, 201 bp, Homo sapiens; identical to SEQ ID NO: 92598

SEQ ID NO: 92620 - DNA, 201 bp, Homo sapiens
gaaactgggggtttcctggtaaatggactcctagcaaactcccaaggattcaggatgtcgctgctgagcctgccctggctgggcctcagaccggtggcaaygtccccatggctactcctgctgctggttgtgggctcctggctactcgcccgcatcctggcttggacctatgccttctataacaactgccgccggctccag

SEQ ID NO: 92621 - DNA, 201 bp, Homo sapiens; identical to SEQ ID NO: 92600

SEQ ID NO: 92622 - DNA, 201 bp, Homo sapiens; identical to SEQ ID NO: 92570

SEQ ID NO: 92623 - DNA, 201 bp, Homo sapiens; identical to SEQ ID NO: 92602

SEQ ID NO: 92624 - DNA, 101 bp, Homo sapiens; identical to SEQ ID NO: 92603

SEQ ID NO: 92625 - DNA, 201 bp, Homo sapiens; identical to SEQ ID NO: 92604

SEQ ID NO: 92626 - DNA, 201 bp, Homo sapiens; identical to SEQ ID NO: 92583

SEQ ID NO: 92627 - DNA, 201 bp, Homo sapiens; identical to SEQ ID NO: 92606

SEQ ID NO: 92628 - DNA, 201 bp, Homo sapiens; identical to SEQ ID NO: 92607

SEQ ID NO: 92629 - DNA, 201 bp, Homo sapiens; identical to SEQ ID NO: 92587

SEQ ID NO: 92630 - DNA, 201 bp, Homo sapiens; identical to SEQ ID NO: 92588

SEQ ID NO: 92631 - DNA, 201 bp, Homo sapiens; identical to SEQ ID NO: 92589

SEQ ID NO: 92632 - DNA, 201 bp, Homo sapiens; identical to SEQ ID NO: 92590

SEQ ID NO: 92633 - DNA, 201 bp, Homo sapiens
tggcagggctggaaggtcctggcctgggatgaagaggggactgcctaaggctggggtggctccaagatgctggcatgggaaactgggggtttcctggtaamtggactcctagcaaactcccaaggattcaggatgtcgctgctgagcctgccctggctgggcctcagaccggtggcaatgtccccatggctactcctgctg

SEQ ID NO: 92634 - DNA, 201 bp, Homo sapiens; identical to SEQ ID NO: 92557

SEQ ID NO: 92635 - DNA, 201 bp, Homo sapiens; identical to SEQ ID NO: 92592

SEQ ID NO: 92636 - DNA, 201 bp, Homo sapiens; identical to SEQ ID NO: 92593

SEQ ID NO: 92637 - DNA, 193 bp, Homo sapiens; identical to SEQ ID NO: 92560

SEQ ID NO: 92638 - DNA, 201 bp, Homo sapiens; identical to SEQ ID NO: 92595

SEQ ID NO: 92639 - DNA, 121 bp, Homo sapiens; identical to SEQ ID NO: 92561

SEQ ID NO: 92640 - DNA, 201 bp, Homo sapiens; identical to SEQ ID NO: 92562

SEQ ID NO: 92641 - DNA, 201 bp, Homo sapiens; identical to SEQ ID NO: 92598

SEQ ID NO: 92642 - DNA, 201 bp, Homo sapiens; identical to SEQ ID NO: 92564

SEQ ID NO: 92643 - DNA, 201 bp, Homo sapiens; identical to SEQ ID NO: 92566

SEQ ID NO: 92644 - DNA, 201 bp, Homo sapiens; identical to SEQ ID NO: 92567

SEQ ID NO: 92645 - DNA, 201 bp, Homo sapiens; identical to SEQ ID NO: 92570

SEQ ID NO: 92646 - DNA, 176 bp, Homo sapiens; identical to SEQ ID NO: 92573

SEQ ID NO: 92647 - DNA, 201 bp, Homo sapiens; identical to SEQ ID NO: 92575

SEQ ID NO: 92648 - DNA, 201 bp, Homo sapiens; identical to SEQ ID NO: 92577

SEQ ID NO: 92649 - DNA, 201 bp, Homo sapiens; identical to SEQ ID NO: 92604

SEQ ID NO: 92650 - DNA, 201 bp, Homo sapiens; identical to SEQ ID NO: 92582

SEQ ID NO: 92651 - DNA, 201 bp, Homo sapiens; identical to SEQ ID NO: 92580

SEQ ID NO: 92652 - DNA, 201 bp, Homo sapiens; identical to SEQ ID NO: 92583

SEQ ID NO: 92653 - DNA, 201 bp, Homo sapiens; identical to SEQ ID NO: 92587

SEQ ID NO: 92654 - DNA, 201 bp, Homo sapiens; identical to SEQ ID NO: 92585

SEQ ID NO: 92655 - DNA, 201 bp, Homo sapiens; identical to SEQ ID NO: 92607

SEQ ID NO: 92656 - DNA, 201 bp, Homo sapiens; identical to SEQ ID NO: 92588

SEQ ID NO: 92657 - DNA, 201 bp, Homo sapiens; identical to SEQ ID NO: 92589

SEQ ID NO: 92658 - DNA, 201 bp, Homo sapiens; identical to SEQ ID NO: 92590

SEQ ID NO: 92659 - DNA, 201 bp, Homo sapiens; identical to SEQ ID NO: 92557

SEQ ID NO: 92660 - DNA, 201 bp, Homo sapiens; identical to SEQ ID NO: 92592

SEQ ID NO: 92661 - DNA, 193 bp, Homo sapiens; identical to SEQ ID NO: 92560

SEQ ID NO: 92662 - DNA, 121 bp, Homo sapiens; identical to SEQ ID NO: 92561

SEQ ID NO: 92663 - DNA, 201 bp, Homo sapiens; identical to SEQ ID NO: 92562

SEQ ID NO: 92664 - DNA, 201 bp, Homo sapiens; identical to SEQ ID NO: 92563

SEQ ID NO: 92665 - DNA, 201 bp, Homo sapiens; identical to SEQ ID NO: 92600

SEQ ID NO: 92666 - DNA, 201 bp, Homo sapiens; identical to SEQ ID NO: 92567

SEQ ID NO: 92667 - DNA, 201 bp, Homo sapiens; identical to SEQ ID NO: 92570

SEQ ID NO: 92668 - DNA, 201 bp, Homo sapiens; identical to SEQ ID NO: 92602

SEQ ID NO: 92669 - DNA, 101 bp, Homo sapiens; identical to SEQ ID NO: 92603

SEQ ID NO: 92670 - DNA, 201 bp, Homo sapiens; identical to SEQ ID NO: 92579

SEQ ID NO: 92671 - DNA, 201 bp, Homo sapiens; identical to SEQ ID NO: 92583

SEQ ID NO: 92672 - DNA, 201 bp, Homo sapiens; identical to SEQ ID NO: 92606

SEQ ID NO: 92673 - DNA, 201 bp, Homo sapiens; identical to SEQ ID NO: 92607

SEQ ID NO: 92674 - DNA, 201 bp, Homo sapiens; identical to SEQ ID NO: 92587

SEQ ID NO: 92675 - DNA, 201 bp, Homo sapiens; identical to SEQ ID NO: 92588

SEQ ID NO: 92676 - DNA, 201 bp, Homo sapiens; identical to SEQ ID NO: 92589

SEQ ID NO: 92677 - DNA, 201 bp, Homo sapiens; identical to SEQ ID NO: 92590

SEQ ID NO: 92678 - DNA, 201 bp, Homo sapiens
cttggaaagttctcagttccctccaggcttctagaagcatctgggccagggctcatggctggataatttccctaggcttaacaacccaagcaagcttcgcrtcctcgttttattttttgttaaacttatgagaatgtgttaagaaagagtgcagctcgagagacattcagagatggaacacaccagaccccagatcacaaa

SEQ ID NO: 92679 - DNA, 201 bp, Homo sapiens
atatattcttcagggatcgatacggaaccaagcagcgggaactactttacatcctcctggcgtatgaggagtataacccggaggtgggctactgcagggayctgagccacatcgccgccttgttcctcctctatcttcctgaggaggatgcattctgggcactggtgcagctgctggccagtgagaggcactccctgcagg

SEQ ID NO: 92680 - DNA, 201 bp, Homo sapiens
cgggatctctctcgggctcaccctgcgcctgtgggacgtgtatctggtagaaggcgaacaggcgttgatgccgataacaagaatcgcctttaaggttcagyagaagcgcctcacgaagacgtccaggtgtggcccgtgggcacgtttttggaaccggttcgttgatgcctgggccagggatgatgacactgtgctcaagca

SEQ ID NO: 92681 - DNA, 198 bp, Homo sapiens
cagctcgagagacattcagagatggaacacaccagaccccagatcacaaagccaaccatgcccagcccctcccaacacccccagccccacgaccatcgttytgaattctgacgacgccgtgagcctgcctttgtactttaaactcatggaaggataaccaccttcacgttttgaaataaatgtttcctgttgaaatga

SEQ ID NO: 92682 - DNA, 201 bp, Homo sapiens
ttccctccaggcttctagaagcatctgggccagggctcatggctggataatttccctaggcttaacaacccaagcaagcttcgcctcctcgttttattttytgttaaacttatgagaatgtgttaagaaagagtgcagctcgagagacattcagagatggaacacaccagaccccagatcacaaagccaaccatgcccagc

SEQ ID NO: 92683 - DNA, 201 bp, Homo sapiens
agcatcttagggcctctatgaagaaactaacaagaaagcagggggacctgccacccccagccaaacccgagcaagggtcgtcggcatccaggcctgtgccrgcttcacgtggcgggaagaccctctgcaagggggacaggcaggcccctccaggcccaccagcccggttcccatggcccatttggtcagcttccccgccac

SEQ ID NO: 92684 - DNA, 201 bp, Homo sapiens
ttaacaacccaagcaagcttcgcctcctcgttttattttttgttaaacttatgagaatgtgttaagaaagagtgcagctcgagagacattcagagatggarcacaccagaccccagatcacaaagccaaccatgcccagcccctcccaacacccccagccccacgaccatcgttctgaattctgacgacgccgtgagcctg

SEQ ID NO: 92685 - DNA, 201 bp, Homo sapiens
gggcctctatgaagaaactaacaagaaagcagggggacctgccacccccagccaaacccgagcaagggtcgtcggcatccaggcctgtgccagcttcacgkggcgggaagaccctctgcaagggggacaggcaggcccctccaggcccaccagcccggttcccatggcccatttggtcagcttccccgccacgggcacctc

SEQ ID NO: 92686 - DNA, 201 bp, Homo sapiens
catctgggccagggctcatggctggataatttccctaggcttaacaacccaagcaagcttcgcctcctcgttttattttttgttaaacttatgagaatgtrttaagaaagagtgcagctcgagagacattcagagatggaacacaccagaccccagatcacaaagccaaccatgcccagcccctcccaacacccccagccc

SEQ ID NO: 92687 - DNA, 201 bp, Homo sapiens
agggggacctgccacccccagccaaacccgagcaagggtcgtcggcatccaggcctgtgccagcttcacgtggcgggaagaccctctgcaagggggacagrcaggcccctccaggcccaccagcccggttcccatggcccatttggtcagcttccccgccacgggcacctcgttcttccacaccctgtcctggtggggctg

SEQ ID NO: 92688 - DNA, 201 bp, Homo sapiens
acccgagcaagggtcgtcggcatccaggcctgtgccagcttcacgtggcgggaagaccctctgcaagggggacaggcaggcccctccaggcccaccagccyggttcccatggcccatttggtcagcttccccgccacgggcacctcgttcttccacaccctgtcctggtggggctgtccgggaagacacctaccctgtggg

SEQ ID NO: 92689 - DNA, 201 bp, Homo sapiens
aagggtcgtcggcatccaggcctgtgccagcttcacgtggcgggaagaccctctgcaagggggacaggcaggcccctccaggcccaccagcccggttcccrtggcccatttggtcagcttccccgccacgggcacctcgttcttccacaccctgtcctggtggggctgtccgggaagacacctaccctgtgggcactcagg

SEQ ID NO: 92690 - DNA, 201 bp, Homo sapiens
agggtcgtcggcatccaggcctgtgccagcttcacgtggcgggaagaccctctgcaagggggacaggcaggcccctccaggcccaccagcccggttcccayggcccatttggtcagcttccccgccacgggcacctcgttcttccacaccctgtcctggtggggctgtccgggaagacacctaccctgtgggcactcaggg

SEQ ID NO: 92691 - DNA, 201 bp, Homo sapiens
ctgtgggcactcagggtgtgcccagcccggccctggctcagggaggacctcagggttcctggagattcctgcagtggaactccatgccccgcctcccaacsgacctggacgtaggggacccttggttccgccgttatgatttcagacagagctgctgggtccgtgccatatcccaggaggaccagccggccacctgctggc

SEQ ID NO: 92692 - DNA, 201 bp, Homo sapiens
tgcccagcccggccctggctcagggaggacctcagggttcctggagattcctgcagtggaactccatgccccgcctcccaacggacctggacgtaggggasccttggttccgccgttatgatttcagacagagctgctgggtccgtgccatatcccaggaggaccagccggccacctgctggcaggctgaacaccctgcgg

SEQ ID NO: 92693 - DNA, 201 bp, Homo sapiens
gcagggacctgagccacatcgccgccttgttcctcctctatcttcctgaggaggatgcattctgggcactggtgcagctgctggccagtgagaggcactcyctgcagggatttcacagcccaaatggcgggaccgtccaggggctccaagaccaacaggagcatgtggtagccacgtcactacccaacaccatgtggcatc

SEQ ID NO: 92694 - DNA, 201 bp, Homo sapiens
ctggcaggctgaacaccctgcggagcgggtgagatcggctttcactgcactgacactgattccgaccagggcacccccttcagagctagggacgaacagcmgtgtgctcccacctcaggaccttgcctctgcggcctccacttggaaagttctcagttccctccaggcttctagaagcatctgggccagggctcatggctg

SEQ ID NO: 92695 - DNA, 201 bp, Homo sapiens
gcgggaactactttacatcctcctggcgtatgaggagtataacccggaggtgggctactgcagggacctgagccacatcgccgccttgttcctcctctatyttcctgaggaggatgcattctgggcactggtgcagctgctggccagtgagaggcactccctgcagggatttcacagcccaaatggcgggaccgtccaggg

SEQ ID NO: 92696 - DNA, 201 bp, Homo sapiens
taatttccctaggcttaacaacccaagcaagcttcgcctcctcgttttattttttgttaaacttatgagaatgtgttaagaaagagtgcagctcgagagasattcagagatggaacacaccagaccccagatcacaaagccaaccatgcccagcccctcccaacacccccagccccacgaccatcgttctgaattctgacg

SEQ ID NO: 92697 - DNA, 201 bp, Homo sapiens
ctggccagtgagaggcactccctgcagggatttcacagcccaaatggcgggaccgtccaggggctccaagaccaacaggagcatgtggtagccacgtcacwacccaacaccatgtggcatcaggacaagaaagatctatgtgggcagtgttcgtccttaggctgcctcatccggatattgattgacgggatctctctcggg

SEQ ID NO: 92698 - DNA, 201 bp, Homo sapiens
ttatgagaatgtgttaagaaagagtgcagctcgagagacattcagagatggaacacaccagaccccagatcacaaagccaaccatgcccagcccctcccarcacccccagccccacgaccatcgttctgaattctgacgacgccgtgagcctgcctttgtactttaaactcatggaaggataaccaccttcacgttttgaa

SEQ ID NO: 92699 - DNA, 201 bp, Homo sapiens
agcatctgggccagggctcatggctggataatttccctaggcttaacaacccaagcaagcttcgcctcctcgttttattttttgttaaacttatgagaatrtgttaagaaagagtgcagctcgagagacattcagagatggaacacaccagaccccagatcacaaagccaaccatgcccagcccctcccaacacccccagc

SEQ ID NO: 92700 - DNA, 201 bp, Homo sapiens
aatgtgttaagaaagagtgcagctcgagagacattcagagatggaacacaccagaccccagatcacaaagccaaccatgcccagcccctcccaacaccccmagccccacgaccatcgttctgaattctgacgacgccgtgagcctgcctttgtactttaaactcatggaaggataaccaccttcacgttttgaaataaatg

SEQ ID NO: 92701 - DNA, 183 bp, Homo sapiens
tcagagatggaacacaccagaccccagatcacaaagccaaccatgcccagcccctcccaacacccccagccccacgaccatcgttctgaattctgacgacrccgtgagcctgcctttgtactttaaactcatggaaggataaccaccttcacgttttgaaataaatgtttcctgttgaaatga

SEQ ID NO: 92702 - DNA, 201 bp, Homo sapiens
cccactgtactcaagtccttgggaagatgcccacccctgcttgggacttgagactccagagactggagcagctgtgggccactgggtctggcccctttttmcctgggggcggcggtggaatgggggttacgcagccagccagcatctgggagcccggcgagagcggttcaggtgttctccgaagccgccgcgtacagtgtg

SEQ ID NO: 92703 - DNA, 201 bp, Homo sapiens
ctgcctccacatccctggaatagcccatcatgggcccttcacccttggcaggtggaaaccattcaacctgctggggccggtgtgtccccatttcatggcaytgggggacaacaggattctctgtctaggtcccactgtactcaagtccttgggaagatgcccacccctgcttgggacttgagactccagagactggagcag

SEQ ID NO: 92704 - DNA, 201 bp, Homo sapiens
agcagcgggaactactttacatcctcctggcgtatgaggagtataacccggaggtgggctactgcagggacctgagccacatcgccgccttgttcctcctytatcttcctgaggaggatgcattctgggcactggtgcagctgctggccagtgagaggcactccctgcagggatttcacagcccaaatggcgggaccgtcc

SEQ ID NO: 92705 - DNA, 201 bp, Homo sapiens
tggaaccggttcgttgatgcctgggccagggatgatgacactgtgctcaagcatcttagggcctctatgaagaaactaacaagaaagcagggggacctgcmacccccagccaaacccgagcaagggtcgtcggcatccaggcctgtgccagcttcacgtggcgggaagaccctctgcaagggggacaggcaggcccctcca

SEQ ID NO: 92706 - DNA, 201 bp, Homo sapiens
agagactggagcagctgtgggccactgggtctggcccctttttccctgggggcggcggtggaatgggggttacgcagccagccagcatctgggagcccggygagagcggttcaggtgttctccgaagccgccgcgtacagtgtgacctttagacaattctgtctcacaggatggacgtggtagaggtcgcgggcagttggt

SEQ ID NO: 92707 - DNA, 160 bp, Homo sapiens
ccagatcacaaagccaaccatgcccagcccctcccaacacccccagccccacgaccatcgttctgaattctgacgacgccgtgagcctgcctttgtacttyaaactcatggaaggataaccaccttcacgttttgaaataaatgtttcctgttgaaatga

SEQ ID NO: 92708 - DNA, 201 bp, Homo sapiens
cgaagcaaattcggcgggagatcagccgaaagagcaagtgggtgaaaatgctgggagaatgggacacctacaaaaacagcagaaagctcatagatcgagcrtaccagggaattcccatgaacatccggggcccgatgtggtcagtcctcctgaacattgaggaaatcaagttgaaaaaccccggaagataccagatcatga

SEQ ID NO: 92709 - DNA, 149 bp, Homo sapiens
agccaaccatgcccagcccctcccaacacccccagccccacgaccatcgttctgaattctgacgacgccgtgagcctgcctttgtactttaaactcatggmaggataaccaccttcacgttttgaaataaatgtttcctgttgaaatga

SEQ ID NO: 92710 - DNA, 201 bp, Homo sapiens
gaatgggacacctacaaaaacagcagaaagctcatagatcgagcgtaccagggaattcccatgaacatccggggcccgatgtggtcagtcctcctgaacaytgaggaaatcaagttgaaaaaccccggaagataccagatcatgaaggagaagggcaagaggtcatctgaacacatccagcagatggacctggacgtaagc

SEQ ID NO: 92711 - DNA, 143 bp, Homo sapiens
ccatgcccagcccctcccaacacccccagccccacgaccatcgttctgaattctgacgacgccgtgagcctgcctttgtactttaaactcatggaaggatraccaccttcacgttttgaaataaatgtttcctgttgaaatga

SEQ ID NO: 92712 - DNA, 201 bp, Homo sapiens
ggggcccgatgtggtcagtcctcctgaacattgaggaaatcaagttgaaaaaccccggaagataccagatcatgaaggagaagggcaagaggtcatctgarcacatccagcagatggacctggacgtaagcgggacattaaggaggcatatattcttcagggatcgatacggaaccaagcagcgggaactactttacatcc

SEQ ID NO: 92713 - DNA, 201 bp, Homo sapiens
ctcctgaacattgaggaaatcaagttgaaaaaccccggaagataccagatcatgaaggagaagggcaagaggtcatctgaacacatccagcagatggacckggacgtaagcgggacattaaggaggcatatattcttcagggatcgatacggaaccaagcagcgggaactactttacatcctcctggcgtatgaggagtat

SEQ ID NO: 92714 - DNA, 201 bp, Homo sapiens
ttgaaaaaccccggaagataccagatcatgaaggagaagggcaagaggtcatctgaacacatccagcagatggacctggacgtaagcgggacattaaggargcatatattcttcagggatcgatacggaaccaagcagcgggaactactttacatcctcctggcgtatgaggagtataacccggaggtgggctactgcagg

SEQ ID NO: 92715 - DNA, 101 bp, Homo sapiens
gttctgaattctgacgacgccgtgagcctgcctttgtactttaaactcatggaaggataaccaccttcacgttttgaaataaatgtttcctgttgaaatgm

SEQ ID NO: 92716 - DNA, 201 bp, Homo sapiens
ggccagtgagaggcactccctgcagggatttcacagcccaaatggcgggaccgtccaggggctccaagaccaacaggagcatgtggtagccacgtcactayccaacaccatgtggcatcaggacaagaaagatctatgtgggcagtgttcgtccttaggctgcctcatccggatattgattgacgggatctctctcgggct

SEQ ID NO: 92717 - DNA, 201 bp, Homo sapiens
gtgagaggcactccctgcagggatttcacagcccaaatggcgggaccgtccaggggctccaagaccaacaggagcatgtggtagccacgtcactacccaasaccatgtggcatcaggacaagaaagatctatgtgggcagtgttcgtccttaggctgcctcatccggatattgattgacgggatctctctcgggctcaccc

SEQ ID NO: 92718 - DNA, 201 bp, Homo sapiens
gcactccctgcagggatttcacagcccaaatggcgggaccgtccaggggctccaagaccaacaggagcatgtggtagccacgtcactacccaacaccatgkggcatcaggacaagaaagatctatgtgggcagtgttcgtccttaggctgcctcatccggatattgattgacgggatctctctcgggctcaccctgcgcct

SEQ ID NO: 92719 - DNA, 201 bp, Homo sapiens
aaagttctcagttccctccaggcttctagaagcatctgggccagggctcatggctggataatttccctaggcttaacaacccaagcaagcttcgcctcctsgttttattttttgttaaacttatgagaatgtgttaagaaagagtgcagctcgagagacattcagagatggaacacaccagaccccagatcacaaagccaa

SEQ ID NO: 92720 - DNA, 201 bp, Homo sapiens
tcgcctttaaggttcagcagaagcgcctcacgaagacgtccaggtgtggcccgtgggcacgtttttggaaccggttcgttgatgcctgggccagggatgakgacactgtgctcaagcatcttagggcctctatgaagaaactaacaagaaagcagggggacctgccacccccagccaaacccgagcaagggtcgtcggcat

SEQ ID NO: 92721 - DNA, 201 bp, Homo sapiens
cccaaaccgaacaccctcctgctcaacaggcgttattcctgaagtggcttcactgttcagactgaagagccacggtagccaaagtgatcagcggagtagamccgagcagtcaggagagatcttgttccctgtaggaaactgggcatctctgaggccctgagcatcccaggaggccgattgtacagagacctctggtcgctg

SEQ ID NO: 92722 - DNA, 201 bp, Homo sapiens
cctgcagggatttcacagcccaaatggcgggaccgtccaggggctccaagaccaacaggagcatgtggtagccacgtcactacccaacaccatgtggcatyaggacaagaaagatctatgtgggcagtgttcgtccttaggctgcctcatccggatattgattgacgggatctctctcgggctcaccctgcgcctgtggga

SEQ ID NO: 92723 - DNA, 201 bp, Homo sapiens
tggacgtaagcgggacattaaggaggcatatattcttcagggatcgatacggaaccaagcagcgggaactactttacatcctcctggcgtatgaggagtayaacccggaggtgggctactgcagggacctgagccacatcgccgccttgttcctcctctatcttcctgaggaggatgcattctgggcactggtgcagctgc

SEQ ID NO: 92724 - DNA, 201 bp, Homo sapiens
caccctcctgctcaacaggcgttattcctgaagtggcttcactgttcagactgaagagccacggtagccaaagtgatcagcggagtagaaccgagcagtcrggagagatcttgttccctgtaggaaactgggcatctctgaggccctgagcatcccaggaggccgattgtacagagacctctggtcgctgaccccagtctg

SEQ ID NO: 92725 - DNA, 201 bp, Homo sapiens
aacttatgagaatgtgttaagaaagagtgcagctcgagagacattcagagatggaacacaccagaccccagatcacaaagccaaccatgcccagcccctcscaacacccccagccccacgaccatcgttctgaattctgacgacgccgtgagcctgcctttgtactttaaactcatggaaggataaccaccttcacgtttt

SEQ ID NO: 92726 - DNA, 201 bp, Homo sapiens
gggacaacaggattctctgtctaggtcccactgtactcaagtccttgggaagatgcccacccctgcttgggacttgagactccagagactggagcagctgygggccactgggtctggcccctttttccctgggggcggcggtggaatgggggttacgcagccagccagcatctgggagcccggcgagagcggttcaggtgt

SEQ ID NO: 92727 - DNA, 201 bp, Homo sapiens
ggagcagctgtgggccactgggtctggcccctttttccctgggggcggcggtggaatgggggttacgcagccagccagcatctgggagcccggcgagagcrgttcaggtgttctccgaagccgccgcgtacagtgtgacctttagacaattctgtctcacaggatggacgtggtagaggtcgcgggcagttggtgggcaca

SEQ ID NO: 92728 - DNA, 201 bp, Homo sapiens
tgggagcccggcgagagcggttcaggtgttctccgaagccgccgcgtacagtgtgacctttagacaattctgtctcacaggatggacgtggtagaggtcgygggcagttggtgggcacaagagcgagaggacatcattatgaaatacgaaaagggacaccgagctgggctgccagaggacaaggggcctaagccttttcga

SEQ ID NO: 92729 - DNA, 201 bp, Homo sapiens
  misc_feature (1)...(201): n = A,T,C or G
tggtagccacgtcactacccaacaccatgtggcatcaggacaagaaagatctatgtgggcagtgttcgtccttaggctgcctcatccggatattgattgangggatctctctcgggctcaccctgcgcctgtgggacgtgtatctggtagaaggcgaacaggcgttgatgccgataacaagaatcgcctttaaggttcagc

SEQ ID NO: 92730 - DNA, 201 bp, Homo sapiens
gtgggcacgtttttggaaccggttcgttgatgcctgggccagggatgatgacactgtgctcaagcatcttagggcctctatgaagaaactaacaagaaagmagggggacctgccacccccagccaaacccgagcaagggtcgtcggcatccaggcctgtgccagcttcacgtggcgggaagaccctctgcaagggggacag

SEQ ID NO: 92731 - DNA, 201 bp, Homo sapiens
ctggctcagggaggacctcagggttcctggagattcctgcagtggaactccatgccccgcctcccaacggacctggacgtaggggacccttggttccgccrttatgatttcagacagagctgctgggtccgtgccatatcccaggaggaccagccggccacctgctggcaggctgaacaccctgcggagcgggtgagatcg

SEQ ID NO: 92732 - DNA, 132 bp, Homo sapiens
ccctcccaacacccccagccccacgaccatcgttctgaattctgacgacgccgtgagcctgcctttgtactttaaactcatggaaggataaccaccttcaygttttgaaataaatgtttcctgttgaaatga

SEQ ID NO: 92733 - DNA, 140 bp, Homo sapiens
tgcccagcccctcccaacacccccagccccacgaccatcgttctgaattctgacgacgccgtgagcctgcctttgtactttaaactcatggaaggataacyaccttcacgttttgaaataaatgtttcctgttgaaatga

SEQ ID NO: 92734 - DNA, 201 bp, Homo sapiens
cctcctcctgttgggacggctcagaatggtggactccacagtccctccgcgagagacatggtttccatgcgtacaatagatctttctcatcccccaaaccsaacaccctcctgctcaacaggcgttattcctgaagtggcttcactgttcagactgaagagccacggtagccaaagtgatcagcggagtagaaccgagcag

SEQ ID NO: 92735 - DNA, 201 bp, Homo sapiens
actccacagtccctccgcgagagacatggtttccatgcgtacaatagatctttctcatcccccaaaccgaacaccctcctgctcaacaggcgttattcctraagtggcttcactgttcagactgaagagccacggtagccaaagtgatcagcggagtagaaccgagcagtcaggagagatcttgttccctgtaggaaactg

SEQ ID NO: 92736 - DNA, 201 bp, Homo sapiens
tctttctcatcccccaaaccgaacaccctcctgctcaacaggcgttattcctgaagtggcttcactgttcagactgaagagccacggtagccaaagtgatsagcggagtagaaccgagcagtcaggagagatcttgttccctgtaggaaactgggcatctctgaggccctgagcatcccaggaggccgattgtacagagac

SEQ ID NO: 92737 - DNA, 201 bp, Homo sapiens
cttcactgttcagactgaagagccacggtagccaaagtgatcagcggagtagaaccgagcagtcaggagagatcttgttccctgtaggaaactgggcatckctgaggccctgagcatcccaggaggccgattgtacagagacctctggtcgctgaccccagtctgcctccacatccctggaatagcccatcatgggccctt

SEQ ID NO: 92738 - DNA, 201 bp, Homo sapiens
ttttgttaaacttatgagaatgtgttaagaaagagtgcagctcgagagacattcagagatggaacacaccagaccccagatcacaaagccaaccatgcccrgcccctcccaacacccccagccccacgaccatcgttctgaattctgacgacgccgtgagcctgcctttgtactttaaactcatggaaggataaccacctt

SEQ ID NO: 92739 - DNA, 201 bp, Homo sapiens
tgggggcggcggtggaatgggggttacgcagccagccagcatctgggagcccggcgagagcggttcaggtgttctccgaagccgccgcgtacagtgtgacytttagacaattctgtctcacaggatggacgtggtagaggtcgcgggcagttggtgggcacaagagcgagaggacatcattatgaaatacgaaaagggaca

SEQ ID NO: 92740 - DNA, 201 bp, Homo sapiens
aaagtgatcagcggagtagaaccgagcagtcaggagagatcttgttccctgtaggaaactgggcatctctgaggccctgagcatcccaggaggccgattgyacagagacctctggtcgctgaccccagtctgcctccacatccctggaatagcccatcatgggcccttcacccttggcaggtggaaaccattcaacctgct

SEQ ID NO: 92741 - DNA, 201 bp, Homo sapiens
accattcaacctgctggggccggtgtgtccccatttcatggcattgggggacaacaggattctctgtctaggtcccactgtactcaagtccttgggaagaygcccacccctgcttgggacttgagactccagagactggagcagctgtgggccactgggtctggcccctttttccctgggggcggcggtggaatgggggtt

SEQ ID NO: 92742 - DNA, 201 bp, Homo sapiens
tggaatgggggttacgcagccagccagcatctgggagcccggcgagagcggttcaggtgttctccgaagccgccgcgtacagtgtgacctttagacaattytgtctcacaggatggacgtggtagaggtcgcgggcagttggtgggcacaagagcgagaggacatcattatgaaatacgaaaagggacaccgagctgggct

SEQ ID NO: 92743 - DNA, 201 bp, Homo sapiens
atgcccacccctgcttgggacttgagactccagagactggagcagctgtgggccactgggtctggcccctttttccctgggggcggcggtggaatgggggytacgcagccagccagcatctgggagcccggcgagagcggttcaggtgttctccgaagccgccgcgtacagtgtgacctttagacaattctgtctcacagg

SEQ ID NO: 92744 - DNA, 201 bp, Homo sapiens
acccaagaaaatgaagcctcctcctgttgggacggctcagaatggtggactccacagtccctccgcgagagacatggtttccatgcgtacaatagatcttyctcatcccccaaaccgaacaccctcctgctcaacaggcgttattcctgaagtggcttcactgttcagactgaagagccacggtagccaaagtgatcagcg

SEQ ID NO: 92745 - DNA, 201 bp, Homo sapiens; identical to SEQ ID NO: 92678

SEQ ID NO: 92746 - DNA, 101 bp, Homo sapiens; identical to SEQ ID NO: 92715

SEQ ID NO: 92747 - DNA, 201 bp, Homo sapiens; identical to SEQ ID NO: 92680

SEQ ID NO: 92748 - DNA, 198 bp, Homo sapiens; identical to SEQ ID NO: 92681

SEQ ID NO: 92749 - DNA, 201 bp, Homo sapiens
ttcacgatgggctgggggcttctcaggatttcacagcccaaatggcgggaccgtccaggggctccaagaccaacaggagcatgtggtagccacgtcactayccaacaccatgtggcatcaggacaagaaagatctatgtgggcagtgttcgtccttaggctgcctcatccggatattgattgacgggatctctctcgggct

SEQ ID NO: 92750 - DNA, 201 bp, Homo sapiens; identical to SEQ ID NO: 92682

SEQ ID NO: 92751 - DNA, 201 bp, Homo sapiens
gatgggctgggggcttctcaggatttcacagcccaaatggcgggaccgtccaggggctccaagaccaacaggagcatgtggtagccacgtcactacccaasaccatgtggcatcaggacaagaaagatctatgtgggcagtgttcgtccttaggctgcctcatccggatattgattgacgggatctctctcgggctcaccc

SEQ ID NO: 92752 - DNA, 201 bp, Homo sapiens
tgggggcttctcaggatttcacagcccaaatggcgggaccgtccaggggctccaagaccaacaggagcatgtggtagccacgtcactacccaacaccatgkggcatcaggacaagaaagatctatgtgggcagtgttcgtccttaggctgcctcatccggatattgattgacgggatctctctcgggctcaccctgcgcct

SEQ ID NO: 92753 - DNA, 201 bp, Homo sapiens; identical to SEQ ID NO: 92719

SEQ ID NO: 92754 - DNA, 201 bp, Homo sapiens; identical to SEQ ID NO: 92720

SEQ ID NO: 92755 - DNA, 201 bp, Homo sapiens; identical to SEQ ID NO: 92683

SEQ ID NO: 92756 - DNA, 201 bp, Homo sapiens
cttctcaggatttcacagcccaaatggcgggaccgtccaggggctccaagaccaacaggagcatgtggtagccacgtcactacccaacaccatgtggcatyaggacaagaaagatctatgtgggcagtgttcgtccttaggctgcctcatccggatattgattgacgggatctctctcgggctcaccctgcgcctgtggga

SEQ ID NO: 92757 - DNA, 201 bp, Homo sapiens; identical to SEQ ID NO: 92684

SEQ ID NO: 92758 - DNA, 201 bp, Homo sapiens; identical to SEQ ID NO: 92685

SEQ ID NO: 92759 - DNA, 201 bp, Homo sapiens; identical to SEQ ID NO: 92686

SEQ ID NO: 92760 - DNA, 201 bp, Homo sapiens; identical to SEQ ID NO: 92687

SEQ ID NO: 92761 - DNA, 201 bp, Homo sapiens; identical to SEQ ID NO: 92688

SEQ ID NO: 92762 - DNA, 201 bp, Homo sapiens; identical to SEQ ID NO: 92689

SEQ ID NO: 92763 - DNA, 201 bp, Homo sapiens; identical to SEQ ID NO: 92690

SEQ ID NO: 92764 - DNA, 201 bp, Homo sapiens; identical to SEQ ID NO: 92691

SEQ ID NO: 92765 - DNA, 201 bp, Homo sapiens; identical to SEQ ID NO: 92692

SEQ ID NO: 92766 - DNA, 201 bp, Homo sapiens; identical to SEQ ID NO: 92694

SEQ ID NO: 92767 - DNA, 177 bp, Homo sapiens
ggggtttgggggcctctccagctgcccagctcttgcagctgatggctccacatcttgggggaaggctctgatttcaygatgggctgggggcttctcaggatttcacagcccaaatggcgggaccgtccaggggctccaagaccaacaggagcatgtggtagccacgtcactacccaa

SEQ ID NO: 92768 - DNA, 201 bp, Homo sapiens; identical to SEQ ID NO: 92696

SEQ ID NO: 92769 - DNA, 201 bp, Homo sapiens
atttcacgatgggctgggggcttctcaggatttcacagcccaaatggcgggaccgtccaggggctccaagaccaacaggagcatgtggtagccacgtcacwacccaacaccatgtggcatcaggacaagaaagatctatgtgggcagtgttcgtccttaggctgcctcatccggatattgattgacgggatctctctcggg

SEQ ID NO: 92770 - DNA, 201 bp, Homo sapiens; identical to SEQ ID NO: 92698

SEQ ID NO: 92771 - DNA, 201 bp, Homo sapiens; identical to SEQ ID NO: 92699

SEQ ID NO: 92772 - DNA, 201 bp, Homo sapiens; identical to SEQ ID NO: 92725

SEQ ID NO: 92773 - DNA, 201 bp, Homo sapiens; identical to SEQ ID NO: 92729
  misc_feature (1)...(201): n = A,T,C or G

SEQ ID NO: 92774 - DNA, 201 bp, Homo sapiens; identical to SEQ ID NO: 92700

SEQ ID NO: 92775 - DNA, 183 bp, Homo sapiens; identical to SEQ ID NO: 92701

SEQ ID NO: 92776 - DNA, 201 bp, Homo sapiens; identical to SEQ ID NO: 92730

SEQ ID NO: 92777 - DNA, 201 bp, Homo sapiens; identical to SEQ ID NO: 92731

SEQ ID NO: 92778 - DNA, 132 bp, Homo sapiens; identical to SEQ ID NO: 92732

SEQ ID NO: 92779 - DNA, 140 bp, Homo sapiens; identical to SEQ ID NO: 92733

SEQ ID NO: 92780 - DNA, 201 bp, Homo sapiens; identical to SEQ ID NO: 92705

SEQ ID NO: 92781 - DNA, 160 bp, Homo sapiens; identical to SEQ ID NO: 92707

SEQ ID NO: 92782 - DNA, 149 bp, Homo sapiens; identical to SEQ ID NO: 92709

SEQ ID NO: 92783 - DNA, 201 bp, Homo sapiens; identical to SEQ ID NO: 92738

SEQ ID NO: 92784 - DNA, 143 bp, Homo sapiens; identical to SEQ ID NO: 92711

SEQ ID NO: 92785 - DNA, 201 bp, Homo sapiens; identical to SEQ ID NO: 92712

SEQ ID NO: 92786 - DNA, 201 bp, Homo sapiens; identical to SEQ ID NO: 92713

SEQ ID NO: 92787 - DNA, 201 bp, Homo sapiens; identical to SEQ ID NO: 92714

SEQ ID NO: 92788 - DNA, 201 bp, Homo sapiens; identical to SEQ ID NO: 92678

SEQ ID NO: 92789 - DNA, 101 bp, Homo sapiens; identical to SEQ ID NO: 92715

SEQ ID NO: 92790 - DNA, 201 bp, Homo sapiens; identical to SEQ ID NO: 92679

SEQ ID NO: 92791 - DNA, 201 bp, Homo sapiens; identical to SEQ ID NO: 92680

SEQ ID NO: 92792 - DNA, 198 bp, Homo sapiens; identical to SEQ ID NO: 92681

SEQ ID NO: 92793 - DNA, 201 bp, Homo sapiens; identical to SEQ ID NO: 92716

SEQ ID NO: 92794 - DNA, 201 bp, Homo sapiens; identical to SEQ ID NO: 92682

SEQ ID NO: 92795 - DNA, 201 bp, Homo sapiens; identical to SEQ ID NO: 92717

SEQ ID NO: 92796 - DNA, 201 bp, Homo sapiens; identical to SEQ ID NO: 92719

SEQ ID NO: 92797 - DNA, 201 bp, Homo sapiens; identical to SEQ ID NO: 92718

SEQ ID NO: 92798 - DNA, 201 bp, Homo sapiens; identical to SEQ ID NO: 92720

SEQ ID NO: 92799 - DNA, 201 bp, Homo sapiens; identical to SEQ ID NO: 92683

SEQ ID NO: 92800 - DNA, 201 bp, Homo sapiens; identical to SEQ ID NO: 92722

SEQ ID NO: 92801 - DNA, 201 bp, Homo sapiens; identical to SEQ ID NO: 92684

SEQ ID NO: 92802 - DNA, 201 bp, Homo sapiens; identical to SEQ ID NO: 92685

SEQ ID NO: 92803 - DNA, 201 bp, Homo sapiens; identical to SEQ ID NO: 92686

SEQ ID NO: 92804 - DNA, 201 bp, Homo sapiens; identical to SEQ ID NO: 92687

SEQ ID NO: 92805 - DNA, 201 bp, Homo sapiens; identical to SEQ ID NO: 92688

SEQ ID NO: 92806 - DNA, 201 bp, Homo sapiens
acgggcagccccactgggcagcctgaccgccccccacgccaggggccccagtaaccccggccaggctgtccctacactccttcttctcccaggtcctgccsctcctgggagtcagccccacaggaaggcccttgtcctcccttccctgtgccttctcctgggctgagccctgagctggaaagggacagagccagtcctttc

SEQ ID NO: 92807 - DNA, 201 bp, Homo sapiens; identical to SEQ ID NO: 92689

SEQ ID NO: 92808 - DNA, 201 bp, Homo sapiens; identical to SEQ ID NO: 92690

SEQ ID NO: 92809 - DNA, 201 bp, Homo sapiens; identical to SEQ ID NO: 92691

SEQ ID NO: 92810 - DNA, 201 bp, Homo sapiens; identical to SEQ ID NO: 92692

SEQ ID NO: 92811 - DNA, 201 bp, Homo sapiens; identical to SEQ ID NO: 92693

SEQ ID NO: 92812 - DNA, 201 bp, Homo sapiens; identical to SEQ ID NO: 92694

SEQ ID NO: 92813 - DNA, 201 bp, Homo sapiens; identical to SEQ ID NO: 92695

SEQ ID NO: 92814 - DNA, 107 bp, Homo sapiens
tgtggcycgggtgcagggagaggcaggtggatgctgggaggtcagaacctgcaagggccttggggctgtcaagtgggatgggcccctggtgcacccagagtacacgg

SEQ ID NO: 92815 - DNA, 201 bp, Homo sapiens
gtcagaacctgcaagggccttggggctgtcaagtgggatgggcccctggtgcacccagagtacacggggcaggtctcagggcaggctcccttgaccctggyggggtgatgtggtcactccctgagggactcctgtcagggcccggtcacccaccctgggcggcccccatcccatctcagggctaacctttctcagctccag

SEQ ID NO: 92816 - DNA, 201 bp, Homo sapiens; identical to SEQ ID NO: 92696

SEQ ID NO: 92817 - DNA, 201 bp, Homo sapiens
gcccggtcacccaccctgggcggcccccatcccatctcagggctaacctttctcagctccagcagaaagcaccacctcgagtccaggacgggcagccccaytgggcagcctgaccgccccccacgccaggggccccagtaaccccggccaggctgtccctacactccttcttctcccaggtcctgcccctcctgggagtca

SEQ ID NO: 92818 - DNA, 201 bp, Homo sapiens
aacctttctcagctccagcagaaagcaccacctcgagtccaggacgggcagccccactgggcagcctgaccgccccccacgccaggggccccagtaacccyggccaggctgtccctacactccttcttctcccaggtcctgcccctcctgggagtcagccccacaggaaggcccttgtcctcccttccctgtgccttctcc

SEQ ID NO: 92819 - DNA, 201 bp, Homo sapiens; identical to SEQ ID NO: 92723

SEQ ID NO: 92820 - DNA, 201 bp, Homo sapiens; identical to SEQ ID NO: 92697

SEQ ID NO: 92821 - DNA, 201 bp, Homo sapiens; identical to SEQ ID NO: 92698

SEQ ID NO: 92822 - DNA, 201 bp, Homo sapiens; identical to SEQ ID NO: 92699

SEQ ID NO: 92823 - DNA, 201 bp, Homo sapiens; identical to SEQ ID NO: 92725

SEQ ID NO: 92824 - DNA, 201 bp, Homo sapiens; identical to SEQ ID NO: 92729
  misc_feature (1)...(201): n = A,T,C or G

SEQ ID NO: 92825 - DNA, 201 bp, Homo sapiens; identical to SEQ ID NO: 92700

SEQ ID NO: 92826 - DNA, 183 bp, Homo sapiens; identical to SEQ ID NO: 92701

SEQ ID NO: 92827 - DNA, 201 bp, Homo sapiens; identical to SEQ ID NO: 92730

SEQ ID NO: 92828 - DNA, 201 bp, Homo sapiens
ccactgggcagcctgaccgccccccacgccaggggccccagtaaccccggccaggctgtccctacactccttcttctcccaggtcctgcccctcctgggartcagccccacaggaaggcccttgtcctcccttccctgtgccttctcctgggctgagccctgagctggaaagggacagagccagtcctttctgggggtcgg

SEQ ID NO: 92829 - DNA, 201 bp, Homo sapiens; identical to SEQ ID NO: 92731

SEQ ID NO: 92830 - DNA, 201 bp, Homo sapiens
cttgtcctcccttccctgtgccttctcctgggctgagccctgagctggaaagggacagagccagtcctttctgggggtcggcacccaggctggggccgctscaggccccgtgcagttcctcagctctgcctgggttgccttacagtgagacggagctgcctcctctgactgcgcgggaggcgaagcaaattcggcgggaga

SEQ ID NO: 92831 - DNA, 132 bp, Homo sapiens; identical to SEQ ID NO: 92732

SEQ ID NO: 92832 - DNA, 140 bp, Homo sapiens; identical to SEQ ID NO: 92733

SEQ ID NO: 92833 - DNA, 201 bp, Homo sapiens; identical to SEQ ID NO: 92704

SEQ ID NO: 92834 - DNA, 201 bp, Homo sapiens; identical to SEQ ID NO: 92705

SEQ ID NO: 92835 - DNA, 160 bp, Homo sapiens; identical to SEQ ID NO: 92707

SEQ ID NO: 92836 - DNA, 201 bp, Homo sapiens; identical to SEQ ID NO: 92708

SEQ ID NO: 92837 - DNA, 149 bp, Homo sapiens; identical to SEQ ID NO: 92709

SEQ ID NO: 92838 - DNA, 201 bp, Homo sapiens; identical to SEQ ID NO: 92710

SEQ ID NO: 92839 - DNA, 201 bp, Homo sapiens; identical to SEQ ID NO: 92738

SEQ ID NO: 92840 - DNA, 143 bp, Homo sapiens; identical to SEQ ID NO: 92711

SEQ ID NO: 92841 - DNA, 201 bp, Homo sapiens; identical to SEQ ID NO: 92712

SEQ ID NO: 92842 - DNA, 201 bp, Homo sapiens; identical to SEQ ID NO: 92713

SEQ ID NO: 92843 - DNA, 201 bp, Homo sapiens; identical to SEQ ID NO: 92714

SEQ ID NO: 92844 - DNA, 201 bp, Homo sapiens; identical to SEQ ID NO: 92678

SEQ ID NO: 92845 - DNA, 101 bp, Homo sapiens; identical to SEQ ID NO: 92715

SEQ ID NO: 92846 - DNA, 201 bp, Homo sapiens; identical to SEQ ID NO: 92679

SEQ ID NO: 92847 - DNA, 201 bp, Homo sapiens; identical to SEQ ID NO: 92680

SEQ ID NO: 92848 - DNA, 198 bp, Homo sapiens; identical to SEQ ID NO: 92681

SEQ ID NO: 92849 - DNA, 201 bp, Homo sapiens; identical to SEQ ID NO: 92716

SEQ ID NO: 92850 - DNA, 201 bp, Homo sapiens; identical to SEQ ID NO: 92682

SEQ ID NO: 92851 - DNA, 201 bp, Homo sapiens; identical to SEQ ID NO: 92717

SEQ ID NO: 92852 - DNA, 201 bp, Homo sapiens; identical to SEQ ID NO: 92719

SEQ ID NO: 92853 - DNA, 201 bp, Homo sapiens; identical to SEQ ID NO: 92718

SEQ ID NO: 92854 - DNA, 201 bp, Homo sapiens; identical to SEQ ID NO: 92720

SEQ ID NO: 92855 - DNA, 201 bp, Homo sapiens
aggttcagatcagagtttcgactctgagtgtccatccactctttcagtcctgggaagggagaccctgtcccagcttgatctcacctctactgaggaatcayggggccaaaaccaacaatttccagaatccccgggctctggtcctcactggggtcaccccgtggcctgcgacaccagattgttttctgcccacagctcata

SEQ ID NO: 92856 - DNA, 201 bp, Homo sapiens; identical to SEQ ID NO: 92683

SEQ ID NO: 92857 - DNA, 201 bp, Homo sapiens; identical to SEQ ID NO: 92722

SEQ ID NO: 92858 - DNA, 201 bp, Homo sapiens; identical to SEQ ID NO: 92684

SEQ ID NO: 92859 - DNA, 201 bp, Homo sapiens; identical to SEQ ID NO: 92685

SEQ ID NO: 92860 - DNA, 201 bp, Homo sapiens; identical to SEQ ID NO: 92686

SEQ ID NO: 92861 - DNA, 201 bp, Homo sapiens; identical to SEQ ID NO: 92687

SEQ ID NO: 92862 - DNA, 201 bp, Homo sapiens; identical to SEQ ID NO: 92688

SEQ ID NO: 92863 - DNA, 201 bp, Homo sapiens; identical to SEQ ID NO: 92689

SEQ ID NO: 92864 - DNA, 201 bp, Homo sapiens; identical to SEQ ID NO: 92690

SEQ ID NO: 92865 - DNA, 201 bp, Homo sapiens; identical to SEQ ID NO: 92691

SEQ ID NO: 92866 - DNA, 201 bp, Homo sapiens; identical to SEQ ID NO: 92692

SEQ ID NO: 92867 - DNA, 201 bp, Homo sapiens; identical to SEQ ID NO: 92693

SEQ ID NO: 92868 - DNA, 201 bp, Homo sapiens; identical to SEQ ID NO: 92694

SEQ ID NO: 92869 - DNA, 201 bp, Homo sapiens; identical to SEQ ID NO: 92695

SEQ ID NO: 92870 - DNA, 201 bp, Homo sapiens; identical to SEQ ID NO: 92696

SEQ ID NO: 92871 - DNA, 119 bp, Homo sapiens
aggactgcaggcctggtcrccagatttcctgcctactcgtgcaagcgtcaccttgctgggagggaatctgaatctagggctgggactacccggagctcaaggctagggatgccctggtg

SEQ ID NO: 92872 - DNA, 201 bp, Homo sapiens; identical to SEQ ID NO: 92723

SEQ ID NO: 92873 - DNA, 201 bp, Homo sapiens
agtttcgactctgagtgtccatccactctttcagtcctgggaagggagaccctgtcccagcttgatctcacctctactgaggaatcatggggccaaaaccracaatttccagaatccccgggctctggtcctcactggggtcaccccgtggcctgcgacaccagattgttttctgcccacagctcatagatcgagcgtacc

SEQ ID NO: 92874 - DNA, 201 bp, Homo sapiens
cccagcttgatctcacctctactgaggaatcatggggccaaaaccaacaatttccagaatccccgggctctggtcctcactggggtcaccccgtggcctgygacaccagattgttttctgcccacagctcatagatcgagcgtaccagggaattcccatgaacatccggggcccgatgtggtcagtcctcctgaacattga

SEQ ID NO: 92875 - DNA, 201 bp, Homo sapiens; identical to SEQ ID NO: 92697

SEQ ID NO: 92876 - DNA, 201 bp, Homo sapiens; identical to SEQ ID NO: 92698

SEQ ID NO: 92877 - DNA, 201 bp, Homo sapiens; identical to SEQ ID NO: 92699

SEQ ID NO: 92878 - DNA, 201 bp, Homo sapiens; identical to SEQ ID NO: 92725

SEQ ID NO: 92879 - DNA, 201 bp, Homo sapiens; identical to SEQ ID NO: 92729
  misc_feature (1)...(201): n = A,T,C or G

SEQ ID NO: 92880 - DNA, 201 bp, Homo sapiens; identical to SEQ ID NO: 92700

SEQ ID NO: 92881 - DNA, 183 bp, Homo sapiens; identical to SEQ ID NO: 92701

SEQ ID NO: 92882 - DNA, 201 bp, Homo sapiens; identical to SEQ ID NO: 92730

SEQ ID NO: 92883 - DNA, 201 bp, Homo sapiens; identical to SEQ ID NO: 92731

SEQ ID NO: 92884 - DNA, 132 bp, Homo sapiens; identical to SEQ ID NO: 92732

SEQ ID NO: 92885 - DNA, 140 bp, Homo sapiens; identical to SEQ ID NO: 92733

SEQ ID NO: 92886 - DNA, 201 bp, Homo sapiens; identical to SEQ ID NO: 92704

SEQ ID NO: 92887 - DNA, 201 bp, Homo sapiens
ctcacctctactgaggaatcatggggccaaaaccaacaatttccagaatccccgggctctggtcctcactggggtcaccccgtggcctgcgacaccagatygttttctgcccacagctcatagatcgagcgtaccagggaattcccatgaacatccggggcccgatgtggtcagtcctcctgaacattgaggaaatcaagt

SEQ ID NO: 92888 - DNA, 201 bp, Homo sapiens; identical to SEQ ID NO: 92705

SEQ ID NO: 92889 - DNA, 201 bp, Homo sapiens
tcacctctactgaggaatcatggggccaaaaccaacaatttccagaatccccgggctctggtcctcactggggtcaccccgtggcctgcgacaccagattrttttctgcccacagctcatagatcgagcgtaccagggaattcccatgaacatccggggcccgatgtggtcagtcctcctgaacattgaggaaatcaagtt

SEQ ID NO: 92890 - DNA, 160 bp, Homo sapiens; identical to SEQ ID NO: 92707

SEQ ID NO: 92891 - DNA, 201 bp, Homo sapiens
aaccaacaatttccagaatccccgggctctggtcctcactggggtcaccccgtggcctgcgacaccagattgttttctgcccacagctcatagatcgagcrtaccagggaattcccatgaacatccggggcccgatgtggtcagtcctcctgaacattgaggaaatcaagttgaaaaaccccggaagataccagatcatga

SEQ ID NO: 92892 - DNA, 149 bp, Homo sapiens; identical to SEQ ID NO: 92709

SEQ ID NO: 92893 - DNA, 201 bp, Homo sapiens
ctgcgacaccagattgttttctgcccacagctcatagatcgagcgtaccagggaattcccatgaacatccggggcccgatgtggtcagtcctcctgaacaytgaggaaatcaagttgaaaaaccccggaagataccagatcatgaaggagaagggcaagaggtcatctgaacacatccagcagatggacctggacgtaagc

SEQ ID NO: 92894 - DNA, 201 bp, Homo sapiens; identical to SEQ ID NO: 92738

SEQ ID NO: 92895 - DNA, 143 bp, Homo sapiens; identical to SEQ ID NO: 92711

SEQ ID NO: 92896 - DNA, 201 bp, Homo sapiens; identical to SEQ ID NO: 92678

SEQ ID NO: 92897 - DNA, 101 bp, Homo sapiens; identical to SEQ ID NO: 92715

SEQ ID NO: 92898 - DNA, 201 bp, Homo sapiens
caaaccaaagccccctttctctgtttcctaggcagcgggaactactttacatcctcctggcgtatgaggagtataacccggaggtgggctactgcagggayctgagccacatcgccgccttgttcctcctctatcttcctgaggaggatgcattctgggcactggtgcagctgctggccagtgagaggcactccctgcagg

SEQ ID NO: 92899 - DNA, 201 bp, Homo sapiens; identical to SEQ ID NO: 92680

SEQ ID NO: 92900 - DNA, 198 bp, Homo sapiens; identical to SEQ ID NO: 92681

SEQ ID NO: 92901 - DNA, 201 bp, Homo sapiens; identical to SEQ ID NO: 92716

SEQ ID NO: 92902 - DNA, 201 bp, Homo sapiens; identical to SEQ ID NO: 92682

SEQ ID NO: 92903 - DNA, 201 bp, Homo sapiens; identical to SEQ ID NO: 92717

SEQ ID NO: 92904 - DNA, 201 bp, Homo sapiens; identical to SEQ ID NO: 92718

SEQ ID NO: 92905 - DNA, 201 bp, Homo sapiens; identical to SEQ ID NO: 92719

SEQ ID NO: 92906 - DNA, 201 bp, Homo sapiens; identical to SEQ ID NO: 92720

SEQ ID NO: 92907 - DNA, 201 bp, Homo sapiens; identical to SEQ ID NO: 92683

SEQ ID NO: 92908 - DNA, 201 bp, Homo sapiens; identical to SEQ ID NO: 92722

SEQ ID NO: 92909 - DNA, 201 bp, Homo sapiens; identical to SEQ ID NO: 92684

SEQ ID NO: 92910 - DNA, 201 bp, Homo sapiens; identical to SEQ ID NO: 92685

SEQ ID NO: 92911 - DNA, 201 bp, Homo sapiens; identical to SEQ ID NO: 92686

SEQ ID NO: 92912 - DNA, 201 bp, Homo sapiens; identical to SEQ ID NO: 92687

SEQ ID NO: 92913 - DNA, 201 bp, Homo sapiens; identical to SEQ ID NO: 92688

SEQ ID NO: 92914 - DNA, 201 bp, Homo sapiens; identical to SEQ ID NO: 92689

SEQ ID NO: 92915 - DNA, 201 bp, Homo sapiens; identical to SEQ ID NO: 92690

SEQ ID NO: 92916 - DNA, 201 bp, Homo sapiens; identical to SEQ ID NO: 92691

SEQ ID NO: 92917 - DNA, 201 bp, Homo sapiens; identical to SEQ ID NO: 92692

SEQ ID NO: 92918 - DNA, 201 bp, Homo sapiens; identical to SEQ ID NO: 92694

SEQ ID NO: 92919 - DNA, 128 bp, Homo sapiens
ggggctgacggatcggggagaggctggktgcataggggccaccctggagacttggaggatgaaggagtcgccccaggaggggctggagcggtggccgggagactctgcacattggtttggaaccgtgg

SEQ ID NO: 92920 - DNA, 201 bp, Homo sapiens; identical to SEQ ID NO: 92693

SEQ ID NO: 92921 - DNA, 201 bp, Homo sapiens; identical to SEQ ID NO: 92695

SEQ ID NO: 92922 - DNA, 201 bp, Homo sapiens; identical to SEQ ID NO: 92696

SEQ ID NO: 92923 - DNA, 201 bp, Homo sapiens
tcggggagaggctgggtgcataggggccaccctggagacttggaggatgaaggagtcgccccaggaggggctggagcggtggccgggagactctgcacatyggtttggaaccgtggaggaactgtacacccacagactgaactggggtgtgtgcaaactgaaaaaaaaaaaaaaaatcattcagagtgaaaaggatcaggc

SEQ ID NO: 92924 - DNA, 201 bp, Homo sapiens
aaaaaaaaatcattcagagtgaaaaggatcaggcactgtacaactgggctatttgcatgtcacagatgtggattttactgaaacatttcttcaagagtctsaggccctgaagagctcactgcttatccggtgaatcatctgaacctgaaatgggatttgctgttaggctttgtagacaaagtgaaattaacaacatctgca

SEQ ID NO: 92925 - DNA, 201 bp, Homo sapiens
aaaaatcattcagagtgaaaaggatcaggcactgtacaactgggctatttgcatgtcacagatgtggattttactgaaacatttcttcaagagtctcaggycctgaagagctcactgcttatccggtgaatcatctgaacctgaaatgggatttgctgttaggctttgtagacaaagtgaaattaacaacatctgcacaaa

SEQ ID NO: 92926 - DNA, 201 bp, Homo sapiens
agtgaaattaacaacatctgcacaaaacaaaccaaagccccctttctctgtttcctaggcagcgggaactactttacatcctcctggcgtatgaggagtayaacccggaggtgggctactgcagggacctgagccacatcgccgccttgttcctcctctatcttcctgaggaggatgcattctgggcactggtgcagctgc

SEQ ID NO: 92927 - DNA, 201 bp, Homo sapiens; identical to SEQ ID NO: 92697

SEQ ID NO: 92928 - DNA, 201 bp, Homo sapiens; identical to SEQ ID NO: 92698

SEQ ID NO: 92929 - DNA, 201 bp, Homo sapiens; identical to SEQ ID NO: 92699

SEQ ID NO: 92930 - DNA, 201 bp, Homo sapiens; identical to SEQ ID NO: 92725

SEQ ID NO: 92931 - DNA, 201 bp, Homo sapiens; identical to SEQ ID NO: 92729
  misc_feature (1)...(201): n = A,T,C or G

SEQ ID NO: 92932 - DNA, 201 bp, Homo sapiens; identical to SEQ ID NO: 92700

SEQ ID NO: 92933 - DNA, 183 bp, Homo sapiens; identical to SEQ ID NO: 92701

SEQ ID NO: 92934 - DNA, 201 bp, Homo sapiens; identical to SEQ ID NO: 92730

SEQ ID NO: 92935 - DNA, 201 bp, Homo sapiens; identical to SEQ ID NO: 92731

SEQ ID NO: 92936 - DNA, 132 bp, Homo sapiens; identical to SEQ ID NO: 92732

SEQ ID NO: 92937 - DNA, 140 bp, Homo sapiens; identical to SEQ ID NO: 92733

SEQ ID NO: 92938 - DNA, 201 bp, Homo sapiens
ggcagcgggaactactttacatcctcctggcgtatgaggagtataacccggaggtgggctactgcagggacctgagccacatcgccgccttgttcctcctytatcttcctgaggaggatgcattctgggcactggtgcagctgctggccagtgagaggcactccctgcagggatttcacagcccaaatggcgggaccgtcc

SEQ ID NO: 92939 - DNA, 201 bp, Homo sapiens; identical to SEQ ID NO: 92705

SEQ ID NO: 92940 - DNA, 160 bp, Homo sapiens; identical to SEQ ID NO: 92707

SEQ ID NO: 92941 - DNA, 149 bp, Homo sapiens; identical to SEQ ID NO: 92709

SEQ ID NO: 92942 - DNA, 201 bp, Homo sapiens; identical to SEQ ID NO: 92738

SEQ ID NO: 92943 - DNA, 143 bp, Homo sapiens; identical to SEQ ID NO: 92711

SEQ ID NO: 92944 - DNA, 201 bp, Homo sapiens; identical to SEQ ID NO: 92712

SEQ ID NO: 92945 - DNA, 201 bp, Homo sapiens; identical to SEQ ID NO: 92713

SEQ ID NO: 92946 - DNA, 201 bp, Homo sapiens; identical to SEQ ID NO: 92714

SEQ ID NO: 92947 - DNA, 201 bp, Homo sapiens; identical to SEQ ID NO: 92678

SEQ ID NO: 92948 - DNA, 101 bp, Homo sapiens; identical to SEQ ID NO: 92715

SEQ ID NO: 92949 - DNA, 201 bp, Homo sapiens; identical to SEQ ID NO: 92679

SEQ ID NO: 92950 - DNA, 201 bp, Homo sapiens; identical to SEQ ID NO: 92680

SEQ ID NO: 92951 - DNA, 198 bp, Homo sapiens; identical to SEQ ID NO: 92681

SEQ ID NO: 92952 - DNA, 201 bp, Homo sapiens; identical to SEQ ID NO: 92716

SEQ ID NO: 92953 - DNA, 201 bp, Homo sapiens; identical to SEQ ID NO: 92682

SEQ ID NO: 92954 - DNA, 201 bp, Homo sapiens; identical to SEQ ID NO: 92717

SEQ ID NO: 92955 - DNA, 201 bp, Homo sapiens; identical to SEQ ID NO: 92719

SEQ ID NO: 92956 - DNA, 201 bp, Homo sapiens; identical to SEQ ID NO: 92718

SEQ ID NO: 92957 - DNA, 201 bp, Homo sapiens; identical to SEQ ID NO: 92720

SEQ ID NO: 92958 - DNA, 201 bp, Homo sapiens; identical to SEQ ID NO: 92683

SEQ ID NO: 92959 - DNA, 201 bp, Homo sapiens; identical to SEQ ID NO: 92722

SEQ ID NO: 92960 - DNA, 201 bp, Homo sapiens; identical to SEQ ID NO: 92684

SEQ ID NO: 92961 - DNA, 201 bp, Homo sapiens; identical to SEQ ID NO: 92685

SEQ ID NO: 92962 - DNA, 115 bp, Homo sapiens
gttacacacaggcastggtatctgtgagcagctctgtggactcaaaggttttctccctgagaggcatgacccaggccagctgattcatcagagtcaggatggacgtggtagaggt

SEQ ID NO: 92963 - DNA, 201 bp, Homo sapiens; identical to SEQ ID NO: 92686

SEQ ID NO: 92964 - DNA, 201 bp, Homo sapiens; identical to SEQ ID NO: 92687

SEQ ID NO: 92965 - DNA, 201 bp, Homo sapiens; identical to SEQ ID NO: 92688

SEQ ID NO: 92966 - DNA, 201 bp, Homo sapiens; identical to SEQ ID NO: 92689

SEQ ID NO: 92967 - DNA, 201 bp, Homo sapiens; identical to SEQ ID NO: 92690

SEQ ID NO: 92968 - DNA, 201 bp, Homo sapiens; identical to SEQ ID NO: 92691

SEQ ID NO: 92969 - DNA, 201 bp, Homo sapiens; identical to SEQ ID NO: 92692

SEQ ID NO: 92970 - DNA, 201 bp, Homo sapiens; identical to SEQ ID NO: 92693

SEQ ID NO: 92971 - DNA, 201 bp, Homo sapiens; identical to SEQ ID NO: 92694

SEQ ID NO: 92972 - DNA, 201 bp, Homo sapiens; identical to SEQ ID NO: 92695

SEQ ID NO: 92973 - DNA, 201 bp, Homo sapiens; identical to SEQ ID NO: 92696

SEQ ID NO: 92974 - DNA, 201 bp, Homo sapiens; identical to SEQ ID NO: 92723

SEQ ID NO: 92975 - DNA, 201 bp, Homo sapiens; identical to SEQ ID NO: 92697

SEQ ID NO: 92976 - DNA, 201 bp, Homo sapiens; identical to SEQ ID NO: 92698

SEQ ID NO: 92977 - DNA, 201 bp, Homo sapiens; identical to SEQ ID NO: 92699

SEQ ID NO: 92978 - DNA, 201 bp, Homo sapiens; identical to SEQ ID NO: 92725

SEQ ID NO: 92979 - DNA, 201 bp, Homo sapiens
gtatctgtgagcagctctgtggactcaaaggttttctccctgagaggcatgacccaggccagctgattcatcagagtcaggatggacgtggtagaggtcgygggcagttggtgggcacaagagcgagaggacatcattatgaaatacgaaaagggacaccgagctgggctgccagaggacaaggggcctaagccttttcga

SEQ ID NO: 92980 - DNA, 201 bp, Homo sapiens; identical to SEQ ID NO: 92729
  misc_feature (1)...(201): n = A,T,C or G

SEQ ID NO: 92981 - DNA, 201 bp, Homo sapiens; identical to SEQ ID NO: 92700

SEQ ID NO: 92982 - DNA, 183 bp, Homo sapiens; identical to SEQ ID NO: 92701

SEQ ID NO: 92983 - DNA, 201 bp, Homo sapiens; identical to SEQ ID NO: 92730

SEQ ID NO: 92984 - DNA, 201 bp, Homo sapiens; identical to SEQ ID NO: 92731

SEQ ID NO: 92985 - DNA, 132 bp, Homo sapiens; identical to SEQ ID NO: 92732

SEQ ID NO: 92986 - DNA, 140 bp, Homo sapiens; identical to SEQ ID NO: 92733

SEQ ID NO: 92987 - DNA, 201 bp, Homo sapiens; identical to SEQ ID NO: 92704

SEQ ID NO: 92988 - DNA, 201 bp, Homo sapiens; identical to SEQ ID NO: 92705

SEQ ID NO: 92989 - DNA, 160 bp, Homo sapiens; identical to SEQ ID NO: 92707

SEQ ID NO: 92990 - DNA, 201 bp, Homo sapiens; identical to SEQ ID NO: 92708

SEQ ID NO: 92991 - DNA, 149 bp, Homo sapiens; identical to SEQ ID NO: 92709

SEQ ID NO: 92992 - DNA, 201 bp, Homo sapiens; identical to SEQ ID NO: 92710

SEQ ID NO: 92993 - DNA, 201 bp, Homo sapiens; identical to SEQ ID NO: 92738

SEQ ID NO: 92994 - DNA, 143 bp, Homo sapiens; identical to SEQ ID NO: 92711

SEQ ID NO: 92995 - DNA, 201 bp, Homo sapiens
ggaagctgaaggcagaaggttccgagatcaggttggccaaggtggacgccacggaggagtctgacctggcccagcagtacggcgtgcgcggctatcccacyatcaagttcttcaggaatggagacacggcttcccccaaggaatatacagctggcagagaggctgatgacatcgtgaactggctgaagaagcgcacgggcc

SEQ ID NO: 92996 - DNA, 201 bp, Homo sapiens
aggctctggcccctgagtatgccaaagccgctgggaagctgaaggcagaaggttccgagatcaggttggccaaggtggacgccacggaggagtctgacctrgcccagcagtacggcgtgcgcggctatcccaccatcaagttcttcaggaatggagacacggcttcccccaaggaatatacagctggcagagaggctgatg

SEQ ID NO: 92997 - DNA, 201 bp, Homo sapiens
tgtcatcgagttcaccgagcagacagccccgaagatttttggaggtgaaatcaagactcacatcctgctgttcttgcccaagagtgtgtctgactatgacrgcaaactgagcaacttcaaaacagcagccgagagcttcaagggcaagatcctgttcatcttcatcgacagcgaccacaccgacaaccagcgcatcctcga

SEQ ID NO: 92998 - DNA, 201 bp, Homo sapiens
tctttaagaagtttgatgaaggccggaacaactttgaaggggaggtcaccaaggagaacctgctggactttatcaaacacaaccagctgccccttgtcatygagttcaccgagcagacagccccgaagatttttggaggtgaaatcaagactcacatcctgctgttcttgcccaagagtgtgtctgactatgacggcaaac

SEQ ID NO: 92999 - DNA, 201 bp, Homo sapiens
gcgcgccccggacccaggatttataaaggcgaggccgggaccggcgcgcgctctcgtcgcccccgctgtcccggcggcgccaaccgaagcgccccgcctgmtccgtgtccgacatgctgcgccgcgctctgctgtgcctggccgtggccgccctggtgcgcgccgacgcccccgaggaggaggaccacgtcctggtgctgc

SEQ ID NO: 93000 - DNA, 201 bp, Homo sapiens
gtggcctgttcaaggcagaaccacgacccttgactcccgggtggggaggtggccaaggatgctggagctgaatcagacgctgacagttcttcaggcatttytatttcacaatcgaattgaacacattggccaaataaagttgaaattttaccacctgtccttgcctcgggtttatgatctcaccaagcccggagagctggg

SEQ ID NO: 93001 - DNA, 201 bp, Homo sapiens
ccctgagggcaacggcagaggccctgaggatccagcagggctcatggtggtctcagagggcggccctcacaaactcggccgctccggctcctcctgcctcygctccaggctgtggagtatccggccagcatgccgcgaggacctgtgtcaacacgtcgccagcaccagccagcccgcacgcttcgcccacggtggagcagg

SEQ ID NO: 93002 - DNA, 201 bp, Homo sapiens
acagcacggcctgtggcctgttcaaggcagaaccacgacccttgactcccgggtggggaggtggccaaggatgctggagctgaatcagacgctgacagttyttcaggcatttctatttcacaatcgaattgaacacattggccaaataaagttgaaattttaccacctgtccttgcctcgggtttatgatctcaccaagcc

SEQ ID NO: 93003 - DNA, 201 bp, Homo sapiens; identical to SEQ ID NO: 92995

SEQ ID NO: 93004 - DNA, 201 bp, Homo sapiens
tcgccaagatggactcgactgccaacgaggtggaggccgtcaaagtgcacagcttccccacactcaagttctttcctgccagtgccgacaggacggtcatygattacaacggggaacgcacgctggatggttttaagaaattcctggagagcggtggccaggatggggcaggggatgatgacgatctcgaggacctggaag

SEQ ID NO: 93005 - DNA, 201 bp, Homo sapiens
cgtctgtgggatttttagacatttttcgacatcaggggtgtcccccatgcctggaagaggagctggtggctgccagccctggggcccggcacaggcctggsccttccccttccctcaagccagggctcctcctcctgtcgtgggctcattgtgaccactggcctctctacagcacggcctgtggcctgttcaaggcagaac

SEQ ID NO: 93006 - DNA, 201 bp, Homo sapiens; identical to SEQ ID NO: 92996

SEQ ID NO: 93007 - DNA, 201 bp, Homo sapiens; identical to SEQ ID NO: 92997

SEQ ID NO: 93008 - DNA, 201 bp, Homo sapiens
ggaacctctctgaagtgacacctcacccctacacaccgtccgttcacccccgtctcttccttctgcttttcggtttttggaaagggatccatctccaggcmgcccaccctggtggggcttgtttcctgaaaccatgatgtactttttcatacatgagtctgtccagagtgcttgctaccgtgttcggagtctcgctgcctc

SEQ ID NO: 93009 - DNA, 201 bp, Homo sapiens; identical to SEQ ID NO: 92998

SEQ ID NO: 93010 - DNA, 155 bp, Homo sapiens
gtggcctgttcaaggcagaaccacgacccttgactcccgggtggggaggtggccaaggatgctggagctgaatcagacgctgacagttcttcaggcatttytatttcacaatcgaattgaacacattggccaaataaagttgaaattttaccacc

SEQ ID NO: 93011 - DNA, 201 bp, Homo sapiens; identical to SEQ ID NO: 92999

SEQ ID NO: 93012 - DNA, 201 bp, Homo sapiens
cctctttttgaaaattccgtctgtgggatttttagacatttttcgacatcaggggtgtcccccatgcctggaagaggagctggtggctgccagccctgggbcccggcacaggcctgggccttccccttccctcaagccagggctcctcctcctgtcgtgggctcattgtgaccactggcctctctacagcacggcctgtgg

SEQ ID NO: 93013 - DNA, 167 bp, Homo sapiens
acagcacggcctgtggcctgttcaaggcagaaccacgacccttgactcccgggtggggaggtggccaaggatgctggagctgaatcagacgctgacagttyttcaggcatttctatttcacaatcgaattgaacacattggccaaataaagttgaaattttaccacc

SEQ ID NO: 93014 - DNA, 201 bp, Homo sapiens
ggaagctgaaggcagaaggttccgagatcaggttggccaaggtggacgccacggaggagtctgacctggcccagcagtacggcgtgcgcggctatcccacyatcaagttcttcaggaatggagacacggcttcccccaaggaatatacaggacgtggagtcggactctgccaagcagtttttgcaggcagcagaggccatc

SEQ ID NO: 93015 - DNA, 201 bp, Homo sapiens; identical to SEQ ID NO: 93004

SEQ ID NO: 93016 - DNA, 201 bp, Homo sapiens; identical to SEQ ID NO: 93005

SEQ ID NO: 93017 - DNA, 201 bp, Homo sapiens; identical to SEQ ID NO: 92997

SEQ ID NO: 93018 - DNA, 201 bp, Homo sapiens
aggctctggcccctgagtatgccaaagccgctgggaagctgaaggcagaaggttccgagatcaggttggccaaggtggacgccacggaggagtctgacctrgcccagcagtacggcgtgcgcggctatcccaccatcaagttcttcaggaatggagacacggcttcccccaaggaatatacaggacgtggagtcggactct

SEQ ID NO: 93019 - DNA, 201 bp, Homo sapiens; identical to SEQ ID NO: 93008

SEQ ID NO: 93020 - DNA, 201 bp, Homo sapiens; identical to SEQ ID NO: 92998

SEQ ID NO: 93021 - DNA, 155 bp, Homo sapiens; identical to SEQ ID NO: 93010

SEQ ID NO: 93022 - DNA, 201 bp, Homo sapiens; identical to SEQ ID NO: 92999

SEQ ID NO: 93023 - DNA, 201 bp, Homo sapiens; identical to SEQ ID NO: 93012

SEQ ID NO: 93024 - DNA, 167 bp, Homo sapiens; identical to SEQ ID NO: 93013

SEQ ID NO: 93025 - DNA, 201 bp, Homo sapiens; identical to SEQ ID NO: 92995

SEQ ID NO: 93026 - DNA, 201 bp, Homo sapiens; identical to SEQ ID NO: 93004

SEQ ID NO: 93027 - DNA, 201 bp, Homo sapiens
aattccgtctgtgggatttttagacatttttcgacaggtgtcccccatgcctggaagaggagctggtggctgccagccctggggcccggcacaggcctggsccttccccttccctcaagccagggctcctcctcctgtcgtgggctcattgtgaccactggcctctctacagcacggcctgtggcctgttcaaggcagaac

SEQ ID NO: 93028 - DNA, 201 bp, Homo sapiens; identical to SEQ ID NO: 92996

SEQ ID NO: 93029 - DNA, 201 bp, Homo sapiens
cccttgtcatcgagttcaccgagcagccccgaagatttttggaggtgaaatcaagactcacatcctgctgttcttgcccaagagtgtgtctgactatgacrgcaaactgagcaacttcaaaacagcagccgagagcttcaagggcaagatcctgttcatcttcatcgacagcgaccacaccgacaaccagcgcatcctcga

SEQ ID NO: 93030 - DNA, 201 bp, Homo sapiens; identical to SEQ ID NO: 93008

SEQ ID NO: 93031 - DNA, 201 bp, Homo sapiens
ttgtcctctttaagaaggtgagccggaacaactttgaaggggaggtcaccaaggagaacctgctggactttatcaaacacaaccagctgccccttgtcatygagttcaccgagcagccccgaagatttttggaggtgaaatcaagactcacatcctgctgttcttgcccaagagtgtgtctgactatgacggcaaactgag

SEQ ID NO: 93032 - DNA, 155 bp, Homo sapiens; identical to SEQ ID NO: 93010

SEQ ID NO: 93033 - DNA, 201 bp, Homo sapiens; identical to SEQ ID NO: 92999

SEQ ID NO: 93034 - DNA, 201 bp, Homo sapiens
tttctcctctttttgaaaattccgtctgtgggatttttagacatttttcgacaggtgtcccccatgcctggaagaggagctggtggctgccagccctgggbcccggcacaggcctgggccttccccttccctcaagccagggctcctcctcctgtcgtgggctcattgtgaccactggcctctctacagcacggcctgtgg

SEQ ID NO: 93035 - DNA, 167 bp, Homo sapiens; identical to SEQ ID NO: 93013

SEQ ID NO: 93036 - DNA, 201 bp, Homo sapiens; identical to SEQ ID NO: 92995

SEQ ID NO: 93037 - DNA, 201 bp, Homo sapiens; identical to SEQ ID NO: 93004

SEQ ID NO: 93038 - DNA, 201 bp, Homo sapiens; identical to SEQ ID NO: 92996

SEQ ID NO: 93039 - DNA, 201 bp, Homo sapiens; identical to SEQ ID NO: 92997

SEQ ID NO: 93040 - DNA, 201 bp, Homo sapiens; identical to SEQ ID NO: 93008

SEQ ID NO: 93041 - DNA, 201 bp, Homo sapiens; identical to SEQ ID NO: 92998

SEQ ID NO: 93042 - DNA, 201 bp, Homo sapiens; identical to SEQ ID NO: 92999

SEQ ID NO: 93043 - DNA, 201 bp, Homo sapiens
aggatggggcaggggatgatgacgatctcgaggacctggaagaagcagaggagccagacatggaggaagacgatgatcagaaagctgtgaaagatgaactktaatacgcaaagccagacccgggcgctgccgagacccctcgggggctgcacacccagcagcagcgcacgcctccgaagcctgcggcctcgcttgaaggag

SEQ ID NO: 93044 - DNA, 201 bp, Homo sapiens; identical to SEQ ID NO: 92995

SEQ ID NO: 93045 - DNA, 201 bp, Homo sapiens; identical to SEQ ID NO: 93004

SEQ ID NO: 93046 - DNA, 201 bp, Homo sapiens
atttttgggtaaatggagacttccggatcctgtcagggtgtcccccatgcctggaagaggagctggtggctgccagccctggggcccggcacaggcctggsccttccccttccctcaagccagggctcctcctcctgtcgtgggctcattgtgaccactggcctctctacagcacggcctgtggcctgttcaaggcagaac

SEQ ID NO: 93047 - DNA, 201 bp, Homo sapiens; identical to SEQ ID NO: 92996

SEQ ID NO: 93048 - DNA, 201 bp, Homo sapiens; identical to SEQ ID NO: 92997

SEQ ID NO: 93049 - DNA, 201 bp, Homo sapiens; identical to SEQ ID NO: 93008

SEQ ID NO: 93050 - DNA, 201 bp, Homo sapiens; identical to SEQ ID NO: 92998

SEQ ID NO: 93051 - DNA, 201 bp, Homo sapiens; identical to SEQ ID NO: 93000

SEQ ID NO: 93052 - DNA, 201 bp, Homo sapiens; identical to SEQ ID NO: 92999

SEQ ID NO: 93053 - DNA, 201 bp, Homo sapiens
gtgttcggagtctcgctgcctccctcccgcgggaggtttctcctctttttgaaaattccgtctgtgggatttttagacatttttcgacatcagggtatttkttccaccttggccaggcctcctcggagaagcttgtcccccgtgtgggagggacggagccggactggacatggtcactcagtaccgcctgcagtgtcgcca

SEQ ID NO: 93054 - DNA, 201 bp, Homo sapiens
ctgatcatggctcttgcatttttgggtaaatggagacttccggatcctgtcagggtgtcccccatgcctggaagaggagctggtggctgccagccctgggbcccggcacaggcctgggccttccccttccctcaagccagggctcctcctcctgtcgtgggctcattgtgaccactggcctctctacagcacggcctgtgg

SEQ ID NO: 93055 - DNA, 201 bp, Homo sapiens; identical to SEQ ID NO: 93002

SEQ ID NO: 93056 - DNA, 201 bp, Homo sapiens
tcggatgctggagcagtactctagtaacctggaggatctgatccgggagcgcacggaggagctggagctggaaaagcagaagacagaccggctgcttacayagatgctgcctcccgtctgtggctgaggccttgaagacggggacaccagtggagcccgagtactttgagcaagtgacactgtactttagtgacattgtgg

SEQ ID NO: 93057 - DNA, 201 bp, Homo sapiens
agaacatcaacaagggccggaagacgaacatcattgactcgatgcttcggatgctggagcagtactctagtaacctggaggatctgatccgggagcgcacrgaggagctggagctggaaaagcagaagacagaccggctgcttacacagatgctgcctcccgtctgtggctgaggccttgaagacggggacaccagtggag

SEQ ID NO: 93058 - DNA, 201 bp, Homo sapiens
gagactgctggaagcacagaaggtgctaccggagcctcccagagcggaggaccagctgtggacagccccggagctgcttagggacccagccctggagcgcyggggaacgctggccggcgacgtctttagcttggccatcatcatgcaagaagtagtgtgccgcagtgccccttatgccatgctggagctcactcccgagga

SEQ ID NO: 93059 - DNA, 201 bp, Homo sapiens
ccgtgacttccatggagcccttggacctgtctggagcccgggaggccctgaggaaggttcgggacgggcccagggtcacagcagtgatcatggtgatgcaytcggtgctgctgggtggcgaggagcagcgctacctcctggaggccgcagaggagctgggcctgaccgatggctccctggtcttcctgcccttcgacacga

SEQ ID NO: 93060 - DNA, 201 bp, Homo sapiens
cgcccggacctggccgcccgcctggccgccgcccgcctgaaccgcgaccccggcctggcaggcggtccccgcttcgaggtagcgctgctgcccgagccttrccggacgccgggctcgctgggggccgtgtcctccgcgctggcccgcgtgtcgggcctcgtgggtccggtgaaccctgcggcctgccggccagccgagctg

SEQ ID NO: 93061 - DNA, 195 bp, Homo sapiens
tgtcccatctgcagtggaccccaggcacccccctttgaggaggtggggtgaactgctccttggcagggatttgtgacactgcattgctgggctgtgttccycgggctcttctggaccttgcaccgtggataccaggccatgtgccatggtatttgggtcctgggagggtgggtgaaataaaggcatgctgtcttc

SEQ ID NO: 93062 - DNA, 201 bp, Homo sapiens
gttcaagaacatcaacaagggccggaagacgaacatcattgactcgatgcttcggatgctggagcagtactctagtaacctggaggatctgatccgggaghgcacggaggagctggagctggaaaagcagaagacagaccggctgcttacacagatgctgcctcccgtctgtggctgaggccttgaagacggggacaccag

SEQ ID NO: 93063 - DNA, 201 bp, Homo sapiens
ttggccgcactcgccaacagctcccagcttcgcagggcccacgatgccgtgctcaccctcacgcgccactgtccctctgaaggcagcgtgctggacagccygcgcagggctcaagagcgccgcgagctgccctctgacctcaatctgcagcaggtctccccactctttggcaccatctatgacgcggtcttcttgctggca

SEQ ID NO: 93064 - DNA, 201 bp, Homo sapiens
gtctacaaggtggagacaataggggacgcctatatggtggcctcggggctgccccagcggaatgggcagcgacacgcggcagagatcgccaacatgtcacyggacatcctcagtgccgtgggcactttccgcatgcgccatatgcctgaggttcccgtgcgcatccgcataggcctgcactcgggtccatgcgtggcaggc

SEQ ID NO: 93065 - DNA, 201 bp, Homo sapiens
ggagcagtactctagtaacctggaggatctgatccgggagcgcacggaggagctggagctggaaaagcagaagacagaccggctgcttacacagatgctgyctcccgtctgtggctgaggccttgaagacggggacaccagtggagcccgagtactttgagcaagtgacactgtactttagtgacattgtgggcttcacca

SEQ ID NO: 93066 - DNA, 201 bp, Homo sapiens
ttcaagaacatcaacaagggccggaagacgaacatcattgactcgatgcttcggatgctggagcagtactctagtaacctggaggatctgatccgggagcrcacggaggagctggagctggaaaagcagaagacagaccggctgcttacacagatgctgcctcccgtctgtggctgaggccttgaagacggggacaccagt

SEQ ID NO: 93067 - DNA, 201 bp, Homo sapiens
ctggagctcactcccgaggaagtggtgcagagggtgcggagcccccctccactgtgtcggcccttggtgtccatggaccaggcacctgtcgagtgtatccdcctgatgaagcagtgctgggcagagcagccggaacttcggccctccatggaccacaccttcgacctgttcaagaacatcaacaagggccggaagacgaac

SEQ ID NO: 93068 - DNA, 201 bp, Homo sapiens
aagaacatcaacaagggccggaagacgaacatcattgactcgatgcttcggatgctggagcagtactctagtaacctggaggatctgatccgggagcgcayggaggagctggagctggaaaagcagaagacagaccggctgcttacacagatgctgcctcccgtctgtggctgaggccttgaagacggggacaccagtgga

SEQ ID NO: 93069 - DNA, 201 bp, Homo sapiens
gcatccgcataggcctgcactcgggtccatgcgtggcaggcgtggtgggcctcaccatgccgcggtactgcctgtttggggacacggtcaacaccgcctcrcgcatggagtccaccgggctgccttaccgcatccacgtgaacttgagcactgtggggattctccgtgctctggactcgggctaccaggtggagctgcgag

SEQ ID NO: 93070 - DNA, 201 bp, Homo sapiens
cgtggacgacatcacctttctccacccacatgggggcacctctcgaaaggtggcccaggggagtcgatcaagtctgggtgcccgcagcatgtcagacattygcagcggccccagccaacacttggacagccccaacattggtgtctatgagggagacagggtttggctgaagaaattcccaggggatcagcacatagctat

SEQ ID NO: 93071 - DNA, 201 bp, Homo sapiens
cagcgacacgcggcagagatcgccaacatgtcactggacatcctcagtgccgtgggcactttccgcatgcgccatatgcctgaggttcccgtgcgcatcckcataggcctgcactcgggtccatgcgtggcaggcgtggtgggcctcaccatgccgcggtactgcctgtttggggacacggtcaacaccgcctcgcgcatg

SEQ ID NO: 93072 - DNA, 201 bp, Homo sapiens
ccgcataggcctgcactcgggtccatgcgtggcaggcgtggtgggcctcaccatgccgcggtactgcctgtttggggacacggtcaacaccgcctcgcgcmtggagtccaccgggctgccttaccgcatccacgtgaacttgagcactgtggggattctccgtgctctggactcgggctaccaggtggagctgcgaggccg

SEQ ID NO: 93073 - DNA, 201 bp, Homo sapiens
gcaggcgtggtgggcctcaccatgccgcggtactgcctgtttggggacacggtcaacaccgcctcgcgcatggagtccaccgggctgccttaccgcatccmcgtgaacttgagcactgtggggattctccgtgctctggactcgggctaccaggtggagctgcgaggccgcacggagctgaagggcaagggcgccgaggac

SEQ ID NO: 93074 - DNA, 201 bp, Homo sapiens
cacgatccactacgccttgtccccaggcccggaggccttggccgcactcgccaacagctcccagcttcgcagggcccacgatgccgtgctcaccctcacgygccactgtccctctgaaggcagcgtgctggacagcctgcgcagggctcaagagcgccgcgagctgccctctgacctcaatctgcagcaggtctccccact

SEQ ID NO: 93075 - DNA, 201 bp, Homo sapiens
tcgaggtagcgctgctgcccgagccttgccggacgccgggctcgctgggggccgtgtcctccgcgctggcccgcgtgtcgggcctcgtgggtccggtgaamcctgcggcctgccggccagccgagctgctcgccgaagaagccgggatcgcgctggtgccctggggctgcccctggacgcaggcggagggcaccacggccc

SEQ ID NO: 93076 - DNA, 176 bp, Homo sapiens
tcaaaagggggaccggccctgtgacccctcaccggggccgtgggcccgagccccggacttccctaagccggcaatvaccgcctgcgcccgccgagcgggtgggcttccggaccccgggctctgcggtcccgcgtggtgggctccgtccctgccccgcctcccccgggccctgcccc

SEQ ID NO: 93077 - DNA, 201 bp, Homo sapiens
agcgggtgggcttccggaccccgggctctgcggtcccgcgtggtgggctccgtccctgccccgcctcccccgggccctgccccggctcccgctcctgctgytcctgcttctgctgcagccccccgccctctccgccgtgttcacggtgggggtcctgggcccctgggcttgcgaccccatcttctctcgggctcgcccgga

SEQ ID NO: 93078 - DNA, 201 bp, Homo sapiens
gacagccccaacattggtgtctatgagggagacagggtttggctgaagaaattcccaggggatcagcacatagctatccgcccagcaaccaagacggcctyctccaagctccaggagctccggcatgagaacgtggccctctacctggggcttttcctggctcggggagcagaaggccctgcggccctctgggagggcaac

SEQ ID NO: 93079 - DNA, 201 bp, Homo sapiens
gaagtcacggaactgcatagtggatggcagattcgtactcaagatcactgaccacggccacgggagactgctggaagcacagaaggtgctaccggagcctyccagagcggaggaccagctgtggacagccccggagctgcttagggacccagccctggagcgccggggaacgctggccggcgacgtctttagcttggccat

SEQ ID NO: 93080 - DNA, 201 bp, Homo sapiens
ggccccagccaacacttggacagccccaacattggtgtctatgagggagacagggtttggctgaagaaattcccaggggatcagcacatagctatccgccyagcaaccaagacggccttctccaagctccaggagctccggcatgagaacgtggccctctacctggggcttttcctggctcggggagcagaaggccctgcg

SEQ ID NO: 93081 - DNA, 191 bp, Homo sapiens
gcggaactgggcgaacccgggggttcgtttctgctgactccagtgtcccgagaggcgccgcttcttccgctttctcgtcaggctcctgcarccccaggcatgaaccaaggtttctgaactactgggcgggagccaacgtctcttctttctcccgctctggcggaggctttgtcgctgcgggctgggcccca

SEQ ID NO: 93082 - DNA, 190 bp, Homo sapiens
gcggaactgggcgaacccgggggttcgtttctgctgactccagtgtcccgagaggcgccgcttcttccgctttctcgtcaggctcctgcraccccaggcatgaaccaaggtttctgaactactgggcgggagccaacgtctcttctttctcccgctctggcggaggctttgtcgctgcgggctgggcccc

SEQ ID NO: 93083 - DNA, 191 bp, Homo sapiens; identical to SEQ ID NO: 93081

SEQ ID NO: 93084 - DNA, 190 bp, Homo sapiens; identical to SEQ ID NO: 93082

SEQ ID NO: 93085 - DNA, 201 bp, Homo sapiens
atggaccaccaggctgtgggaagacattacttgcacatgcaattgctggggaacttgacctgccaattttgaaagtggctgctccagagattgtgtctggrgtatccggagagtctgagcagaagctgagagaactatttgagcaagctgtgtcaaatgcaccatgtatcattttcattgatgaaattgatgctattaccc

SEQ ID NO: 93086 - DNA, 105 bp, Homo sapiens
ctagkagctggcggtccgagctgtggcttgaaagaccgacgcgatgaagcccagacctgcagggttcgtggataataaactcaagcagcgagtcatccagtacct

SEQ ID NO: 93087 - DNA, 163 bp, Homo sapiens
ctaggagctggcggtccgagctgtggcttgaaagaccgacgcgatgaagcccagacctgcagrgttcgtggataataaactcaagcagcgagtcatccagtaccttaccagtaacaaatgtggcaaatatgtggacattggagtcttagcgtctgatttacaa

SEQ ID NO: 93088 - DNA, 117 bp, Homo sapiens
ctaggagctggcggtcmgagctgtggcttgaaagaccgacgcgatgaagcccagacctgcagggttcgtggataataaactcaagcagcgagtcatccagtaccttaccagtaacaa

SEQ ID NO: 93089 - DNA, 201 bp, Homo sapiens
aggaggatggtttattgacaaaaccccaagtgtaaagaaagacagttttttcttggacctgtcatgtgagaaaagtaatcctaagaagccaataactgagrtacaggattcaaaagattcttctcttttggagagtgatatgaaacggaaaggcaagctaaagaataaaggaagcaaaaggaagaaagaagatcttcagga

SEQ ID NO: 93090 - DNA, 201 bp, Homo sapiens
atgaacagttccctgctgtctttatatcggaaaggaaatcctgattctgtttcaaatactcctgagatggagcaaagagaaaccacctcttcaacaccacraataagttccaaaacaggctccattcccttgaagacccctgccaaagattctgaaggaggatggtttattgacaaaaccccaagtgtaaagaaagacagt

SEQ ID NO: 93091 - DNA, 201 bp, Homo sapiens
tggagagtgatatgaaacggaaaggcaagctaaagaataaaggaagcaaaaggaagaaagaagatcttcaggaagtagatggagaaattgaagctgtcctrcaaaagaaagctaaagccagggggttagaattccagatctccaacgtgaagtttgaagatgtgggaggcaatgatatgacattaaaagaggtctgcaaga

SEQ ID NO: 93092 - DNA, 201 bp, Homo sapiens
tgaacagttccctgctgtctttatatcggaaaggaaatcctgattctgtttcaaatactcctgagatggagcaaagagaaaccacctcttcaacaccacgrataagttccaaaacaggctccattcccttgaagacccctgccaaagattctgaaggaggatggtttattgacaaaaccccaagtgtaaagaaagacagtt

SEQ ID NO: 93093 - DNA, 201 bp, Homo sapiens
ccccaaaagagaagtggcttcaaaagatatggaacgaagaattgtagcccaactcctaacctgcatggatgatctgaataatgtggctgctacagcccggrtcctagttattggagctactaatcgaccagactcgttagaccctgctttgagacgtgcgggaaggttcgaccgagaaatatgcctaggtatcccagatga

SEQ ID NO: 93094 - DNA, 201 bp, Homo sapiens
agattctgaaggaggatggtttattgacaaaaccccaagtgtaaagaaagacagttttttcttggacctgtcatgtgagaaaagtaatcctaagaagccartaactgagatacaggattcaaaagattcttctcttttggagagtgatatgaaacggaaaggcaagctaaagaataaaggaagcaaaaggaagaaagaaga

SEQ ID NO: 93095 - DNA, 131 bp, Homo sapiens
ctaggagctggcggtccgagctgtggcttgraagaccgacgcgatgaagcccagacctgcagggttcgtggataataaactcaagcagcgagtcatccagtaccttaccagtaacaaatgtggcaaatatg

SEQ ID NO: 93096 - DNA, 201 bp, Homo sapiens; identical to SEQ ID NO: 93085

SEQ ID NO: 93097 - DNA, 111 bp, Homo sapiens
ggttgactagkagctggcggtccgagctgtggcttgaaagaccgacgcgatgaagcccagacctgcagggttcgtggataataaactcaagcagcgagtcatccagtatag

SEQ ID NO: 93098 - DNA, 169 bp, Homo sapiens
ggttgactaggagctggcggtccgagctgtggcttgaaagaccgacgcgatgaagcccagacctgcagrgttcgtggataataaactcaagcagcgagtcatccagtatagactatggtcgaagaaaaagaaatgcttttaggattcaggtagaaaaagtatttagcat

SEQ ID NO: 93099 - DNA, 123 bp, Homo sapiens
ggttgactaggagctggcggtcmgagctgtggcttgaaagaccgacgcgatgaagcccagacctgcagggttcgtggataataaactcaagcagcgagtcatccagtatagactatggtcgaa

SEQ ID NO: 93100 - DNA, 201 bp, Homo sapiens; identical to SEQ ID NO: 93089

SEQ ID NO: 93101 - DNA, 201 bp, Homo sapiens; identical to SEQ ID NO: 93090

SEQ ID NO: 93102 - DNA, 201 bp, Homo sapiens; identical to SEQ ID NO: 93091

SEQ ID NO: 93103 - DNA, 201 bp, Homo sapiens; identical to SEQ ID NO: 93092

SEQ ID NO: 93104 - DNA, 201 bp, Homo sapiens; identical to SEQ ID NO: 93093

SEQ ID NO: 93105 - DNA, 201 bp, Homo sapiens; identical to SEQ ID NO: 93094

SEQ ID NO: 93106 - DNA, 137 bp, Homo sapiens
ggttgactaggagctggcggtccgagctgtggcttgraagaccgacgcgatgaagcccagacctgcagggttcgtggataataaactcaagcagcgagtcatccagtatagactatggtcgaagaaaaagaaatgct

SEQ ID NO: 93107 - DNA, 201 bp, Homo sapiens
gttcactctggatcatcccccaaaagattgggcctacagcaagggctttgtgactgccgacatgatccgggaacacctgcccgctccaggggatgatgtgytggtactgctttgtgggccacccccaatggtgcagctggcctgccatcccaacttggacaaactgggctactcacaaaagatgcgattcacctactgagc

SEQ ID NO: 93108 - DNA, 201 bp, Homo sapiens
aaggaagggagcatgtacgcttggtccaagattggctagttccttgatagcatcttactctcaccttctttgtgtctgtgatgaaaggaacagtctgtgcwatgggttttacttaaacttcactgttcaacctatgagcaaatctgtatgtgtgagtataagttgagcatagcatacttccagaggtggtcttatggagat

SEQ ID NO: 93109 - DNA, 201 bp, Homo sapiens
tggggatgtggtggagtttcgggggccaagcgggttgctcacttacactggaaaagggcattttaacattcagcccaacaagaaatctccaccagaacccmgagtggcgaagaaactgggaatgattgccggcgggacaggaatcaccccaatgctacagctgatccgggccatcctgaaagtccctgaagatccaaccca

SEQ ID NO: 93110 - DNA, 201 bp, Homo sapiens
ttgatggcagcctggtcatcaggccatacactcctgtcaccagtgatgaggatcaaggctatgtggatcttgtcatcaaggtctacctgaagggtgtgcaycccaaatttcctgagggagggaagatgtctcagtacctggatagcctgaaggttggggatgtggtggagtttcgggggccaagcgggttgctcacttaca

SEQ ID NO: 93111 - DNA, 201 bp, Homo sapiens
gcctccctgggggtggggctggtcactctgctcggcctggctgtgggctcctacttggttcggaggtcccgccggcctcaggtcactctcctggaccccartgaaaagtacctgctacgactgctagacaagacgactgtgagccacaacaccaagaggttccgctttgccctgcccaccgcccaccacactctggggctg

SEQ ID NO: 93112 - DNA, 201 bp, Homo sapiens
gaggcccatggagcagtctcttccatggagtaagaaggaagggagcatgtacgcttggtccaagattggctagttccttgatagcatcttactctcacctyctttgtgtctgtgatgaaaggaacagtctgtgcaatgggttttacttaaacttcactgttcaacctatgagcaaatctgtatgtgtgagtataagttgag

SEQ ID NO: 93113 - DNA, 201 bp, Homo sapiens; identical to SEQ ID NO: 93107

SEQ ID NO: 93114 - DNA, 201 bp, Homo sapiens; identical to SEQ ID NO: 93108

SEQ ID NO: 93115 - DNA, 201 bp, Homo sapiens; identical to SEQ ID NO: 93109

SEQ ID NO: 93116 - DNA, 201 bp, Homo sapiens; identical to SEQ ID NO: 93110

SEQ ID NO: 93117 - DNA, 201 bp, Homo sapiens; identical to SEQ ID NO: 93111

SEQ ID NO: 93118 - DNA, 201 bp, Homo sapiens; identical to SEQ ID NO: 93112

SEQ ID NO: 93119 - DNA, 201 bp, Homo sapiens; identical to SEQ ID NO: 93107

SEQ ID NO: 93120 - DNA, 201 bp, Homo sapiens; identical to SEQ ID NO: 93108

SEQ ID NO: 93121 - DNA, 201 bp, Homo sapiens; identical to SEQ ID NO: 93109

SEQ ID NO: 93122 - DNA, 201 bp, Homo sapiens; identical to SEQ ID NO: 93110

SEQ ID NO: 93123 - DNA, 201 bp, Homo sapiens; identical to SEQ ID NO: 93111

SEQ ID NO: 93124 - DNA, 201 bp, Homo sapiens; identical to SEQ ID NO: 93112

SEQ ID NO: 93125 - DNA, 201 bp, Homo sapiens; identical to SEQ ID NO: 93107

SEQ ID NO: 93126 - DNA, 201 bp, Homo sapiens; identical to SEQ ID NO: 93108

SEQ ID NO: 93127 - DNA, 201 bp, Homo sapiens; identical to SEQ ID NO: 93109

SEQ ID NO: 93128 - DNA, 201 bp, Homo sapiens
tggttcggaggtcccgccggcctcaggtcactctcctggaccccaatgaaaagtacctgctacgactgctagacaagacggtctacctgaagggtgtgcaycccaaatttcctgagggagggaagatgtctcagtacctggatagcctgaaggttggggatgtggtggagtttcgggggccaagcgggttgctcacttaca

SEQ ID NO: 93129 - DNA, 201 bp, Homo sapiens
gcctccctgggggtggggctggtcactctgctcggcctggctgtgggctcctacttggttcggaggtcccgccggcctcaggtcactctcctggaccccartgaaaagtacctgctacgactgctagacaagacggtctacctgaagggtgtgcaccccaaatttcctgagggagggaagatgtctcagtacctggatagc

SEQ ID NO: 93130 - DNA, 201 bp, Homo sapiens; identical to SEQ ID NO: 93112

SEQ ID NO: 93131 - DNA, 201 bp, Homo sapiens
acttgctttgatgctgtcatagacaactttgatgtgtacaaggtggagacaattggcgatgcctacatggtggtgtcagggctccctgtgcggaacgggcrgctacacgcctgcgaggtagcccgcatggccctggcactgctggatgctgtgcgctccttccgaatccgccaccggccccaggagcagctgcgcttgcgc

SEQ ID NO: 93132 - DNA, 201 bp, Homo sapiens
tctcggcccagaccgtcgcagctacagggggcctcgagccccggggtgagcgtccccgtcccgctcctgctccttcccatagggacgcgcctgatgcctgsgaccggccgctgagcccaaggggaccgaggaggccatggtaggagcgctcgcctgctgcggtgcccgctgaggccatgccggggccccggcgccccgctg

SEQ ID NO: 93133 - DNA, 201 bp, Homo sapiens
acagacttctccctctgggatatggatcccgagaatggtgccttcagggttgtactgaactacaatgggacttcccaagagctggtggctgtgtcggggcrcaaactgaactggcccctggggtaccctcctcctgacatccccaaatgtggctttgacaacgaagacccagcatgcaaccaagatcacctttccaccctg

SEQ ID NO: 93134 - DNA, 201 bp, Homo sapiens
agggacgcgcctgatgcctgggaccggccgctgagcccaaggggaccgaggaggccatggtaggagcgctcgcctgctgcggtgcccgctgaggccatgcyggggccccggcgccccgctggctcccgcctgcgcctgctcctgctcctgctgctgccgccgctgctgctgctgctccggggcagccacgcgggcaacctg

SEQ ID NO: 93135 - DNA, 201 bp, Homo sapiens
tgatgcctgggaccggccgctgagcccaaggggaccgaggaggccatggtaggagcgctcgcctgctgcggtgcccgctgaggccatgccggggccccggmgccccgctggctcccgcctgcgcctgctcctgctcctgctgctgccgccgctgctgctgctgctccggggcagccacgcgggcaacctgacggtagccgt

SEQ ID NO: 93136 - DNA, 201 bp, Homo sapiens
atgaagggcaaaggcaaggttcggacctactggctccttggggagagggggagtagcacccgaggctgacctgcctcctctcctatccctccacacctccctaccctgtgccagaagcaacagaggtgccaggcctcagcctcacccacagcagccccatcgccaaaggatggaagtaatttgaatagctcaggtgtgctg

SEQ ID NO: 93137 - DNA, 201 bp, Homo sapiens
cgcacgcacactcccagttgttcacactcgggtcctctccagcccgacgttctcctggcacccacctgctccgcggcgccctgcgcgcccccctcggtcgygccccttgcgctctcggcccagaccgtcgcagctacagggggcctcgagccccggggtgagcgtccccgtcccgctcctgctccttcccatagggacgcg

SEQ ID NO: 93138 - DNA, 201 bp, Homo sapiens
ctctcggcccagaccgtcgcagctacagggggcctcgagccccggggtgagcgtccccgtcccgctcctgctccttcccatagggacgcgcctgatgcctrggaccggccgctgagcccaaggggaccgaggaggccatggtaggagcgctcgcctgctgcggtgcccgctgaggccatgccggggccccggcgccccgct

SEQ ID NO: 93139 - DNA, 201 bp, Homo sapiens
gtgcagggtgtggagctggtggtgaactacgacgccccccagtacctgagaacctacgtgcaccgggttgggaggacagctcgcgctgggaaaactggacrggccttcacactgctcctgaaagtgcaggagaggagattcctccgaatgctaactgaagctggggcacctgagttgcagcggcacgagctctccagcaag

SEQ ID NO: 93140 - DNA, 201 bp, Homo sapiens
gaagagcgcaagcagagggcggcctaggctggggctcagagggccggagggactgaacgctcaccaccctgaccctccttccagagcagtgctgatcactrgatcctgtatgtgaggaaaggaatcccccagtggacacagccttcctccccaagcacgtggtctctgcgccaggcagcccgggcgtcagagctcaagcac

SEQ ID NO: 93141 - DNA, 201 bp, Homo sapiens
aggctgaggcaggaaaatggcttgaacccgggaggtggaggttgcagtgagctgagattgcgccactgcactccagcctgggcaacaagagcaaaactccrtctcaaaaaaaaaaattgccgggcgcggtggcaaatgcctgtaatcccagcactttgggaggccgaggcaggtggatcacaaggtcaggagatagagacc

SEQ ID NO: 93142 - DNA, 201 bp, Homo sapiens
ctgtcccagctggaggagtctgtcaaggaagagcgcaagcagagggcggcctaggctggggctcagagggccggagggactgaacgctcaccaccctgacyctccttccagagcagtgctgatcactggatcctgtatgtgaggaaaggaatcccccagtggacacagccttcctccccaagcacgtggtctctgcgccag

SEQ ID NO: 93143 - DNA, 201 bp, Homo sapiens
caggcgtggtggtgcatgcctgtaatccagctacttgggaggctgaggcaggaaaatggcttgaacccgggaggtggaggttgcagtgagctgagattgcrccactgcactccagcctgggcaacaagagcaaaactccgtctcaaaaaaaaaaattgccgggcgcggtggcaaatgcctgtaatcccagcactttgggag

SEQ ID NO: 93144 - DNA, 201 bp, Homo sapiens
ggcctggtgctgggggggttcgggaagaggaaggcgccgaaggtccagcctttcctgccaaggtggctggctgagcctaactgtgtcagaaggaatgtcaycgaagacctggttcctatcgaggacatccctgacgtccatcctgacctgcagaagcagctgcgggcacacggcatctcgtcctactttccagtccaggca

SEQ ID NO: 93145 - DNA, 201 bp, Homo sapiens
aagccttagtaaaacggtgaaaagtactcccagacggacgcgggcacccgtcatgcttttgctgagagttgggggcattaaccttgagctaatgttaaaartcaagctcttggccaggcatggtggctcatgcctgtaattccagcactttgggaggccaaggcgggtggatcacctgaggtcacgagttcgagaccagcc

SEQ ID NO: 93146 - DNA, 201 bp, Homo sapiens
tgagctaatgttaaaaatcaagctcttggccaggcatggtggctcatgcctgtaattccagcactttgggaggccaaggcgggtggatcacctgaggtcasgagttcgagaccagcctgaccaacatggagaaaccctgtctctactaaaaatacaaaattagccaggcgtggtggtgcatgcctgtaatccagctacttg

SEQ ID NO: 93147 - DNA, 201 bp, Homo sapiens
aagacactggccttcgtcatccctgtggtgcaggccctgctttcgagagtggtctgccacatccgtgccctggttgtgctgcccaccaaggagctggcccrgcagtaggtggacaccagctacctccaggccagtgacagacttctcctgcaggtgagcaaagttttcaacatctacacagatgccacacctctgagagtc

SEQ ID NO: 93148 - DNA, 201 bp, Homo sapiens
gcctggtgctgggggggttcgggaagaggaaggcgccgaaggtccagcctttcctgccaaggtggctggctgagcctaactgtgtcagaaggaatgtcaccgaagacctggttcctatcgaggacatccctgacgtccatcctgacctgcagaagcagctgcgggcacacggcatctcgtcctactttccagtccaggcag

SEQ ID NO: 93149 - DNA, 201 bp, Homo sapiens
tggagctggtggtgaactacgacgccccccagtacctgagaacctacgtgcaccgggttgggaggacagctcgcgctgggaaaactggacaggccttcacrctgctcctgaaagtgcaggagaggagattcctccgaatgctaactgaagctggggcacctgagttgcagcggcacgagctctccagcaagctgctgcagc

SEQ ID NO: 93150 - DNA, 201 bp, Homo sapiens
gccagtgacagacttctcctgcaggtgagcaaagttttcaacatctacacagatgccacacctctgagagtctccctggttacgggacagaagtctctggycaaggagcaggagagcctcgtccagaaaacagctgatgggtaccgctgcttggctgacatcgtggtagccacccccggccgcctggtggaccacatcgac

SEQ ID NO: 93151 - DNA, 201 bp, Homo sapiens
gctgcttggctgacatcgtggtagccacccccggccgcctggtggaccacatcgaccagaccccaggattcagcctccagcagctccgcttcctgattatygacgaggctgaccggatgattgacagcatgcatcagtcctggctgccgcgggtggtggcggccgccttccagagcgaggaccccgcggacccctgtgccc

SEQ ID NO: 93152 - DNA, 201 bp, Homo sapiens
agtttgaacaggggaagatccagctgctcatcagcacggacgccaccgcgcgaggcatcgacgtgcagggtgtggagctggtggtgaactacgacgccccycagtacctgagaacctacgtgcaccgggttgggaggacagctcgcgctgggaaaactggacaggccttcacactgctcctgaaagtgcaggagaggagat

SEQ ID NO: 93153 - DNA, 201 bp, Homo sapiens
ggcaggtggatcacaaggtcaggagatagagaccatcattgctaacatggtgaaaccccgtctctactaaaaatacaaaaaaaaaaaaaaaacaactagcygggcgtggtggcgggcacctatagtcccagctactcgggaggctgaggcaggagaatggcgtgaacccgggaggcggagcttgcagtgagcggagactgc

SEQ ID NO: 93154 - DNA, 201 bp, Homo sapiens
gcacacggcatctcgtcctactttccagtccaggcagctgtgattcctgccctcctggagagcgcagcctgtgggtttctggtgggcagaggtggctaccrgcctagcgacctctgtgtttctgccccaacaggcagtgggaagacactggccttcgtcatccctgtggtgcaggccctgctttcgagagtggtctgccac

SEQ ID NO: 93155 - DNA, 201 bp, Homo sapiens
aaactggacaggccttcacactgctcctgaaagtgcaggagaggagattcctccgaatgctaactgaagctggggcacctgagttgcagcggcacgagctytccagcaagctgctgcagccgctggttcctcggtacgaggaggccctgtcccagctggaggagtctgtcaaggaagagcgcaagcagagggcggcctagg

SEQ ID NO: 93156 - DNA, 201 bp, Homo sapiens
caagtgttataccaactaaaacccccaataaaccttgaacagtgactactttggttaattcattatattaagatataaagtcataaagctgctagttattrtattaatttggaaatattaggctattcttgggcaaccctgcaacgattttttctaacagggatattattgactaatagcagaggatgtaatagtcaactg

SEQ ID NO: 93157 - DNA, 201 bp, Homo sapiens
aaaacccccaataaaccttgaacagtgactactttggttaattcattatattaagatataaagtcataaagctgctagttattatattaatttggaaataytaggctattcttgggcaaccctgcaacgattttttctaacagggatattattgactaatagcagaggatgtaatagtcaactgagttgtattggtaccac

SEQ ID NO: 93158 - DNA, 201 bp, Homo sapiens
ataatgtaactgcaaactccaagctggtcattatcacggctggggcacgtcagcaagagggagaaagccgtcttaatttggtccagcgtaacgtgaacatmtttaaattcatcattcctaatgttgtaaaatacagcccgaactgcaagttgcttattgtttcaaatccagtggatatcttgacctacgtggcttggaaga

SEQ ID NO: 93159 - DNA, 201 bp, Homo sapiens
ttccgttacctaatgggggaaaggctgggagttcacccattaagctgtcatgggtgggtccttggggaacatggagattccagtgtgcctgtatggagtgsaatgaatgttgctggtgtctctctgaagactctgcacccagatttagggactgataaagataaggaacagtggaaagaggttcacaagcaggtggttgag

SEQ ID NO: 93160 - DNA, 201 bp, Homo sapiens
atgtaaaaagatctacatacaaacaatgcaaccaactatccaagtgttataccaactaaaacccccaataaaccttgaacagtgactactttggttaattyattatattaagatataaagtcataaagctgctagttattatattaatttggaaatattaggctattcttgggcaaccctgcaacgattttttctaacagg

SEQ ID NO: 93161 - DNA, 201 bp, Homo sapiens
ctgtacgtactgcatttgccccttgagccaggtggatgtttaccgtgtgttatataacttcctggctccttcactgaacatgcctagtccaacattttttmccagtgagtcacatcctgggatccagtgtataaatccaatatcatgtcttgtgcataattcttccaaaggatcttattttgtgaactatatcagtagtgt

SEQ ID NO: 93162 - DNA, 201 bp, Homo sapiens
gcccgaactgcaagttgcttattgtttcaaatccagtggatatcttgacctacgtggcttggaagataagtggttttcccaaaaaccgtgttattggaagyggttgcaatctggattcagcccgattccgttacctaatgggggaaaggctgggagttcacccattaagctgtcatgggtgggtccttggggaacatggag

SEQ ID NO: 93163 - DNA, 201 bp, Homo sapiens
ttatattaatttggaaatattaggctattcttgggcaaccctgcaacgattttttctaacagggatattattgactaatagcagaggatgtaatagtcaastgagttgtattggtaccacttccattgtaagtcccaaagtattatatatttgataataatgctaatcataattggaaagtaacattctatatgtaaatgt

SEQ ID NO: 93164 - DNA, 201 bp, Homo sapiens
gggacagaatggaatctcagaccttgtgaaggtgactctgacttctgaggaagaggcccgtttgaagaagagtgcagatacactttgggggatccaaaagkagctgcaattttaaagtcttctgatgtcatatcatttcactgtctaggctacaacaggattctaggtggaggttgtgcatgttgtcctttttatctgatc

SEQ ID NO: 93165 - DNA, 201 bp, Homo sapiens
tggatatcttgacctacgtggcttggaagataagtggttttcccaaaaaccgtgttattggaagcggttgcaatctggattcagcccgattccgttacctratgggggaaaggctgggagttcacccattaagctgtcatgggtgggtccttggggaacatggagattccagtgtgcctgtatggagtggaatgaatgttg

SEQ ID NO: 93166 - DNA, 201 bp, Homo sapiens
taacttcctggctccttcactgaacatgcctagtccaacattttttcccagtgagtcacatcctgggatccagtgtataaatccaatatcatgtcttgtgyataattcttccaaaggatcttattttgtgaactatatcagtagtgtacattaccatataatgtaaaaagatctacatacaaacaatgcaaccaactatcc

SEQ ID NO: 93167 - DNA, 201 bp, Homo sapiens; identical to SEQ ID NO: 93156

SEQ ID NO: 93168 - DNA, 201 bp, Homo sapiens; identical to SEQ ID NO: 93157

SEQ ID NO: 93169 - DNA, 201 bp, Homo sapiens; identical to SEQ ID NO: 93158

SEQ ID NO: 93170 - DNA, 201 bp, Homo sapiens; identical to SEQ ID NO: 93159

SEQ ID NO: 93171 - DNA, 201 bp, Homo sapiens; identical to SEQ ID NO: 93160

SEQ ID NO: 93172 - DNA, 201 bp, Homo sapiens; identical to SEQ ID NO: 93161

SEQ ID NO: 93173 - DNA, 201 bp, Homo sapiens; identical to SEQ ID NO: 93162

SEQ ID NO: 93174 - DNA, 201 bp, Homo sapiens; identical to SEQ ID NO: 93163

SEQ ID NO: 93175 - DNA, 201 bp, Homo sapiens; identical to SEQ ID NO: 93164

SEQ ID NO: 93176 - DNA, 201 bp, Homo sapiens; identical to SEQ ID NO: 93165

SEQ ID NO: 93177 - DNA, 201 bp, Homo sapiens; identical to SEQ ID NO: 93166

SEQ ID NO: 93178 - DNA, 201 bp, Homo sapiens
ctactaaagcagcacctggagattactggtgggcaggtacgtacccggttcccgccagaacccaatggaatcctgcatattggacatgccaaagccatcartttcaactttggctatgccaaggccaacaatggcatctgttttctgcgttttgatgacaccaaccctgagaaggaggaagcaaagttcttcacggccatc

SEQ ID NO: 93179 - DNA, 201 bp, Homo sapiens
tggtggagaatggcgagactgctgaccagaccctgtctctgatggagcagctccggggggaggcccttaagttccacaagcctggtgagaactacaagacyccaggctatgtggtcactccacacaccatgaatctactaaagcagcacctggagattactggtgggcaggtacgtacccggttcccgccagaacccaatg

SEQ ID NO: 93180 - DNA, 201 bp, Homo sapiens
atgacccacggctctttacactcacggccctgcgacggcggggcttcccacctgaggccatcaacaacttctgtgcccgggtgggagtgactgtggcacaraccacaatggagccacatcttctagaagcctgtgtgcgtgatgtgctgaatgacacagccccacgagccatggctgtgctggagtcactacgggtcatca

SEQ ID NO: 93181 - DNA, 201 bp, Homo sapiens
actctcattggtcagcgagtgaatgccgacctgcagactggggcctaagtttcttttagtttccggtgtctctgcaatggcggctctagactccctgtcgmtcttcactagcctcggcctgagcgagcagaaggcccgcgagacgctcaagaactcggctctgagcgcgcagctgcgcgaggccgctactcaggctcagca

SEQ ID NO: 93182 - DNA, 201 bp, Homo sapiens
accccatcgacactgtggacttcgagcgggaatgtggcgtgggtgtcattgtgaccccagagcagattgaggaggctgtggaggctgctattaacaggcaycggccccagctcctggtggaacgttaccatttcaacatggggctgctgatgggagaggctcgggctgtgctgaagtgggcagatggcaaaatgatcaaga

SEQ ID NO: 93183 - DNA, 201 bp, Homo sapiens
acgggtcatcatcaccaactttcctgctgccaagtccttggacatccaggtgcccaacttcccagctgatgagaccaaaggcttccatcaggttccctttrcacccattgtcttcattgagaggactgacttcaaggaggagccagagccaggatttaagcgcctggcttggggccagcctgtgggcctgaggcatacagg

SEQ ID NO: 93184 - DNA, 201 bp, Homo sapiens
ccaaccctgagaaggaggaagcaaagttcttcacggccatctgtgacatggtagcctggctaggctacacaccttacaaagtcacatatgcgtctgactaytttgaccagctatatgcgtgggctgtggagctcatccgcaggggtctggcttatgtgtgccaccagcgaggagaggagctcaaaggccataatactctgc

SEQ ID NO: 93185 - DNA, 201 bp, Homo sapiens
cagcgagtgaatgccgacctgcagactggggcctaagtttcttttagtttccggtgtctctgcaatggcggctctagactccctgtcgctcttcactagcytcggcctgagcgagcagaaggcccgcgagacgctcaagaactcggctctgagcgcgcagctgcgcgaggccgctactcaggctcagcagaccctgggttc

SEQ ID NO: 93186 - DNA, 201 bp, Homo sapiens; identical to SEQ ID NO: 93178

SEQ ID NO: 93187 - DNA, 173 bp, Homo sapiens
aagtagaaaagtcagagcaaaaccacgcctgtgtcttcctcctgcctcagggacgaacaccttccttccagcytcggcctgagcgagcagaaggcccgcgagacgctcaagaactcggctctgagcgcgcagctgcgcgaggccgctactcaggctcagcagaccctgggttc

SEQ ID NO: 93188 - DNA, 201 bp, Homo sapiens; identical to SEQ ID NO: 93179

SEQ ID NO: 93189 - DNA, 201 bp, Homo sapiens; identical to SEQ ID NO: 93180

SEQ ID NO: 93190 - DNA, 201 bp, Homo sapiens; identical to SEQ ID NO: 93183

SEQ ID NO: 93191 - DNA, 201 bp, Homo sapiens; identical to SEQ ID NO: 93182

SEQ ID NO: 93192 - DNA, 201 bp, Homo sapiens; identical to SEQ ID NO: 93184

SEQ ID NO: 93193 - DNA, 64006 bp, Homo sapiens
aaaatgtctcagacattgccaaatgtcctcaggttgagaatcatgggtctagtatattctattcattacccttgagcaatgaactccgaaaattcaagatataaacctcaataccattttcaacacttcaccttcacaggggcttagttcttaatgaaatctttaataaatggtgttgatgatgaaaacaaacataaataatgatgtaataaacatattttgcataaatacttttctatcttttgcatgattaacattctaatgacagtcaaatggaacaaacattttaaaggcctctcattcatactgttaattgctgaccaaagagttgtaccaatttacatttctactagtagtgtaagagtctatcttaccacaccctcaccagcattggctattatgtgtatatttctatctttgctaatatgagttatttctatttattttaatatttgtgtttataaaattttgtattgttcttatttatatttttgagcactagtaagagtgaatattccccgtatgttatagccaatagcacttctttttttcttaactgttttgtgctttttgctcatttgtcttttggatggtcttagtattgttcctttttttttgagacagagtcttgctctgtcacccaggctggagtgcagtgtcgctatcttggctcattgcaacctctgcctcccaggttcaagcaattctcatccctcagcctcctgagtagctgggatgacaggcatacaccaccacaccttaataatttttgtattttttagtagagacaaggttttgcaatgttggcctggctggtcttaaactcccggcctcaagtgatccgtcttccttggcctcccaaagtgctgggattacaggcatgagccaccgtgctcagcccttagtattgcttttatcaatttgttcaagctctctgtatattataacctggatagcatatatgtctacaaaagaattttgcataaaggcatttgagcgtagactttattaaagctctgggaagatggcaaaggatttaaatcacagcaactgaagtaagctcaaattgagttctaaatattcctctttttataagtcccttgtcatttgtctttctcttttctctttctttccttctcttccctatgcctctctcccatctcttcattctccaatttctgttgcttttcagtggaaactagctcaagttatttctttggtctttgcctccatttaaccatactctcagtttttcttccaccctagtggaagatattagtttatcaaggtattttcttaaacaaggacacttagtttcctaagggaaatgccagtaacaactttcaagatatcttgactattataccagagtgaaaaagagttctgaatcctgttgccctatttgcttcaaatactttctccactttgtttaactaatggatactaggcttaatacctgggtgatgaaataatctgtacaacaaacctccttgacacaagtttacctatgtaacaaacctgcgcacgtacccctgaacttaaaataaaagttaaaaaatatttaaaaaattaaaaaaagaaaacagtaatcaaaaaacaaaataattggttgctggtatgattccatcctgcacagctgttctctggagcgtggttgtttacctctgcctggcttctctcctacctaagtgcttgccgccacccatggaagatttgacggacatggacatcagcctcctgaggccccagaactatctttttggttgtgactagaggccaacaaagattatcactttaaggtggataatgatgaaaatgagcacaagttatctttaagaatggtcagtttaggggctggtagaaaggatggattttatattgttgaagcagaagtaatgaactatgaaggcagtccaattaaagtaatactagcaactttaaaaaggtatgtacagtcaatggtttatcttgggggctttgaaataacattgcctgtggccttacactcagtgtgtttcagggcctgggcatatgagtacacagcacttaacaggtatgaaggaagatacaaagcaggacatgaagaggagggagatgtgagacttttcagtatatctggaaagtgatctgcccctggaagtgggtacatttctacaagaaaaaaataaaacttcttgctgatgaaaatcatgatgatgatgaagaggaagaagattttgatgaagggaaaactgaagaaaaagctctagtgatgaaatttatacaggatactccatccaaaaaatgcacaaagatcaaaccaaaataaaaaagactcagaactatcaagattaagaccaaaaggtcaagaatccttcaaaaacagggggaaaaaacctcttaaaacaccaaaaggacctagttttgtagaagatattaaaagcaaaaatgcaagcaagtatagaaaaagttggttctcttcccaaagctaagtgcatcaattatgtgaagaattacttctggatgaccaactaggaggctattcaccatctctggcagtggaagaagtctctttaagaacacagtttaggccaagcgtggtggctcatgcctgtaaccctagcactttgggaggccaaggtgggcagatcacttgaggtcaggagttcaaaaccagcctggccaacatggtgaaaccttgtctctccaaaaataaataaataaataaataaaaatacaaaaaatttgccaggcgtggtggtggatgcctgtattcccagctacttgggaggctgagacaggagaatcgcttgaacctgggaggcagaggttgcagtgagcagagatcacgccattgcattccagcatgggcaacagagtgagactctgtctcaaaaaaaaaaaaaaatagtttaaacagcttgttaaaattttctttcttctttttttttttaaatcttttaacccaatagttcttttagagaaaaaaattacctgtcatttcgttaatagttcttttagagaaaaaaattatctgtcatttcatttctgtaacagttgatatctaactgtcctttttacaattcagagtgagaagttccctagcacgttggataaatattgtccaggttccattgccaaaaatgtgttgtccaaaatgcccctgtagtttttaaagatgaaactccatcgtttgcttgtttttttttttgagacagagtcttgctctgtcactcaggctggagggcagtggcactatcttggctcactgcagcctctggctcccaggctcaagcaattctcctgcctcagcctcccaagcagctgggattacaggcatgcaccaccacacccagctaatttttgtatttttagtagagatggcattttgccatgttggtcaggaaggtgtcaaactcctggcctcaagtgatctgcccacctcagcctcccaaagtgctgggattacaggtgtgagccaccacgcctggctctttgcttggttttcagtatatatgtatgtatggaatattatgataggacatagtagtagctgtggtcagacaaatggaaatggtgggaagacaaaaatatgtaactgaaataagctcaatattttaataaaggaaaaaataaattttttccccggaaaaagttgtaagaaaaaaataaatcttctcccatgcatcttaggagtgctttaaacttagatgtttggagatgagtagtctttagataggtggaaatggaggaaaaggtgtgacatgcccatggctacctagtatgcttctatgcatagtacagtttttaaaaagtgagttgcttctctgtaaaaacatattactttactattagaaaccactggagagcaatcatgccctgcttatattaaacatctttgctagatttttatttgattttttgagatggggtcttgctctgttgcccaggctggagtgtatggtgcaattttagctcactgcagcctcgaactcctgggctcaaggggtcctcccacctcagcctcccgagtagctgggactataggcatgcaccaccatgcccagctatgtttcctaaatttttaagtgagatacattaaacctcataaaaattagagctaacatttattgaacactctgttgtactgcctcccaagtataacatggtaattaaaacactggaggccaggcacgatggctcacccctgtaatcccagcactttgggagggccaagtgggcagatcacttgacctcaggacttggagaccagcttggccaacatgaggaaaacccgtctctactaaaaatacaaaaattagttgggtgtgatggtgcacgcctgtagtcccagctacttaggagggcaaggcacaagaatcgcttgaacccgggaggtggagtttgcagtgagctgagatcgcaccactgctctccaacctgggcgacagggcgagactccatctcaaaaaaaaccccaaaactaaaaaaaaaaccccaaatgttggaaagttgcgcgaggtataattcagtttagaaattaagaatccaagacaaaaagtctgcctcaggaccacacacaagcacgaagaaaccaagatagttcaagcatggaccttaaaactgcactgtctaaggctgttgtcactggtctcatgtggctatttaaattttaattaaagtgaaataaattttaaaattcagttactaagtcacactaaccatatttcaagtgctcaatggctccatgtagctagtgggtactgtacagacagcacaggataacatttgcatcatggcagaaagttttagtggacctaaccaaaaaaaaaatgcctttaggctcatttcgtgatggcagataaaagcctctggaattctgataagtttctgaagccatgttatagaactggttattgtaattgcrtgaacttcatccaaaactggtgaaagcgtcaggttggggatagtctggtggttgttactttctgtccaacctaatactgaggctctgagaaattctgtggtgaatttctgtagggggacacagcagaaaaggcatagtataggtcagaaaacctgggtcctataatacatagtaataatgacgaccatttactggttgtttcctatgtaccaggcactgtgctaaccacaggcttcatttaatcctcacaatacctgtgtaaggtattattaccaccactttgcatgtgaacaggctgaaattcagaggagtaaggtcacacaactagtaagtaggagagcctggattcaacacctggtatctattcccttgcgctgaacaactccgtgccctcactttcttcatctgtagatctaaaaggattaaattagaacatctcaaaatttctactacttctaaaactctgtgttctaaattaggacattactatctatctccccaagctaatgaaataagcagggttcctgggaggagcttgttacctatttttctccaaaggagatgctttcccctgtctatgcctctgtcctaaaacctttggtttcccactatctaatgtggtttcaactatctatgaggcgctttcgtggcaaggagtgattctctccagtaggcaatcctaagaacgagcgcagtgcttggcgcacagtaaatgctccatggaccatttatgaaattaagtctaagtggacttcaggaaaatgtgaatctgctaaaatgaactactagccagtatactaggtagaaaacccagctgacgaagaaaaccccaagtggagaagcccttgtagggggttggagacaatttctgacccgcagaaacctgcagtggcgctgacgtttacaagtggtggacaaaacgccacttgcaacactggaagaagcggaaaaccccacccactctggaacaacagcgatcagccccgaatatagggtccccttgccgccccgtagcctcctagtcccgcccctctcccaaggcccggcagtggcagcggctgcggctgcgcagtggcgcgggcgtaggcggagcagcgcgcgccgcggtcagctgactgctgggctggcacgtgacttgttctgtgttcgcttgggtagaggaagccgtgaggccggagcttaggtcgggaagggatggatcgctgagccgatagcgtccgctaggctgtctgcctcggtacctgttactgctgctacttcctcgtttgacaccttcctgggtcagtgagcgatggctctccccggatggggagtcctggtcaggccgaagcwtgagctscggtcgctgcctgggagggacgcgggtgggtgcgggggcagagaccgtggcgttggagctggagctggctgggtggctgtgtctggtttctcggcgccaattcaccgtcttgggcctaggttccgtctctaaggaagagaaggagggaaaaagagaaagagctctcgtgggtagttaatgacaggcagaaaggagagatacagcggtctgggatctttcttcttgggtaggaatgcacgccgcctgattgattgaggggaatgaagtgataggtccaggtgaggctatggagtggtgtgtgtgaggtcacagctagcgcaagtgccttcactgggtgtgtgttggggggggcgcgggtgtcgggggtcgggggtggtgggatgacagtttaaaggcctaggagcccctaactgcaggcaaggaaccctcacagagtacacaaggtccctctaggaatgagaaagaacaggaatccagagaactcaactattttttagtagaatgggggagggtaggcaaacaaaacagaacaaaacaaaacaaacccctagaaaagaacttggtgagagtcacataaggcatattgaatcacttgagaaacaggagtaagggggaagctagtattcttttcagaggaaaattctggtatgttagggaaaaatcacatgcttcagtgcgagcccagtacttagcgccgctctgggaatggaacgggtgggatgtgaacagtctatccttaggagttagcactaacgttggagagaaaagtctacacacaggacacgttaaaatacgatgcagtttatgtatacttaccaaaaagagaatgcgaagtgctttgaaagtgtggagcaacgacacatgtgtaaactggcactatgggaagatattctggaggaaagaaaacttgagtcttggcaagccctcaggatttgaacaggttgagagaaatggggataattttacaggcagggaaagccacaggatttgaaagcctgaagatgggggtagggaatgcttctggtggagtcagaagtagcttttacagtggattgcactgcggagaagtgggaaagaaagttgggagtcaggtaacgaggacttttgaatggtagtcgtttacttattcatgcaaataatgtgtactgaatacatgctgtatgcaggtacagtgctgatggtagggtttagaaaattgtctttatagagcttacaggcaagcagaggggatggattttaaaaatcaagcaagcgtgaaatgtgctttgaaggaataacagtggtatgaaagagtgtagtaggggcatgtgtattatggaagattttaaaaaggcattgctaagaatatgactttttaaagattaaaacaattttatttatattcttcataccctctcgctctgagagggtatgacttttgacctgagatctgaaaagagactgaaaagggaatgtgaaggtgtgagtgaaaagaacattccaggcctggcagggtggctcgtgactataatcccaacattttgggaggctgaggtgggaggattgcctgaggccaggagttcaggaccagcctgggcaacatagtgagaccaccgtctctaccaaaaataaaaaaataactagctgggagtggtggtgtgtgcttgtagtcctagctgctcgggaggctgaggcgagaggatcatttgagcccagtagttcgaggctgcagtgagctgtgatcatgccactgcactccctcctgggaaacagagctagaccctgtctctgaaaaacgaaaaaggaacatttcaggctgaagcaacagcgtatgtcaaggccctgaaatgtgaagaggaagaaagcttttcagcctttttgaaaggctagcatggctgaaacggggagggagagaggcaggtggagaaagctggggtcacgccaagcagagcttttattctaaaaacagagggaagccagtgaagattacaggcagtggattgagacaggttgtggctttttttttttttttttggtgggggggagataatgtggagggtggcaaaagtgaatgaggggagacccgctcaggggaacattgttgtaatccactgaaggatttgaagacaagataccttctctctccactgaggacttcagaatgtttaactgtattcacttttagagggttcaggacttggggaagggaaagaatgattcgattctatttgtacccttcacagggtagtcgtaactaccctcgaggcagtcctgaagtacatrgcagaggctcttttgcaaaaatttgttttggcttttcaaatttatccttttgtaaggtcatctatttcagaatatcttttattgaaatatagttacagggagggatcactttcatatttattttgttctcacagttctttgaaagacagtggatgaaaatgctattcattgtatagatgggaacctggagctagagaaacacgtaaagtgatttggctgagtccggagtaactgccacagttttctgactgctgatgtattcctgctgattacctacacagtactaaccacagtcacatctagagaaaagggcgagttttttgaagtgcacagtagtctttgattcagcatttttttttggkgggggggaacttctccctgaagaktcagcacttttgatgaactttttctagtagaacagcttcaaaggaattggcagtggtgggctatgtcttatctataatcttggatagagctgttcaatttacagttcatctggaggaaataatgaacaataaggtgaactgaaagtgctcaggttgtcaatcacagttctttggcaaaaagtgagtctcaaattatgctgaagactgagcctcagggttctgtctcagaagtcctggatctttttctcttttggtataccttgtagggactagataaaatctaaagaaacagtactcaggatctaactaaatgctgagagctagatagtgtaattcagcttttaaaacttggcacaaaatactcatttttatttttttggtatattagtcttaggagcctcatgtacattagttttttcaacctaaaaagaaacttcagggcttcaaaaatctgattttgtgattatttccacaactcacgagataataccattggccaactggaatgccaaagtaaacctttgccaaaggtctccatgtagtttacccgtccctaagyagcaagtcttcttttgaacttggttctgcttaggagtactacagttttgactgagtacctcctacttaaaattttgctcttgtacatatttaaatctgtctacaggttacatctttttcactctttgggtgtggaattatatatcatttataaattaattcatgttagatttccatttttcatcaatttttaaagacagacatagtataaacattagcatagtgcccttgggacgcttaggcagtgaaccaaggcagtctaaaatttcctattgacatgagtgattcttggaactagaaatttcaaactatattcttgatgctgaaacaaaattttttatccagcaggacatctacttctaagattataccatgtgcaaatgtactatgcgtttattgagttaaaaaaatgagccaggtaggcagtggaggagaggtgctttggttactatgcatttattgagttaaaaaatgagccaggtaggcagtggaggagaagtgctttggttacatcggggataaaagagtattaactgtatatctaaaatgtggggtgtgtgtgtgtgtgtctgtgtgagtatgtgtgtgtatttgaaaataaaatgctaggtaagtgatgttttatagaaagggatcgatggatcttctaagatattttaaacagactatcaatgaataggaagttgtaaattaaggcgtgttaacaggtggtttaactttaccatgaaaggttttccttttgaatcagcccatagtttagtgtttctatgtgggtgctattggcagtttggaggtctgtttcgcccctacccactaaatgctgattagcgatctccacaytgggacaacccaaaatgctcccatacatttccagactcctcctggaggagagaggcaccatttggtgcaaaacatgcatgtggtgtcagtttatttgttggacaaatattaagatgttgaggwtacagaggttaaaagtaatattttaataaactgcatataatggaattcaagtaatttaaaatctagtgtttgatgttttaatgtaactcctttagtgtaaaattactgaaactatatcctaatatttctttgaggcacttgtcttttgtaaaactgcatgaataactcaaatagagtccccttaatcccaataaaatgtagtcactaaatgtctttgggcaactaatttcaccagctgttccctcatttgcaagtgggggtggtgataacacatcttgtgagggaattaaatacaaaattgctttagtagatgcaagtgcttatcactgggcacaacatgtggtacatattcagtgatagttgttaccagtaaacagaatctcaagcttacttagggtcatgagttggagaaaactaatcttaaagtctttaagttggtgaatttcaggccaaaatacattgtattggagataycagcaccttctagcagaatgtggtaccgtggtccagtcactattataaattgccagccatgaagaaaagggaagtcatgttttgggagccatgagtgtagattcagggaatcccctggcatggaaggaattatttgcccactgggtcacygctgagttgcctgtgcagaggaggagtctctagaagctgagaaggttttggtgattacttgcagtaatgggtgtacgacagggccctcctggccatgtctgccaattcagtagctttaccagaagttactagaaattttccaacattgtattatgtattacatccccagcccccactccacaatgtcacagtgtgtttccagtttttgtgataggtatctgtgtgaaagtaaggctttgcttttacagattgctttctaggcaaatgtggaataaaaaaattgtagttgataaaatgagtctaataaagattaaattgcctttcatatttaagtatatttatggcaagaaattatggtagttttaataggattatagagcatttatgggtattgtttccattgaaaacaaaacacggaatatttaagatttatttaagaaaggcggggctgggtgtggtggctcacgcctgtaatcccagcactttgggaagcggaggcaaagggcgggcggatcacttgatgtcaggagttcaagaccagcctggccaacatggtgaaaccctgtctctactgaaaatacaaaaaatagctgggcatggtggctcgtgcctataatcccggctactcaggaggctgaggcagaagaatcgcttaaacccaggaggcagaagttacagtgagccgagatcgcgccaatgcactccagcctgggcaacagagtgagactccgtctccaaaaaaaataaaaaggcatattttctgacagttttaaaatctcatttcgtatgaatcatggacgtattccttgaaaggtaaaatcccccttctagttactgaaaatgtttaaacaagttgtattatgagcaagcccctcccacaatcccaattaagatgcttctgtttcgaaggatagaatttttacattcaaagaggaagcagttatttttactttttatatgtatggtgttagtgatttctagggtaggatgtggcaactttttaactgartggattgtggtaaatgtttcgcacagatcaattctgttaaaagttgatgtgcacatttggaaggctatgtgatatttcactgatagctgaggtatgccttcttgtgcttcttaaaataagctgctttagtaaacttggtattttcaagtactgaaaaggaagttgttttgcatggagaccaccttctaggcttaatttattgtgaaatttaatttactgtgaaaggtgattgcatttcagagaccacggtttggttttcttgaaagcattgaaatcagttaagtgtcggagcacttagtggagtgcggtactgttttctgtggttgcccctatcttgggtcaatcccataccttccattcacagaagcagtgccagcagatgtcttgttcaggcttataaccaaccccccctcaccttttatgttgtaatagttattgttttattgtctttatatgcaaatcaattgtggtaggaaaataatccatagccttcaaactctcagaagtgggagataaagtaaataaaattaacagtcccatagctttggatctagggttttttttttttctcctttcctcccacttttttcccttccatgttgaaaaataattgttacttttttttttaagcagcacacttattrcagtcagacaaaatagaagtgcctwcagaattgactagtgtttcccttgtgcctccctatgttcttcagtgtttttttctgtcttgacatctacatgaagtcttcctcccaccctccctgcacacacacagacctgcctgctcgtaagacctgccaccctctcccacccccaattgtaagctccatgaggacagggtctacattttgtttgttttgtttctcagagtctattacagttttgggaacttaagtacccaaaatattttgtgagatgaataagagctttaattgagaacagttacagtcagatgagatgtgtgacaaaacataaaatagatgtctgcctaatgctgttaatgacatgagtgtaagtagacatgtgggagaagtagtgggattatagtaacaggtttggtgcatggatggacttagttgggaaaatcattttgttaagggaggcttgggttggcttaaactggaagagagaaatttgttttgtgcgaaacgagcaaaggcagggtaggaaagggaaggaggcctgaggtcaagatggataaagagagctcaggaggaatgcgaggataaggcagaaaaactcagacagggatgctagtagtgatgacagtgaagattggcagatttgagttttgtttccaagaaagaagcaggactaggggtgtctgttttggtgagttgttcagccttctgtccatagccttcaagagtattgccatttcttgtaacattaaatatactgtataatcatagaaatgcctgtcttgttacagtggttctgaaatttgggtgaattacctgagggacttaaaataggaaaaaagaatcctgggcctcacctagtataggttcaggtagtgagtataggagcagaagaggatcctggatattgtaatccaatcctctcattttacaagtgaagacatttatgcagacaattatatgcagaactgggattagattccaagtcttcatatcctcagcgcagtgctctggygattacattgtgcttcctgaaattgacatttgggttttctttgactatgattcccagtgaggtaaaagggccgtttaccaactttgatcacatcttcagaagtagctacaattaaccagctttgcccttctcttttgtatgaactccagggctctttgttatgatgccatttaatggtctctraacttttcagtgttttcaaatatgaggatactgccctaataaggatgyggtgggacatttttttgtttgtgtttacatgtaataatttattatttaaaaattaggaaaaaaatatacagaaaggatgaaaacaaacattcataatcactcccaagagataattgttgacagtttttttttwtataatttaatgtttatacctatgcatatccttattttctttcttaagatcggcatagctaggccaaaggatatgcacattttgtgggttttgataaatattgccaaattgtgttccagaaattgtctatcttttgttctttcttccttccttccttcttttctctctctctctcttctttttttttttcaagaccctctgtcacccaggctggagtgagaggcgtgatcttggctcactgcaacctctgcctcctgggttcaagcgattctcttgcctcagcctcccaagtagctgagattacagatgcgtgccaycgtgtcttgctaatttttgtatttagtagagaaggggtttcaccctgttgcccaggctggtcttgaattcctgacctcaggtgatccacccgcctcagcctcccaaagtgttgggattacaggcatgagccactgcacccagcccatctgttgtttctcatctgcagaattttcttgggctcccatgtgatgtgtaattattttagattattttagaaatagatgatgtagtatatctaagatatattttagatattttattaatgatgacaaattgttacagctgtattcatgctttattttatttaaaaaaaattttttttttttgagatggagtcttgctttgtcgcccaggctggagtgcagtggcacaatctcggctcaccgcaacctctgcctcccgggttcaagtgattctcccacctcagcttcctgagtagctgggactataggcatgcaccaccatgcccagctgatttttgtatttttagtagagacagggttttactatgttggccgtggctggtcttgaactcctgagctcaagtgatccacctgtcttggcctcccaaagtgctgggattaaaggtgtgaagccacttcacctagcctattaatgcttttaaataaattcatgttttacttatcaagatagcacgccatacatttgcaaattaatggcacataagtgaatgttggagacatttattcaagctgcagctgttttttttttttaaacaaaaatgaacatttttccttgttagtacaaaagcaatacatgttcattgtgttccatttttcacaaacacagtagtactccagtcttttagcctagatttggtaaatttttggcatttattgttgtcagtcctgttttctgttaaatgttaaaacatggggctgagagaggctgtgaggttgtggctgaatccctgcatagaaacaatcagaacaattagaaaaaccgaacactygtgaataatacatacaacaaaaccagatgagacttcagtttttgtctgcgatggagtaactggtaccatatttgctttcccaccataaacaattacaaatctggacaagatatattaaaaaactgcttccagacatcggacaataggcagtacaggagctgagcgaaaggaaatgagctgtgtaattcctcctgctttttcctgtagacactctctgcaccgtgttttaggaagggaacacccgtgcagagcatcttggtcttgctgagtcgaggagactggacttggggaaggtttatctggctggaatttgcaggtgggattgacagagagagggagctaggcagagaaataaacaccagaaacttatggggggggtctctgcaggagatctaacaaagaatgaccagagagctttaaactgaagaattgccagagcttatggtgctgggaggcatttgaattctgaccagatatgggagagagaacttattgaatacctgggacattcaatagaatccccaaaaggttagaccttagtatcagagactaagttagccctagagtaaggccttagatctatcctaacaatgtttgaaaacaagccttgggtggatcaagctgatcctcccctaacttacctgcccaccacaacaaagtacaacactcttaaaaggaagacagcaaagtccagtgatacacagtgcagcatttttacaaatatgctcagtgttttaacagaaaacatgaacataatgaggaaagaaatggaagatattttaaaaatggaacttaaagcagaaaaatacataagaagtgaaatattcactggtgagaagaataacagattagatactccaaagaaaaggtcagcaaactacaagatacagcaagagactgtgttagtcttatttgttgccataaaggaatctgtgagactgggtaatttataaagaaaagaggtttttttggcttacagttctgtaggctgtgcaagcatggcatccggatctcagcttctcatgaggcttcaggaagctcttgagtcatggcagaggggaaggggagcaggagtgtcacatggtgagagaaggagcaagagtcagggggaaggtaacagtcagatctcatgataacttcttactatggggagggcattctctttttaacaatcagatttcaaggtaacgttactacagggagggcaccaagccgtttatgagggatctgccccatgacccagacacctcccaccaggccccagctccaacattggggtttattcaacatgagatctggggaggacagacatccaaactatatcactatccaaagtaaaacacagtgagaaaaacaactgagaaaaatgaatgaaagctcagtgacctgtggagcagyatcaagtggtttaacatacatgtgatcttgtttcaaaagaaggaagtgaaggcaaaaaaaattgaggaaaaataatggctgaaaacatttcaaatttgatgaaaactatgaatggatccaagaaactcaacaaactcgaagcagagtaaatacttgtgaccttgggataggcaggtttttcacatgctacagaaagcatatattgtaaaaaaaaacaaaaaacaaaaaacaaaaaaaacccaaaaactgataaatcggacattggcagaattgcaaacttcttttcaaaagcatcattaagtcaagccacagaatgagagaaaatatgtaaatatgtatatatatttcacaaggaaattgtgtcaagatcatataaaaattttgtgcaactcaataagtgaatccagttttttaaaaactgggcaaaagacttgaatagaaaatatacaaatggcaaataacatgaagagctcctgaacttcattagtccgcatggaaatgcatcatggaaatgcaacataaccctgcaacccactggaatggctaaaaatgaaaaggccaagaacactaagtgttggtggagcatctggaggctgaatactttgctaataggagtataaaatgttatatatctgctttggaaaacagtttgtcagtctcccctctcctcccctccccttcctttttttctttttctttttcttttctttctttcctcactctgctgtccaggctggagtgcagtggcatggctcactgcaacctccaccttttgggttcaagcaattcttgtgcctcagcctcatatgtagctgggattacaggcctgcaccaccgcacctggctaatttttgtaattttagtagagacagggtttcagcatgttggctagactggtttcgaactcctggcctcaagtgatccacctgcctcagcctcccaaagtgttgggattacaggtgtgagccaccacacctggccaatttcttataaaggtaaatatacattgatcattcaacttagaaattctacttttagaattttttatccaagagaaaaatatatcttcacaaaaagctttgtagaggaatgttcatagaatctctattcttagtggtcccaaaccagtagtaacaatccaaatgttcatcaactggtgaatgtatgaacagactatagtagatgtatgtggtagaatactaagtaataaaacagattgaactactaatacatacaacacggacagatatcaaagacttgctgagcaaaagccaggtacaaaagagtatctaatgcatgcttccatttacaaggaaattctagatcaggcaaaactaatctatartaacagaaagcagaccaacatttgcccagggctggcagtgagatagggattgactggactgagtgtgagggaaggtttggggatgatrgaagtgtccttaatcttggttttgacagtgctcacacaggtgtatacatttgtcaaaaactcatcaaactcttacaatgggtgcatttaattctatataaattatattttaataaagttgattttatagaaaaaacgggaagtgagggaagctaaccaactataatccaggtgcttgatgttatctcatttaatcctcacagtaatttttattgaagaatattcagcaaatatcttctgagattctaccatgctggtctctgtgccaggtactgaggataaagtggtgagcaaaaactatcatgatttccacttaccgtcctgggcagtttatttgaaagacagatactagtaaaaagtgctcccccacccccagagaaatactacaaagaaggttctatgagagcatataatacattcatccttarcatataatatatgctgtcatatgatatataatgagacacatactacataatataccttgtataatatataagatgctttatgtgccctggtttctttgtaactactacccctctaatggggtttctctaactactaagtgagttaatacacgtgaagtgttttgacttgtgctagtagataggaagtgcccagtaagtgttggctgctatgaacatttgacagttctaattgtctaatactgcaggggtacacctatactaactcagggaacagtggagtaggactacatattggggaagagatgataagtttgactagaagtgttgggttttagctgcttttgagacattcaggtggaaaatgtcttgtagtcagatgtggatactggttgagtacaactctagatgctgcagagggccctgggctggagacatacatttcagaaagtgtccagcatctagactagaattgcctcaactgtagagatcatcatcaagaaaggtgctatacacacacattcacacacacgcagaaagagaagaaggacatagacctggatctgagccttgagaaactacgatttaatcagggtgcctttttgatcatcatctcctctgtttagcatatgattttgctacatttaggcctgacttccttcgtattcaagataaaataaagggaaataattacgagtaaaaacaagcagtggagaaggtggtgtcaggttcttggcaagttgataacaaatggccactaattttgacaatttgtttccttgcagctgagagaaaaagggaaatatgtttagcaatatggattccattttccgatgaataaagacatacataytcatctgcaaagataaattttgtttgaaactaaacttaaattgttcttaaatttcaaggataatttttttttttttttttgagatgaagtcttggtctgtcacccaggctagggtgcagtrgctccatcttggctcactgcaacctttgcctccagggttcaagtgattctcttgcctcagcctcccgagtagctgggattacaggcgcatgccaccatgcctggctaatttttttgtatttttagtaaagacatggttttgtcatgttgggcaggcaggtcttgaactcttgatctcaggtgatctgcctgcctcagcctcccaaagtgctgggattacaggtgtgagccactgtgcctggcctcaaggagaaatttttttacctgacttgtgtaagtgacaagttgagagcggtcatagtttaaaaatggaaaaaacagattttgcaaaatacttatgatgttaactgtcataggaagttgttacattcctccttaggtacttaagtagcttgtctttcctgttaggctctttacttagagttagtttgctttgacgaggggtagaagaactgaggccatggctttgcctgaagtacagataggttctttatcaaaccctcttttttatatttttgactttattcacccttgacataaaagacaaaggcttacttaggaacctgcaactctaccaatttttaatttttactgtaaaataagggttttctggaagactaaaaaacacttttaaaaaacatgattttttttgcgtttatctctaaatcagacgttttgattggttccatcattgttgtatttgaatttgaattttatttattaattcaacaggcatttattaagtccctgctrttgccaggaatttagtgtattctggctctcagggtttcacagagaagaagatatgattctagctcttcaggatttctcagtaaggtggagaggaaaatatgttataaaaatgagggagaatacgatgagtgsgtagtaggggcatttataaagtataagtaagcaaaggatatttctcatctgggatacgggggagagtcttgggaggtaggatggggtggggcagcagctaatacaatcatccgcaggaagggcggccgcatggaaaggggaaggtctaggtacattattttattcatactttccaacagctgggtgaaaagatgtgtcgtgttcccactttacagatgaggaaactagtaagggggtagagtcagagttttaactgttgcaggactccaaagtttgtgttccttcctccatgatctggcaggtccatcgaatctctagtatctgatctctagtctcaaagtatactttgaatctcgaattttgtgtgtgtgtcctttcgtttggaggaatcgttgttccttctagaaggtaggatagttttggatgctgggtgatgctactttagaaattgtgatgatcctggacgaagggaacaaggaaaggaagcttggatccctttatcagaattcactggaccaacagggtgccctgagcctggaaccaaacagggtgaaggtgttgaagcttacatgtggatttctcttcaaataggagagcccaggtgcaccagagcacagaacatcttttctcctagtgtgacacaatagagagaacatggtctttagagtcaaacacaactaaatttgaaccccatctgccagtcgtgcagccttgggtaaactactaacctctctgtgtattactgcctatctcatgggttgtagtgagaatggaataaaatgatgtatgagaagtgaaaagcacaacatcagacttagaaggcaccttttccttcctttcctcctcatcttccaacacctaggctctagggaggtctcagttaaaagctagaattatgagcacagtggctcacacttgtaatctcaacactttgggaggctaaggcaggaggattgcttgaggctgggagtttgagaccaacctgaacaacatatcaagactccatctctacaaaaaataaattttttaaaagctaaattagagaacttctatcatatttttagactgtagttttgatcagaatttatcatgacattatttcctttgatcctaataaaagctcagtgaagtagatagggcaggtattatttatagatgagaaatggggtcctctttcctattccttgaaatcctttggaagcctgttagaagaaaagattttctggaactctaagtagtatgatagtgwcatctactgtaatagcttgtattattacaatctttgaggaagctgcagtttagataatttagcacaatcatcaggaagaatttaacagttgattttattacctgccattttggggggagaggaggtataaaaatgtatcctttgatatactaacagaaaaccacttgcataaaattattataataaaatctcaatttttccagaaaccacgatcgcttagatctggattacaaaaagaggtttaaagatgctattagattttctaataactgaaaatgttaaagttcgagacagtttgtgctaaaaaagctagattcgctaagtgcgagagtattaactggaagcaaccggcgataggtggtgatgtgatccaggtgttgtgaagaacagagacaggatgacaagaagrcaggatataggtccacgagatttcagcagggatttatttttaaaagcaacttcttgagataggttctggagttagtacaggtgtagcctgaactcccacacttgcaacattatgcagttagattgttggacatattgacccccgaaatacttttttaaatttattttttaaaaataaaaataattaaaaaaaaagagagacagggtctcgctatgttgaccaggctgatcttgaactccagagctcaagtgatcctcctgcctcaggatccaaaaatacttttaaaataaatcccaaactctaaaagcattgtctgcaatgtattatacttggtcataagaagatataaacaaactagtaagcatttctactaggtgtaaaacaaaaaggttgtactttgaggattaatttggtatctagattattctctgaatatccattttaaagttcactaaaattttatttttaataaatttgccatgcaatgttatgttttaacttgtaaattaaatacattctcataaaaattttaaaaatatttagttttgaagtatttcagatatacagaaaaatgttaaatattgccaattatgtcatccatgcagatttagcaagtatgaatattttgctctatttgcctgattttttaaatgaaatcttacctacaaaactaaagctcctttctcctatgcatattttagtattttctgtaagtatatataactctgaacactatatactattatgtgtttttcagttgtggaaatagaaactcttactctgctggcaggaacttaagttggtaggggctttggagaacaatttggcaatacccaaaagagttggcagtggtctgtgtcagttgtctcatgctgcacaacaaactaccccaaacttagtggcttaaaacagtgatttcttatttctcctaattctgtgagttgctggggtagtccctctgcttgttttgcctggactcattgatgcagccgcattcagctgggagattggctgggctggagggctcaaaatggcctcagtcacatgtctggtggttcatgctggttgttggttctctacatgtggccttatcacttgcaatagacttccttatgtggtagtctgagggcagtggtccaagacgcaaggcctcttgaggtctgagccctgaactcgcatagtgtggcttccatgcgttttgttggtcaaaccaagtcacaaggccagctccaccttttgatggaaggagtggcaaagtcacactgcataggagcatggaaagacatctcgcctccatctttgaagacatatcctgtaattcagctattttacttttatctatcccagaaaaaatctttcacagatagagagatatgtacacattgttcacagcagaattgtttataatagcaaaaaagtaaaaacaatttaagtcattccaggaagaagcagataataaattttagtttattcatataatggaataccatatatcaattaaaattaatgatcactggataattctaaaaataggttgaatgaaaaaatcagattggaaaagaatatgatagtataatagccttaaagttcaatatttgaagtttcttgggtaggctaatgaagattttgcttttgcttctgttttgaaatcaaaacttatctttggatggcctcattagagcatggtgcttatgagtagcttccatccttggatggccagttaagctgtgctgttctctgaccagacgggctgtcactaaaaagcttgtgtttagcttgttggccatttgggaaagtgtagctctttcatttgagaaggtgtaggtagagctgataaaggtttaacttcatcagtaatgttagaaaagtccatatacagtacagtttcttttttaaaattttttttctagaatatagtttcttaacattcatttaataccactgtctgcatctgtaccaggtttaacctgcatttcttatctgtaaatgggaagcatgatatttacctcgtagaggtgttgggaagatgaattgagataataatgcatttaaagcagtaccttttatatggtagatcctctataaacagtagttagaaaaattaacaagtatataggatggcatctatgttaagttcactttcaatggtattgtagtgagwaggtagcattgattacctactcataggtactttaagtaggtactttaattaaattttaggactactgtaattatgaaagtccattattaactataatactttacattttaaaggaaatttacatttataaactcttttcacattaattatctgattttgttctcaggacaactttgtaagatagttatattcaatttagagacattgaatattagtttcaggagaggttaaataagcagtgttagcagaaagcttatgttggttctcatgaaggcagattaaaatggaaataatgataccataatactttgatttttatcatttgtgtttatgtgctttacctacctagattctraatagatttgtctctgtacttttttcccccttctgtgtgtgtgggaaggggaaggaggaggaggaggaaaagagattatagaagagggttaggtgaatcttartgggactctttggaaagggagaactgcagcctgcctctcagatccaaaaatgttatattaacgccaccctctcagctccctatattttaaaatagccaagcagattggcaagattttttttttttcagatttgtaaatgttcgatggcaactaagtctatgcatcaaagatttgaggagatttctctaggttgactatggattagaattaaccaccaaatttactagccatgtaggatttgctaagccaatgtgasaaatttatttggtgacttctgtttataaatgcattgattcaattaaattctttctccaagataaaagttatgctttttttttctttttttaaatttcctattttggttgtatgctttaaaagtttgagataggttgggtgtggtggatcacttgaggccaggagttcaagaccagcctggctaacatggcaaaaacctgtctctactaaaaatacaaaaattagctgggtgtgatggtgcatggctgtaatcccagctactcaggaggctgaggcacaaaaatcgcttgaacctgggaggcggaggttgcagtgagctgagattatgccactgtactccagcctgggcgacagagtgagacactgtctcaaaaaaaaaaaaaagtttaagataaacctataaatttgtaactctccagctttgttggttgaaggaaactattggtggctggtattttgggtaatctcacttcttggctaactcccgttaaggatgttttataatgaaaaaaagtaggtacttcacatattaggtttttatcacctcactttcctagtatcataaataaatcgttttttcaccatttgtgtagatttatttcgaggtaggtaaatttcactttgcttgagatcctatgccaacattagattagttttgaaacaggttatatgttataacttctcctatgattctgaaacactttagaaacaaatgattttaaatgtgattttttttatttgttttacatttcagaatctctcttgatttttgaggaaatacctagtaacaaacatgactgagttctggcttatatctgctcctggggagaaaacctgtcagcaaacatgggagaaattgcatgcggcaacttcaaagaacaataatcttgctgtcacttccaagttcaatattcctgacttaaaggtgaagctgcactgtgcaaaattatatatgagttcatcatccaggggagggccagttctctcttttagtggaaatgagatacccagkttccttccaaagaaaacctcctctccagccattggcatgatttaaaatgtgtcttctttgaaattttagaagtaaactaccaaattgaaataatgtctctctacttaggctttttgtgctcttctaaattgcaatgaaaaatcttatgaaaatgtttgatgtgttacattcacaaatatgattttcagaaattaaaactcttagtaatatatattcttaaatatcatagtgaagtttttgttagtamatttatattatgctgattcttacattgtaaatgtgttaccatggcacctacttaatcacacttggcaaatctaacccagttatttaatccggttaatctatgtaagattcactcttatcaaagatcagtcatctagcagcctcaaagtaaagcaggtgtccagtaatcagttgatggaacatttgtaaagaatggaaaagatcatgatactgacattttgctggttaactgaatgagggagtcgtaggcagcattcatttaagaaatatttaaaatgactgattcttggtggggcatcatggctcacacctgtaaacctagcactttgggaggctgaggtgggcggatcacttgaggtcaggagtttgagaccagcatggccaacatggtgaaacccagtctctactaaaaatacaaaaattagccaggcatgttggtgggcacctgtaatcccagctacttgggaggctgaggcaagagaatcgcttgaatctaggaggtggaggttgcagtgagccaagatcataccactgcactccagcctgggagacagagtgagactccgtctcaaaaatataaataataaatgcaataaaatgaccgatttttaatatttttggagttacggatacctttgagacaagatgtttcctccaaaacgtactcacttatgcacagttttgcatgcaaatttaattacagaccctctagcgcacatccgtggacctcctrcttaagagcctgtgttgtaaactaagacttcaaatgatccagtgtcattgaatagtacaagcacagacctgtctttgaggagtcttcaagtcttaagtggtgcttataaccatgaattaaaggattatcttgtacatataaatagctttgaaatgtctggcaaacatcttttaactgtacttacacattatgaaataaaatagggagaatttaagatttgtgagaactttaggtcaagatgaatcatcttgttttttttttttwaaaaagcatgccacctaaataacaatatattttccttttaggttggcacgttggatgtcttggttggcttgtcagaygaactggctaaactggatgcatttgtagaagggtaatgtacttatatgcatggagtagagcaaaatgggagacactattatcaggcttcatggacactgggtttattatcacatgtatactctgcttattggaatggttttagaaaacgacttttttcccttcgtatatcaattttatgaaggtacaatttacataaaatgcacctgtttgaaatatgaaaatgctgattctctttttactatctttaatgggatatagtttacatgccatgcatttcacctatttcaggtgtacaattcagtgattcttagtgtattcagacttgtgtaaccattgccacaatcagttttaaatatttcatcatcctctattcctgttcccattagcagtcacttaccgtccccaccacccacaaattgttctgccactatagatttgcttggtctggacatttcttgtaaatggaatacaatacgtggtcttttgtgactgtcttcttttgcttagcataatgttttgaagtttatcccagcagttgcatgtatcagtatttcatttctttttattactaatattccactatatatgtatacatatatatcacattaatccgttcatcagttgatgggcgtttattttgtttccactttttggcttataagaataatgctgctgtgcatatttgtgtagaagtttgtgttcttaaatgttttcatttttcttgggtatgtacctaagagtggaatttctgggtcatatggtaactctatgctttgctttttgaggaactgacaaactgtttcccagagtggctgtaccgtgtaatattcccgccggcagtgtatgaagattctcatttctctacatccttgccagcacttgttattatttttattatttgtctttttgattatagccatcccagggggtatgagataatatctttgttttttttgttttttttgagacggagtctcgctctgtcgcccaggctggagtgcagtggcatgatctcgtctcactgcaacctccacctcctgggttcaagcaattctcctccctcagcctcctgagtagctgggattacagkcacccrccaccacgcccagctaatttttttttttttttgtatttttagtagagayggggtttcaccatgttggtcaggctgatctcaaacccctgacctcgtgatccacccaccttggcctcccaaagtgctgggattayaggcgtgagccaccgcgcccggctgataatatctcatttttaaaaatttgtgtttccctgttggctgatgtgatgtgatgtgttgagtatcttttcatgtgtttttttgccatttgtttttcttccttggagaaatgtctattcagatcctttgcccatttttaattggctagcctttttattattgaattgtagaagttctttatacagaatatgcaagagataaatcccctatcagatataacttgcaaatattttctcctgttctgtgagttgtcttcattttctttttttcttcttgagacagagtctygctctgttgcccaggctggaatgcagtggccagatgttggctcactgcagcctccgcctcctgggttcaaatgattctcctgcctcagcctcccgagtagctgagattacaggtccctgccacaatgcgcagctagtttttgtatttttaatagagatggggtttcaccatgttggacaggctggtctcgaactcctgacatgatgcgcgtgcctcagcctcccaaagtgctgggattacaggcgtgagccaccgcgcctggccatgtcttcgttttcttgattgtatctgtgaagcacaaaagttttaaattttgatgaagtccaatttatttttttcttttgttgcttgtgtttttggcatcatatctaagacaccattgtctaatccagggttgtaatgttttatgtctatgttttcttctaagagatttatagttttagctttcacagtgaggtctttgattcattttgagttaagttttatgtatgttgtgaggtaagggtccaacttgattcttttggatgtgaatatctggttgtcccagcaccatttgttgaaaagactgttttttcccctttgaattgtcctggcacccttactgaaaatcaattgaacataaatatgagggtttatttctggactctcagttctgtttcactgatctatgtttctctcctatgccagtaccacattgtcttgattattgtaactttgtagtaagttttaaaatcagaaagtgtgaattctccaactttttttttttttttttcaagattggccattctgggttctttgtctttttgtatgaattttaggatcacagtgtcaaatttctgcaaataagtcagctggaattttgatgaggatagtgttgaatctatgtatcagttggggagtagtatcatcctaatattmttgtctttatccatgaacatcggatgttactccatttatttgaagatggttatgcttttgtcttcaaaattcagttggaagagttyttctaaattgcagtttttattacttttgaaattcaggtacatgtgtatttgagctgaaaatggttataggctctttgataactgcattttgattagttggcagaatcagtctacagttccttcaactctggggatacaaagattttattttagagtttagatacacaggtgtaatttgtaaagtacagaatttggagactctcagaaatgtacatttgattgaagctttaagggaataataggcttggatagaagggaattttttcttgaaatctatccagaagattttctcatttctgctgttaaaatgcttttctgaattgatagaaccacctgaaagcgatgctgtggcaatagagactgaggtcagggttacagagagagagagagatcttttaatataacaccatgtagtgaggaagtaaacagatctaaggatgtattgatgttctttaatattggagtcaagaaggccacttagcagtttcacagtaggttagttaagagatagtaaaagctcagttgggaccagacacttggctcttagaatggaaagagaagatgaaaggaaaagcaacttttaggattataattccatatattcatatagagcaaattattattatgaattattataaatatagtgaaaataattatgatgcactcaaagcactaactgatggaaagaatagtctcttggttccttgcttatacatttttaattaagaaaaaaatgggccgggcatggtggctcacgcctgtaatcccagcactttgggaggccaaggtgrgcggatcatgaggtcaggaaattgagaccatcctggctaacacgatgaaaccccgtctctactaaaaatacaaaaaattatccaggtgtggtggcgggcgcctgtagtcccagctactcgggaggctgaggcaggagaatggtgtgaactcgggaggcggagcttgcagtgagctgaggtagcgccactgcactccagcctgggtgacagagcgtgactccgtttcaaaaaaaaaagaaaagaaaaaaatgtaagggaacttttttttttagttgtcatccctggagtgagtcttccctgaggtctcatctacctcattacagttacaagttatgacaaccaaagagacactgagaaaggaggtccctgagaatataattattaacatttatttatacccttattagtcaccttgatggctttatagttctttatctttaaattgttaatgggatgtcctgaatataatttaaagtttgctcagattttaaattttatttatttttttttcagagacagggtcttggtgtcacccaggctagagtgcagtggtgcaatcatagctcattgcatcctggaactcctgggctcaagcagtccttttacctcagtttcctgagtagctaggactataggcttgcaccaccacacccagctaatttttttatttttatttttgtggacatggagtcttgctatgttgcccaggctggtctcaaactcttggcctcaagcgatcctcccacctcagcctcccaaaatgctgagatttcaggcatgagtcactgtgcctagccagctcagattttttagggaaggaatctgaaaagtattaaggacaaatgtagttagtttggtgagtagaatttaaagttacctaggcagtgtgtcagctgttcttttcttcattgttcggcaagcacatcttcttcagtcctcctgaatgataagaggaatttaaaaatcatgtcgttgttagactttggtagtattgacagatgatagcttaatgacttaaatgctccaagtgttaaaggccaaatattgtagaatatggtatatgtggtaaatcatagtttgtactttcttaaaaatgtaatcattagagcagatatttttgaggtgacattgtgtacattgacacagatcctcttgtaaataggcatacggagatcttgaagttctgggttatgcaacattacgtttataaatttgacaccaggtgattctacactctgaagtacttctatgggtaaacatgcaacattttagaatgttcrtagcaaatggttctgtttacaagatgcttgccaaattttatgagaatgatttgtcccttttgaaggaatgggtgaattttggagacataggcaagtatatgtataaacctcaagttaaacatgttgaagatttaggacttacatcattatttctgaaattgttctgatttttaggtttgagaccactcagcataggattgtcatttaaatttagctcttctgtcacctttcctggctcatattggctcttgtttaaactgttaacaagccaggyttgtggctcacacctgtaatccctcctgcttgaggggccaaggcaagaggatcgcttgagcccagatgttcaaagctgcaatgcactgtgattgcaccactgcattccaacatgggcagtagagtgagactctctcttaaaaaaaaaaaaaaatgcgcgcacacacacacacacacacacacacacacacacattttttttttaaggaaaaaaaaccattacaggaatttcttaatttgtcttccagtttcccctcctagctgttgagcatgtagtcatcagaatacttgtcctgagccctgtttcgactgtgttatgtccctgtctagagtgtggcttcagaggctgtgtatctgcaatctggcatcccactttcctagcctaagctcccctacttctcggcctgctgcttccatcagtctggacttctcaccattctctggatgcctactgcttttccacctcttatcatgactcataatatgccccatggcaacgatatgctttcttcccatgtaatcatccttgtaaaaccatttctgtccttcatcgccctactcatgagcctttgggctttcttgattgggtagctgctagtgatccctttttcctttctctctctctgtctgcaacctggcaatctcagctggcactgacctcagattgctttgtatttagtaatttatatatttttggatctttmcaatgagattttaagcaatgtgtgaaggtagtgattttgtcttgtatgattttgaatyccacccagggcctagaggcagacatggaataaggaagagaacgctggactccaaagtcaggacaacatgtttctagtcacagctctgccgttaactggtcttgtgactttgaataagccacttattcttttatacctcagtgtcttataaatgaaagaactgacaaggtcatatgtaggtgacttggtttaggttggtgcaaaagtaatggagtttttgccatttttttcccccctaaagtaatggccagaaccacagttacttttgcaccaacctaatagttttggcattatggcttcctctatagcatagctccttgtaaatagtagatgctyaataaacagttaatgaattaataatgtaggacttagtttttcatcatgactattgcttacgttctcttgcctgtcaggtccctttcttcctaagggaaagcacagtgtcttgcatgtcataggaacatagtgaatgctagttctcagcctcctcctttgttctcagtccttaaattgtctagtttcttggcatataaatatatggctatttacagactctttctcactagcttcccatgacttactttctagactaggagacacattgcatgtagtctccttaaaaccctacagttactctgttgatttttgcatgtaacaaagtcttggtccattttatccttaaaacattataaggtaagatccatttattgtgtattatatggatagrtataatgggaacatatagtcaaattcatgtctttatgtaatatgttcattgtatagaatggaatttagatctttttcctgagaatggttgttgatattttttcttccccagagtggttaagaaagtagctcaatacatggctgatgtattggaagatagcaaagacaaagttcaagagaatctgttggctaatggaggtaagctaatsctcatgattgatcattattaactcatacaaagcaaataactaagctacagaaacaaaaagtaatgtaaaaaagtctacagaaaaggacactaaatacaatagaaagccattaaaatacaattattattactgaatttggtgatacttccaggtacatcctgttccctgaaacataatctcatagaagacagtcttacataatatgtaatatagcttataatatgatgccaagtctcctgcaagagcagtattgtaaaggtttgtcttagttctttccaggttctatttattcactcatttacaagtaagtttccaagttgtatatctcagcattgttccagttgaatacctgctgtcttatgtaggtttttgtatttaatagtatgtaactgttaaagctttagaacagaaattattaattttattgcagaatagtgccccctcagtatgattttggcatttctttacttaatacccgtaaaatagcctactgacttctctgtagctagaagccagtatttacatagagtttgctctatgtagtaatgactttagaaagatgattctgaccccattgttgtcatttgtacttgcatttcttgttttcttatgaaatgtcattttagcattttgcttcatttaaaatcagcccatctctagtgatacgtttttataacaggaaataatgagctgggcatggtggctcatgcctgtaatcccagcacattgggaggctgtggcaggaggatctcttgagtgyaggagttcaagacaagcctggacaacayagggagaccctgtctctaaaaaacccaaacaaaaataaagaaaaagaaaaaagttacctggaagtagtggcatatgcctgtagtctcagctagtcaggaggctgaggaggggggattgcttgagcccaggagttcaaggctgcagtgagctacgattgtaccactgtactctagtctgggtgacagagcaagaccctgtctcaaaaaaaaaaggaagaaggatataaccctttataaccttttcctttcattctctacaggatcacctactctaataaggttactatattttaaatccagtgttcctgaaatctcatttcttcttgcaaataatagctgctcaataaatttttaatcagttaaaaatgtagtaacttattcttgctctttgttatcaagtaattctgatctcattgtttgctgtgtctgttaatttgtgttttgagaaacaacgaaggtatgttagatattaataagttaatttgtgttgcctttactgatcttctacgtattttatgaactagggcagtcagtctagtaggtggaatggtggttgaccaagaggggcagtgcatctagatagagttgcttttggaaataccatccgtgttgttgactgactggtattatgtaaggagatattgagaagagaaagatatttttatatgaattacttccgtcagttggcgctgccataattaccatttggtttcaccgttcttgatccctttaggggtgaagtcactttgaytactaaacttccaaggaataagttgttgagtatttttttagctctacatgttttattctttccatttgaaagtgaaagggtccatgttttgaaaattgttaaaatgtggactcctggaaacaatcatcacatggttttaacagacaagtttattttcagtttgtttgggtaagttatcaaagaaagaacatacttttatgaaattctacttattgaggagataatttgaagtagtttcttaatctttatgtctcctacatatgaggcatattaggaatatgtacatatttcatttttaaagtaatcaaattagaaggagcatcttaatatgtattaaagtttgagtaaggagaagagattacaaggtagaaattttgattaatccatgttacttaatatagttcacatttaatcaggattcttcagaaatgacatctttgctgatttcctcaatgccaatttcagcattaaaatatatcgctgtgtaaaaaactgaacaattctattgtttttcttcagtaattaatttattcccttatttcagtggacttggttacttatataacaaggttccagtgggacatggccaaatatccaatcaagcagtccctgaaaaatatttctgaaataattgccaaggtaagataatacttgagacaagtaggacacattgatttgtagtggctttgcttattttataatttcactatgaaatactttttaggttttgataaggcaacttaattatatttcacagaagaaatccttacaacttagacattaaaagatgttaaaaagtataacactttaatgtgtagattatctaagttgaatacttagttatgtaattaacttaaatattacatcaacagtgtttaagaaagtgtgaaaattctgtatttatacaaattttaagggtacccaagattgtgtagaataggaaattggagtctattaagatttcttagtcattcaggtaggtgatagtagtcactgaagtatgtttatgtgcatacaatacttgttcaaacattaaactctatggattctctgaccccttcggactatttagttttgatcctctgcctggaaaaattcccgtattcgtgtgccacataattttatgtagtttcagggagtacatggaccttgaagccgatgcatgaacccaccaagttaagagctccttttatattgagaaatccttgaacttgaaaggaaatcctagaacttgagaggaaaaaaaagtctttttccccccaagatctgtttgtggaataaaagtcttaacagtaactataatgagacaaatagacaaggacctgttaattgtttgccagcatttgacctggctggggcaagaagtgtagtttaaattattggacagactttccttggctcccagtaactttagttatgcggtgtgctgtayagttaaatgtaaataaatagactatcaaagattttaactaaagtcrtcatgtaatttgatgactatagtttaagaaactattatttacattacttgataatataaagtggtgttcttactatgactgagcctttttttctgtatccttaaggatttgatcatctgcttcctgatgctgttgtagataggaaagcaggcttagagaggtgaagtgacttaccctcgtgctacacagctaataatgctagagctatgttaaagtcagttcttcgaatgttgtttacttcacattttctccccatgtagttagtttagtattcttctgagaaaaacagcttttgtaacatttatgaataaattcaactataattttaatttcatagaaaaatactctgtgtaatagtgatgtttgcagtagtcaaaactcttcatgtaatttagtttactttggaaaatatccttcagtcttgtgaattgaagccttgtaaatagtaatctccaaacccagtggcctagattccatttccatggtttaagaagtaatataattaaaatacatgtggactaaaacattatttttagttgaaaagatttatgtggaaattatatttaaaatgaagtyggctgttttttaaatgacctcctaaagtcgtgcttttaaaataatagaatattcttacactagaaactagtgggtttttttgtagaagttaaagtttagctactttgatagtattagtagaggcagatttaggaaaattttatctatttttcttctttttctttttcaaagggagtaactcagattgataatgacctgaaatctcgagcatctgcmtacaataacctgaaaggaaatcttcagaatttggaacgaaagaatgcgtaagcagatcaagtatatttgagtactaagaactggggaagcatactagcatgcaccgaaggagatattgttgggatttagttagtttcagtttatgttgttctgtaatcaaaatggtatttcttttacttcatggagaaaagctcactaaggtaagtttatagaattcagactagtccaaacagatgtgaggctgatttattatacttgttttataaataatacttgtgaactgggtcctggcttattcctttatccatttgatatttcactgaaaaatagtctaaaattaattgttttaaatgaaatcatagtttaactgcatagtaattacctatcacttaactatagaataatccttttatgatgtaatagttattctcttatctgttttcagaatttaggtttttcacttgttaggttttttaaaataggactgaatttttttggttgatccccttgtactatgactacttcaagtgcaactttaagcatgaaagtattcaagttgtgccttcatatcctagagggaaagttggttggatactgtgagtgatacaaacagggcaagacatatttattatgggaaagtgattactggaagacaaatgaggactgatttgaaagagttaattattgggttagctaccaaaattgcctagtatcaaatgatacccaagggagggaagaacactaaaggtattgtgcttagatgacatagtttcataattatatgatggaatagactttaattgatatctaatgagtagatagttttccagtcaagatattatatatgtaggcaagagaagagctgagttataataattaaagcaaacacaaaacactagaggcaaattttggtagaagatatttcgttggttgcaagggtaggatatattcagctaaatggtgacttcttacaaagtaaaaatgttgactaagactaatccctctcaatgtatatatagtatatgtgaaaatgattagcctgctgtttctttacttgtgttacagaagcacataattatcagcctaatgatttgttttaattcctcagaggaagtttgctaactagaagtctagcagaaattgtgaagaaggatgactttgttcttgattcagagtatctcgtcacattactggtagtagttcccaagtaagtctttctattataaaaggttttacttgttaaaatacaagaaaaatgttagtatctagtattgtagtttgaagttttccataaaatccaagcgtaaaaggaatataaccttgccattcattctgtcatcaacatttgctcatgtggcacataaagtagaaattagatcataacctggcaatggagacttcagttataaattgagtttccaaatcaaatttagcagcttggtagaattggctcattcaaacataagtaatgctaaattattgattgtttaaaaaatacagattttagatttctcaaaataggaaggtctttgcgtttttttcctgaaaaaatctttatgactggttaggtttaattaagcactgtaagaagcaaagaatggattagatcagagattagcaatttttttctataaagggctagatagtaagtattgtaggctttgtaaacaatgtgatctttgtcacaactactccactgtggcaactttgtggttatagctgaagtagccatagatgatatgtgaacgaatgaatgtggctgtttcaataaaactttatttacaaaacaggcttggctatgggcatagtttgctaacccctggactagataacctttgaaatctccttaggattaggccttctatgttatttaatatttgatcatagttaatcttaaatgaaatgaaacctttgggtacttgtaggaagacctggactttgtgtgtgtctgtgtagcactattaatggtttcacttttgacttacactgagtcttgctatcrgggaatgtttgggggatccaaactcaggtgggagatttgggtctttttcagagtatcattgtgtgaagacttccttgctgtgctctgcatttttatctggttcagagatttggagtactagaaaatgatgcctccatggaatttacrgtggctacagtagtatctcaattctgcatttttttcccctttattgcagtatgctrgaaaaaattttggatttttctttgcacagggagaaggccttaaatctaaggatttcactccagaaattttattttgtgttctagttacataactcccgtctgctacactgaaacactgattatttataacaaattctgtgtatctgtgcttttatactatgtaggaaaataacttttgcccagatgaaatatttgactcactcaacctttatttaaaacttgggttcaaaaccagaaatttttacagttttctgtaccttgtaattgaaacataggacctaggacatcttacatgatgaattattctctattctggcctatacacactataattctttgttttcaatctcaaacrtagttgtctctccccacacccctggaagccagtggcctctagagaaggttgttscacaatgttttgtggcaacatagtttactgtcacttcatttacttactacctcatggtactctgtgctttccataaatatagttttttttcagtccttcataatggccactgagcaggaatgatagtgattttagcatgaccatttttaaaaaatgaggcacaatacatatgaactatgcagcttgaaaacaatttagaatctatactgtgctttacttcctttccgaacatagttctaggatgtgcctcttttgcaatrgttactggaggtagggtggtgatctgtttttyctgcattactcagtgtatttgaaattcattctcagtaggaaacccgaattttttttgttaaatagagttgaagtatacttactatagccagatttcctatttgtctcataattttttctcttcctggatatggcaggaaataggacttgtttttcttttccaatgtgtattgtaccttttctgcaggttaaaccacaacgactggattaagcagtatgaaacactagccgaaatggtagttccaaggtctagcaagtaagtagaagtctttgtaaaaccatttgtttcctagaattccttttagagtttggatgttggcttaggaaatatgtttgctgtcttgcctttgtgataaattaacctcatgagtgagttctatgaactctagttgtaataattttagacctagaagggacttggcacagtctgtttgacaacctcctgtttatagacttagaagtttgaggccagtgaggtattaatagtttgcccaggatcacacatctcatttgtggcagggctagaactagaacctaggtctttggtgtggtactttttctgcctcactgtgctgccttttgaaaattctttattcattattgcatacctactatgtgtctataattcctcattttacttggcaaaggaagtgtaccagaatggctactggactgccgtgttgatctccagatgttcaccatcactttgagcttagattttacctaatttgtgtgttccttttatttaaaaaacaaacctgtttttattaagcactttttaaatttatagatttaacatgcattgtctaatttgaaatttacaacaagtctgtgaagaagtatggacagttatcattcttattctcawggaagaagaagttaaaatgcttaaatagttgcctgaggcatatggctgtgtaaagtgtccaatggcagagttagggctagaactcacatcttttagctccaggtcctgtacccttttaacactattccatgtcatttttctgtgttctgccattgccacaccagatattctttgagaaaatataaatacagtgtatctccaccccaaaggattcttatagatatatatgtgcttcaaggggaggcagcagggtggaagatataggaggcagtaaagaagtggaattagtaaggtcaggcccatgaaatattttcttttccagtttcattgtgtcatgtgggaagtagcttagtatgatggaaagagtcctggacycagggatctgagttctattgctggttctgtcaccagtagagtctgtcactggtagggtccgtcactggtagggttgtgacttcgagttgtccaggttcttggtgttttgaacaaaaaattggacaaaatgcccagcaaagcaaaataagaatgaagcaacaaaagaacgaaagcagggatttattaaaaatgaaagaaagtacactccacagtgtaggagcagacctgagcagtggctcaagggcctggatacagaatcttcttgggtccaaataactcctacaagtttcccattggccacttcatgctcacctcatgtaaatgacrtggtagcctgcagtgagcctcattggttgcagaaagcagccaaccagaggctgaagtgaagttacaaaggtcacactcctgtgcaaatatctgattggttgcagarggcaactaatcagaggctagggtgaagttacaaagttatacttctatgcgaatgaagactcggcctcccaatcagtctgatttrttgcagacagccaatttcccatctgccatgcaggaaaggtcaaaaggagtagcctctggtccttttgttacttaggcgtggaaagttagggttttcctttcaatttagttctaggaaaccggggtgaaacaaccttaggttccctgcctccagaccctatttcctgcctcagttctgctaccaacttgctgtgtgacctggggtaagtcttttaacttctctgggcctcattttctttgtctgtaaatggagcatagcaccttccttgtatatattatgaagttattttaagacttaatggagtattcaaaatacaagataatrttactgtattttcacaaatgttgatcttttaggaacttaacaacaaacttgtgctcatcatgaatgttttttttttcatttggaggaatatctttccttcataccagctcttcacatggtaaactgaagactacagttgtgtcttgatattgrtggctcacttaggctgttgatactgacagatctttagggcattagagccgtagaggttgactctgtgtctaggasgcaggtakaggaggagagtgaggacgtggtgcacmcagaatgtcctccagagatggacatacgccaacccagatgtccagggggatggtctgtaggctcattaagtaagctcagatttactctgatagaaagactttaaaaatattccatcagagatttagatctttggacagtcactttagtagtttaaagggcaaatttcaggaagggaacagtttaatgcagtcaagacttgtttgcaagtgacttgtaagtgcacactaatcttccgagagcttccagcctttccttgctcagtgaaaacatcttttctacctatttctcagttcaaagtacatttggaatcactgactcaaaaacttacctgtttaaatttagtcagagagaacatagcactagctcaaatagcaccatcaagagtatgtgcagttcatgtaggggcaaataggcttttttgagtgagcctggaatattgtctgccatttaggaaagatctctatgacctgatgctgaatttttggcttatcatcacaaccagcatttttgagtaattactgtgagctagtctttgttctatgtgctttacacaagttaattaattataggtagtaacacattactttttggtatgataacttgagtgattattgttgggagcagtgaagatgaaagtggaattttgaggtagattgaaaaatattcactttaatattcaatctaatatttttcaatctattcttctaactgtcctcaaacctgaaagaattttaaagttcacaaaatataactatttataaaatattctacaaagattggacggttttgaaatactaccattgctgtgaggctaaatgcagcaatgtgtataaatgccatgccaaggctgtggccaaagaagtggaggctgtgctgctgttctgcttttttttgttgaaacactgttcagaaagaggtgcttttcacttgtcctttcagaattaccactttcctattttttttttttttgtctgcttttgcttgttaaaatagtctgattgagtcagatcactggttaacttttgccttttctctgtcattggaagcaacatcacaaactcatggatgcttcacagaggtttttctttagggatctggagtccccagtgaagcagaggagcctagctaagaagtgcaggaagaatgatactggccactgtccagaagtttctctatgtttcagagtttctgagggagatggtctgttctcctgtcagtaccacttcaaccacacccatggctctagcctcacctgcagttttcggactgctaaatcttcgtctgtagccagccttccccccaaccacatacctggttcctactggaccactccatgtggtatttcctaggtaactgacactatcaccccaatctcagactcaaactctctagttgccctgtagtatatggcagcaacatctgcccagtgatccaaaccgcaagtgtggtagtcagtgattttggaatcttcctttgcccttgcacccccctccccccaccggccccccacctgaaatagtctaatcagttatgtcatttccaccttccatagtatttggttgaaccgttaaaaattgatgttttgtaggtcagaaaatggtcaaatatctacaatttcatagggttaaatctactctccccactcccccaagacccactgccactgctccagctctgactccctcatcccttgcctggaccatggtaattgaccctagctggtctccttttctcctctcatcagtcctccacattgctgctgttttcatctttgtgacatacaaatgtgttgctttcccgtctaaaaccctgcttgtccctccccattttgactgcctgcccccagcacmgcacacacacacacacacacccacacaccctcttcttgtaccctatgtcccagccatatatgtatatatatattgtttttctttctttctttttttttttttttgagacacagtctctctcacccaggctggagtgcagaggtgtgatcttggctcaccgcaacctctgcctcccgggttcaagtgagtctccttccccagcttcccaagtagctgggattacaggcatgtgccaccacactcagctgatttttgtatttttagtagaggtgaggtttcactatgtcggccagactggtctcgagctcctgacctctaagtgatctgcctaccttggcctcccaaagtgctgggattacaggcatgagctaccatgctgagccccggttatacttatttctggcaattcctcagatgcaccatgttattccacatctatattcatttgcatatggggttctgtctggaacgttcttctcttttttgtctttctttcaaacttccacctggtatcaccactttggtgaaactcctttgaatcccctcagataaagttactaattccccagtgtatcatgtatattttctattgcagcacttacaactctatattgcagttacttgtgtatgcctgtttcctttactaaacccatacctggagatcaggaaatgctgtcttagttttatactaatatctagcaagtgcttgcattacagagtctcagtacatgttaaatgactacaagtctgttatagtaaggactcgtggtttattttttaaacagttttaagaaatacctttccttaggggaargagggaaagcaagtggcttttatttgtttttcataataaggtggcatagtaggatttagttataagataagatggaggttttatcttggcttttttcaccatyaggattttgagtaagccataggaatttgctgtgtcccagatctctgcacaatagctaggaacctgcttaataggtaacctgttcattgacacagggccatgtcaagcaccaaatgcttttggaagggtcttcaaaacagcaaagtgttggataagtttaaaagattactatgataacagtaaaacattatttgtggccctgaaatagcctgtcaagttagatttggatttgttttgatctcaagcagttcacacatcactgagtaaatcttggcaaagcagaagatccttaaacggttttttaaatcgagctctgtccacttggtagctgcccttcattgggtttgatggacaccaggagcaagaattaagggtaatcattttgagaagatacagtttaacaggaggttctaaatccagagtacttgagttttctctgcatgtcagcgattacagtgatcagtactcctggaggtgtctgctggtcatacactagggaggtgcccctgctggctggctgacgaggagtagggtagattcagtacttaaagccattctgtgattaacactgtaattgcctcctgaatttacttggctaaacaggtggttcttaggcttcaggaaaaactacacttgctttaaacatttttttaatatagtatctttaaattccccagcattcctccattttgtaaaatttcctttttctgatttcagaagtaccacattgtaaaactgaacattaaaaaacaaagaaaacaaccaacaaaagggcacaaggacccttttggtagtgaggggtatgtttattgtctagattgtggtgatggtttcatgggtatatgcgtatgtccacacttcagattatagacattaaatgcgtacagttttctgtataacgattatatctcagtaaagctgtttaaaaaacactaaacattagaagaactccagtatgtgaaagacagaaaggagaagagattcccctcagtaacattcccctgccccaaggttatcgctgtggaacagctgcctgtgcagccttgtggacctcacataaggacttctatacaggaggcactataggtaaattctgaaagccaaatttggaccatactatcacaagcgataccattcacctttcaaacagtggactttcacccaaggtattacagatttaaatgaccattaaaattacctggcagttgtgtctggaaaggtctttctagtgatgtccatggagctgtgactgaatggaagttctgacctcactgggaccttctaaagcctaaaatggagccatgagatgcatacaggcacttttattcagagattatttagacagttgtgttcatcagggttttttttttttttttttttttttttgacagggactcactctgtcacccaggctggagtgcagtggtgcaatctcagctcactgtagcctcaacctccccagctccagtgatcctcccacctcagcctcccgagtagctaggactacaggcatgcaccatcacgcctggctagtttttgtattttttgtacagacacagtcttgccatgttgcccaggctggtctcaaagtcctgaactcaagcaatcacccacctcagcctgccaaagtgttgggattacagacataagccactgcacccagcctgtcagtttttgattgagagatgtcatgggagcaaaggaaagatccaaggtttaaggtactggcaatgcagagaggctaggctgggcatcagtggggctgagttggcctggagaaaggaagaaagaattaggcttccagaaaagaagagtgtgcttatcaaggagacactggaaacaaagcagcttggcgctgatgttgattgaaaagtgtggttcttagcgtttggatgctttactggagttaatgtctaattttgttggttagtaagaaataaatgtagagtgttaaggtatcataagcaaaataaatcataaacattcagtatcttcggtgtttgaggcaatccagattgaaaagcattgaggtgatttgggaagggctattataccctacttttctcttccacctgtttctgaattttgcccttaatatgaaagacagcaatacgtataaatctttaaatggactttttttttttccatagtgttctttcagaggaccaagacagttacctgtgtaatgtcaccttgtttaggaaggcagttgatgacttcagacacaaagccagagaaaacaagtaagattattgtttttttgtttatttactttgttagatcagctgtatacaatgtgaacaattttgttttttttcccccaaatttagattcattgttcgtgacttccagtataatgaagaggagatgaaagcagataaagaagaaatgaacaggctttctactgataaraaaaaacaatttgtatgtgtttttaatatttagtattatcagtactaagcagaagaaaaagtgrtattgctttcctttgatttaaaagaaagtaaaaatctgctttggttttaagacatttgattttagtttttttttttaattgaataatcagaatgaatttcctctaaagcttaactgttctagagataactattctatttctaagaaagctttcttctaaagcttatgtctatctgagatagaatagagtagatagaatagttatcctaaaatacatacttaaaaagaaattactccacctaaatccatatcagacattaattttaaatgcagtattctggttaacatccttgtaggtgaagggtgattttagttaagtaacgaagttcttttcagtaagacttttcactttcttgaggcagattttttcaatgcctcaatcttttattgaagcaatttgtatttaagctattggagaattggtgtgttctaggtgtaatgggaaacgagtggaattgtgaaaatcaaagatggtgttaactttcttgccatcttcaagtgtgggattactgtgaagactaaaagcttgtttggaaagggaaacataatgagtgaaaatgtgtttctcttaataatgtaagaggaaattaagggaaatattgaaaattatttccaagtactttataagccatatcatctcaactaggaggaaactcattctaaccaagtaatgtcaaaataaccagctttttagggcaaacccaaaatccttttaaaaaatagatattttgacaagattttcacttgttttgctatccttttgcttaaattaattgtttggtacatccaaatgagcctaataatgttatccaaggaagtgttagctgaatcttttaagtatggagagaggaggtatttgaaatccgcttaatcctactaaatatttgaagtttaaaaagaacttaaygctatayaatttagaatgtaaagaggttttagatgtctagaccaactcccttttttacagatgggaaaactaagagctagtgctgttaaatgacttgcytacataactgtttatctttgttactaagaagttgtttgtaagttgaatttcattttacatgtattaaatgttttagagtgttgtgtagtaaattcagatctttatattttgattttccaacctaaggcatttctatattttgtaccattttaactacttttattaaaatawatacctttttctgtgttagtgaattggttcaatgcattttagtgtctgttgagatctctctgtagtggcgaaccttttaatctaatttaagataaggtatctgagataatgagaataatagtgaaacatgtagaaagtgaattatgcgacttaattcttctatagattcctaataggtagtcacttaaaaaaatatttggtctatctaattgctatttctaagaccaaatttgtggtaattttttttctttttatagggaccacttgtacggtggctgaaagtgaattttagtgaagcatttattgcatggattcacgtgaaagcattacgggttttcgttgagtctgttttaaggtaaagcaagttaattgccaaacttggaactgaagagttcatagattccttacattggacctctttattataacacagtccagcaataggaaattgatttggagaaaycaaagggccaatcatgagacagagattatcagtatcatcatacagcttataaaatgcatattagtcttgttctttagcaccaggtttagaaaaagagatttatgctgccataccctcaggttctttttcttgtgtaggtacttaaaagtagattaaatattaaccaatatttgtttaaaaggaagatccttcaggtgttttatatgtcattggatacatagtatgctaatgacttattgaaatcatttcatattaacctaaagtattttaatattttgagatatttaaaaaatcatattctggtccaatgtatgggttgctcatattagaaatagttttaaaaaacccaaaacttggccgggtgcagtggctcaygcctgtaatcccagcactttgggaggctgaggcaggcagatcacgaggtccgattgagaccatcctggctaacagggtgaaatcctgtctctactaaaaatataaaaaaattagccaagtgtggtggcacgcgcctgtagtgctggctacttgggagactgaggcagagaatcacttgaacccaggaggtggaggttgcagtgagccgagattgtgccactgcactattgcaccactgcactccagcctgggcaacagagcgagactccgcctgaaaaaacaaaacacaaaacaaacaaaaaaacaccccaaaacttacatgtaaccatgctsactatttttaaattttttcaaattttcaaactatatgtgggtaacctcatgctattaccataaaagtatctgctgaccttacttcttcttatttcctgaggatattcatatattaccttaaaaattgaatggtaagccaggcgtggtggctcatgcctgtagtcccagcactttgggaggccaaggcgggcagatcatgaggtcaagagattgagaccatgctggccaacatggtgaaaccccgtctctactaaaaatagaaaaatcagctgggcatggtggtatgtgcctgtaatcccagctactcaggaggctgaggcaggagaatggcttgaacccaggaggcggagattgcagtgagccaggattgcaccactgcactccagcctggcaacagtaagaatccgtctcaaaagaaaaaaaaaatgaatggtaattgaagtaattcctagtaattggcgtagagatttctagtggacagtggggaccaaaggtttgcgtttctgtttatattgaagttttttgtgtatattagtttcagtttctatatatattagttgaacttgtaaaggtaaagggagatattctctccccgttaaccatgattaaagagtatgagartatttgctttgaaaagaaaatctctttacatgtttgcytgtattgcgtactgtatttctgcttttttgtaaggtatggcttgccagtgaacttccaagcaatgctacttcagcccaataagaaaactttgaagaaactgagagaagtattacatgaattgtataaacatctagacagcagtgcagcagctattattgatgtaagtacttattagcccagtagagtaagaattgaagtgaatttcagaaaaaaaatgattgaaagaagatagacagaaaagggagrgtaagtatgawacttaatcattttttattactttgaggttctcaatttgttatgtaaacatagtaatttacattgtttaccctgttttatactaattatatctgtgttttgcttcttggcatttctacaagctagtaattatcttgctgtgtatcagatgtttatagctgcagaaatacagaaaccagtgatactagttatttacaaaaactataaattgcagagaggaagraaataagcagttattttaattttatttggtagaagcgatagagtcaatagatgagtattttcaaggtaggttcatttttctaaaatggcgtagctgggcgtggtgggacatgttggtagtcccagcaactgaggaggctgaggcgggaggatcacttgagcccaggccttcgagaccaacctgggtaacatagtaagatcccatctgaaaaaagaaaaaaaaaaacagaccaaaaaatgtattatgtgtttatatcttcttttaaacaaaactgttattttttaaacaaaagaagatataaacagagttacttgtgtttttttgttgttgctgtttaaaattgtagtgggccgctgggcgtggtggctcacgcctgtaatcccagcactttgggaggccgaggcggggggatcmccttaagtcaggagtttgagaccggcctggccaacatggtgaaaccccgtctctactagaaatacaataattagctgggcgtggcagcggtcacctataatcccagctactcgggagcctgaggcaggagaatcgcttgaacctcggggggtggttgcagtgagccaagattgcgccactgcactccagcctgggtgacagagggagactccgtcccaaaaaaaaaaaaaaaaaaattgtagtgggcttttactttatatttctggttttaaatatcttgctgatttttttttttctctttaaaagtttagggtagatggtagcatctcacataggcattaattagaactatgaaaaatcagtttttcttgatagaaggaaatgcgggaaatgacttgctacactttttttctttttctttttttttttttttttttcgagatggagtttcgctcttttgcccaggctggagtgaagtggcgtgatcttggctcactgcagtctctgcctcctgggttcaggcagttctcctgcctcagcctcctgagtagctgggattatgcctggctaatttttgtatttttagtaragctgcggtttcaccatgttggccaggctggtcttgaactcctgacctcaggtgatccgcccacctcggcctcccaaagtgctaagattacaggcgtgagccaccttgcccccggccaacttgctccactttcatgcaattgtggataaaatgagaggtataattatttgatacataaatgttctagcagtaaattcttataacatgcatttataataagtgttatccttgcttgttttttggctctgttgctcaggctagaatgcagtggcatggttttggctcactgcagcctcaacctctatgctcaagtgatcctcccacctcagccttccaagtagttgggactataggcacgcagtaccactgctggttaatgtttttatttttattttttgtagcgatagagtctcactatgttgcccagactggtcttgaactcctgggctcaaggccttggcctctcaaagtgctgatattacagaataagtrttacttataaatcatacttgctttatttttactccatattttgtaagtcttgtatcccatcaactcagtattctaagtccaagatttaaaaagttaatttttacagtatacataaaaaaggttggtgggatcatgctaaatacatatgcagtcagaatgcttgaacctggctttaccactcactgtctgtgtttcctaggagaagtcagtctttcagagattgttttctcatttgcaaaatgggaataatgtctaactcagataaattagccttaagtgcatacatttagcccagagtagatgttcaataaaaaggtaaatgttaatacttgctttctttttttgagttctgtaaatacaaaattgaataattgtctgttttttccataggctcctatggatattccaggtttaaacctgagtcaacaagaatactacccctatgtgtactacaagattgattgcaacttgctggaattcaagtgaaaatgggctcctcccccgacaatcctgtccttgtgtttgtgtgtgctaacagaartaagttgcagtatggtcgtacttttaactctagtatcctttgcttgcttcttacsccctttcctaggtgaattctcccacagtggtctgtatctcaacattttctttttaaaggaaaaaawatatatatatagtttctttttattgatcaggtctgtaaatgtgtactaaaaaaatcagagtttatttataaacaraatagtttatttaaagagaaggtctcttccttattgatatcatggtatgcattaattccatttgttactattgtgcayaaaagccctgttcacaggggaatggtgtaaacatttatactgttttgttcactgtatttagtagacataactgttgaatagttactgaatcatgatgtaaagaatatgtgaccatcttcaggtatgggatttctgaacgtttcaaatttcaatcaatgagcactgtcaacacccacaggagagaataaaattacctgtgcaaaggtgtattgtggtgtgtgtaacttaagattacagttctgtttgagagttaaatgatgtcatagctcacttgctatgctgcttccaggattttgttatatgctgaggtgtaaccatttgtgttgtctgactttcgtatgatttaattgagccaaatttgggtcagaacacaaatttgaagatgacttttcagtatatgatgggtatttacatttgaacactagaattttaggtctctcaaataattaagaatagagccagttttgaataaagtctagcagaactatgcagctttagtcatttgttttgtctaagtctgtattttatgtgttgtcttcttaagatctataattttggcatttatgtcatttgtgacatagtctgaaaatagagacattgttggcctttaaaatctcagaaatgaatgacttaatttagtgtcctgaaagagcttttaaaagaggattttgtggcaatgtttctcttactaygtactcacaggtttgcaaatgggaaaaaagtttacatttcagtttaggggcatatctaagctatgctattccctttagaaaattagcctccaaaatcttttgtttcaaaatattatattatttcataaataatttcaagcaaatacagacatccacaatgtagaacatgagagaccccctccctcaatttcmacctcccaagggaagtttatgtatttttctaggcccttttctatgtctttacatctctgtctcacacacacacacgtatacacacacacagtttatttttaataaaataggattatacyacacacatcctgtcacttgcttttttgcttaagagtatatctaagagaatcctttgtgtcagtgaagctggagctacctcattcttttaactggctgcgtggcgttccattgagtgtctgtcatcatgtgtttagccgagtggatggatagtctgcttgtttttagtttttgctcttaacaaacactgctgcagtcagcatccttgcacagatttctttgtatacttgtattagtatttctgtaagatctgagaagtggaatttgtagggtcataggttatgtacacttaagtttttgacactcactgccaagtcatctgtcagaattctaaactaaagacatgtttggagtgtggatttatcttcagtttttctttggacaagaggaagctgtgaaagattttgctatcagaaaattttggttctttgtcttttgcacatgttctttgagtcttagtatctgtaacgtggcgctactctctctatcatgggggggcatgttttgacattaaattgacttttaagaaaaacatgtcactaacctgaagctcagccacacagtgacttttaaggttttatttagactttactgttgttctcatgagagtaggtacagactgcataaggtttagaatcccagcatatgtctgaaacgacgggactttcactgtgatttccaccagagaaattatagcagagtggctgagcatgtgctctgaggccaggccccagctctgctgctgaygagctgtgtggtcctgggcagagtggtctccgagttccagtccctcctctgtaaaatgggcatgattagagtgcccaccgcattagggatgttggggtgagtcagtgtgaccccacgtgcacagaaagtgctgcgagtggtgcatggtgagaggttgatgcaggtacttagcccttggggaacacaggtagttccttttcactgtgtttaatttgggaaaatccagatccacatcattgtagagtctgagggttagaaggaagtcattgtgtctaacataacaacagagcagtttgtgtcactgagctccagtctgtgctggattattgatattgttggtggcggtcaccattcctggaaagggactgtcccaagccacttaccttcccgaggagtctgctggttctccttgaggatagtgcttagataacagactcattaaacatttactgagtgtctgtcagggatcattcacatccacatcatcctcccggcccctccycgtgttgttcatggagggagtactggcggtccccattttcatgtatggagacttcaggtgaaagaagttaagtgaattctttgttgagtcacaaatyttgagccagtcagaatttgaacctaagatttttgactgctggttgtcacacttcccgccccacactcaactgttgtgtgaatgagccagacacattgcttaacctgagtccgagatggacaatggtataggaaagatattcggtatggagaatcagatgttaacttgtgttgctatttttgttttgttttgttttgttttgtttttgagacaaggtcttgctctgtcacccaggctrgagtgcagtggcatgatcagggcttactgcagcctcaccctcgatttcctgggctcaagcaatcctcccacctcagcccccaagtagctgggcctacaggtgcgygctaccacgcctggccaattttttaaattttagcacagatgaggtctcactatgttgcccgggctggtctcgaactcctgagctcaagggatcctcccgcctcagcctcccaaagtgctggtgttacaggcataagccaccacrcctggcctgtgttgctattatatttggcaggaacccagagtccagaacatttcatctatgatgggttagataatgtgtctagttgtttgcatgccaatttcagtagcctcagttattcaacctaggagatttttctacctctttactaccctgctgaagttgctcttcagcagaaaatctttgtggaacacattccacactttgaaatcttcgtggaacaaaagatatttgtggaaccaatctttgtggaacatattccagctttttgaatgagtgcatatccagtagtacctttaaagtaacactttgtacataacaaatactcagcaaatgtgaaactttatttgctcttacttcaaaattagtccaaaatgttggaaataaaatataagacattgatctagatatgaggtttttctccttcattctcagctgtcgaagaaatcaaagtagcatatgcacaaggttaaaaaccacatatacaaatactatagaacagcttataatgaaaaccttgcctgcctttataaaaaatgtgattatcttcttctgttaatgtcaataaaagatggtttgtcctagaaggtctataaatggtattatgttctggaggaaacctagcaaaaactttgctagtttagtacttgtctctaaattgatgttcacccatttcaatattgcacttattaatggtctttatttttctagcatagataacaattgattctttagattcatatatggaggtaattcttgctttctaaagaaaggaatatggcacattggaaccattttattcaccagtggatttacccttagagtatttttagatctgagctgatgacttgtgagagaaaaagggaacagagtaaagccatggaagccatgaacagtaagagactgcygcctggcatggtttcttcttctgcagaagatgaaactgaggagaaacaagacaacatccttcataccaggaatggtcaagataatgcaagaagaaaaaagctttcaaacaaatcagaaggcagtcaacaaacagaaagggggmcattccttccctggcagttactcaaaactgaaattgcttattgtgtacaccggggcttgtacttggggaatttaataaaaatgctcattaccaagctccagagagatgtggtttaaagtcttaagtagatccaaggaataacctacattttaaacaaatacccaggagaatcagaggctaggggttagttgtaatcggatactaccttttaatgattcttcctctgaaccctcagattggggtgttgatttagaatttgtaagcatcttgaggtctcattcaaatagtgattcttctctattgacagagaccacacttaatagaatcatcatgggtaaatcagctttttctactgtcacttgaagaaatattccacgtcgttaaatcagtagaactggagagttctgtctcagcagaaattgatcaataaagatgtcttttgcccttggaaggccatagaatatcaagttgaaatttgcaaaaactctaaaatgatcaaggtcacattttcatcttttaattgagaactcattgtggacataatttgtcactgcttgtaaagtgtaaaaagaaacaaccaaaacagactttgaaagaatggtttatatgaggaagccctcctcccccccagaaaagggctattaagatgaaagtgaaagaaggagttggaggcagcaaaggttattgttgatgttggacaaaggaaggaataaactgtatgacaccaccttgaacttgaaagtcatttgttttttaaccagaagatgaacaggaactatttagaatatcaaatcccaagagcagctttcatgtattttgctgtttcctaggtatgtgggtggcctcaccgcatagtcctgtgacaaatcttaattatttttttcaccaacacaacttgccatattttatataaactacttagatacatatttagactgtttctcaagagtgctttatagttgagtacaggttttatgcattgttagaagcataaagacgcttgttttttaaatagaaattgtgattatgcagataccatgttttaccacaagagggcactctggtgccattgaaaagcaaacaggtagtttctcctccctgcatttttggttctgacttgtacagtcagtttagagaaacctacactctgcattctggtttggtatattttgttacaagcgtttattaatataaagttctcaaaaaatgttagatgacttattttgtgacactctagcctctgtgtgtgtgtgtgcataaaacccacacatctttgagcagaccagtgccagccagtgacagttttcactgaagatcaaattaaaaaggtaaggatatatgtatgtgtgtgcatgtgcgtgtgcatatataatcactgactcagttgctgagcatgcgctatgaaccaggcgtgttaggcgctggggatttaatgcaagcagtcagatgggcacagtgcctacctaccttgatggggcgtgcagcctggtgatctggtggcaatcttactggacaaaacacaaacccggcagccctaagttaggaaaaggattttactgatctgtgaaacccacagtctgaaaacaaactgatttaagggtatctgtccagaaaagtcaacctatgttatcagtcagtgggtaaagaatagacacatcattttatcacgtttgaccacctagtcggcctggcttagcagtgtccaaaagaatttcttatgatgatggacattctatacctgtgctacccaatgtggtgcccctagtcacatgtgactgaagatcacttgaaatgtggctagtgtgactgaggaactgaatttttttatctaatttttttttgagacaaggtctggcattgtcgcccaggctgccttctgggctcaagccatcctcccttctcagcctcccaagtaactgggaccacaggcacatgccaccacatccggctatttttttttcccggtagagactgctcaccatgttgtttaggctgatctcaagttcctgagctcaagcaattggcctgacttggcctcccaaagtgctgggattacaggtgaaagccactgcacctgaccaatcttatttaactaattaaatagctacatgtggctggtggctactgcgctggacatagaggtctagttggtcacacctggctaatgagcctttttgaccttgagtttccaatatatcccatatcctttggctttttttgtttgtttttttatgactggaagagccagccttgcttctgtttactttgattgctagatttaacatccccacaagcctgagaaaaagagaggaaaggattgctcttggaatcattgttggtgtgcctcagattgctacgcaggacagcattctctttgatcacaaaagacaactacatatactttgtgcattgatgtgcacgagagtaaactggttgtcatactgaaagaccagaagctgtttctgatgggaaatattgaatcagcagaattgaaaacacagctgtgtggttctaatgggaatataatttcttctgtcaatcagtgctcacttagtatccattgtgtgcagagcattcactattccagcctctgcagggagacatcagggagatgctcaccacgtgcttttgaatgatattatttgtctttattgactctaagaaatgtaagaggttcataaaacattgaagccattaaggccttatttgagaagtctagcaactcacagttgcccttggaaagaggcaaataggaaggggagagccctctgtcagacttgttttccatcggtgacatgtggcatggattttacctcctaccgttagctggccaccctctgcattcaggcttgtgaagcattctggaggcccmcccgccccatcctccactcccggctcttcctttggcatccccactggccatatttctttcccagtctgttctgacagcctcctaactggccacttgtccccagtctctggtcaccttcagctcaccccagttctgggaccagaggactggcaagtcacttctcacaaattccgaattgctgctcacttgccctcgggatagaggctctattcaaactggactttcttcccttttagaattggcttctctatgtgttctctgaaagaagaatatcgtttactgttgttgatttgatgggggccgctttggaggaggaatttagaccatagatggttcctagggatgctccagcagtctcctctcctttcctacctcctccaagcaggccacatgagccaacttcacatctgtgctctctcaggatgtaaaatcgtgggcagactagcatcccagggtctgaatcattccttcctctgtagaagaaggataatgaggataacactataggactattgtgagaatgaggattaaaccgcaggtccaaattttctagcatggtacatggtgcagaggaggggctcaacatattaactgctgttgttattgtgtactacccttttccatgctgcatgatttgtgtttcttttttgcctactgcctcatatcttatgtgagatgaaattagttcctctttaactgcatctgtttagaaggcagatttcccattaaaaacctgctggcatcacatgaccagcaagttcacaccaacgtgtaaacccaagaaaactgaaaccatatattcacacaaaaacctgtacatgaaagttgataactgcattattcataatagctaaaattggaaacaacccaagtgtgcatcaactgatgaatgaatggatgaacaaaatccggtttatccacacagtggaatattagccataaaaagaaatggaagtactgacccacgccacaacatggatgaacctagaagacatcgtgccaagtgcaagaagccagacacaaaaggtcacagatgacttcatttatgggaaatgtcatgcatagtcaaataaatcggtatagaaagaagattcgtggttgccaggaaccaggatgggaagggatttagtagtggctgctaatgggtacagggtttctttaggggcaatcacgttctggagttaagatagtgctgatgatcacgcaactttatgaatatattaaaaatcaccgaattgtatactttagaaggtgaattttgtggtatatgaattgtttctcaatttaaaaaacctaccgggaattagctcagattttctacaaattctcttaattctttgcttatctgtttatatcgatagaatttttaaaaattaatttgaatttccttttacgaatggtaaggagatttgccctttggggtttcactccgtccagtgctcttgctgtcgattctgtctgtttgccttttttgttgttttcgtttgtccactcagcatctcagttggccttagctgcagccgtctgcagccgcctcctccacttgggggttaggttgcaaatctgtcccagagtagctcatctcactggttatcacattagcagtcactcatgtcagcagtccccgaagaaaagatagctggttggctggggataaagcatctgaaactttgctggtctgatgatatctttctgttgtttcagtacatgtgtcactgacaacttgcttaggtaaaagtgcccatagttccttcatttgttcaacaaccatttactgagggcagaatcctcattcacttagtgaatacttagtaattgttgaatacctgggtactagggcaggagcagccaaatgagaaaaaggactctgtccacatggagcctacctgctggtggacgatacacaataaacatagcgaacaaggtaagacttttcgccctctgcacctgtaaggccattgaggactaacctggctgggaatgggtaggaagagctgcttcagaggggtgtctagatataccccagaggatgccagccatgtgaagacctaggggaaggaagtgtctcatagaggttgggtaatagaggatcagcgtggcaatagctgagtgagtgagtgaagggtgtggtatgtgcagcagatgcacctaggtggggtcttcagaacatggtgaagaactcagacttttttcttctagcaaagggaacccattttagggactcatgtgcatgtttcaaggatcactgcagcagtggtcatacttgtgtgtttgtagcccctatttcttacgtcgtgcttggcgcattcatagcaggcactgggttctggttcagaactgaagtggatgaatgcatggagaatgtactaaacccggaagtgtgccagactctgcacccgaaagttctctgcagcttctccaactttaagagtgttctgcaaacacactgaatgctttgcctggatcttcctgtgaagatccaggcagaatttagtaatagaaatttgtaaaatttattcttaaattcttttgcaactgtcttgatttcttcacaaacatagtcatcatctgtttatcaaatgggcattttaaataatatttgacacataactggctgactccacagctccaaattagtcacacggtagtcttttgataatagccaacatgtgacaacagggattttttgcacgaggtggggagcattctggtttccttttcatttttccaatatgtcatatttctcacttccacttttcttagaggggagggttgtctttttgcttcaaactattataggcttttactgagagacaagaggctatgagccccactcagtagaagaagggtttaagtctatcatataaattattgccgctctaacttctctctgtccctgcctcttaagtcatttacggtatttgtttgggtagctatattggatttcttccgtttttccaggggaaatacagcaactttggagagacgtgaacatgggaatatatgaattgattgcttgagaagtgttagtgttagttctggaatgaagtcctgtgtcattaggtgcttacgttgaaaggaaatgtagaattttccatagtcgcagctttccagattttaattggctgcttgccctcgtgtcactttcttttctaaaataaatgttttggatggctcttatctttacaaccaggcacacagcttcatttcctcctaactaggaaagttaac

SEQ ID NO: 93194 - DNA, 22900 bp, Homo sapiens
ttgctcttcctccgccgccgcctcgtgcttcgtctctgctccttctctcgtgccctctgtcctgtgtcctcgtcgcgtggctggctgctccctcctctgtgtctgtgtctgcgtgtcgcggcccccgctgcccgctcgcgctcccgccgcgtggggcttgtgtttgtgttgttgctgagcttggccgattctgcgggcaggtgacatcacacctcgaaggccccagtgcgcgggcggcggcgcgggtccggcccaggaacgcccagccggtcgctggagctttccggctggtggggagcccatgtcccccacgggaggtcctcagccctcgcccttatggcggccggccccgagggtcaggtgggtctcacccacaggcaggtacttccggttggagctggttacagttgcccaatacccgtgtcgctgtgtgggctgtttgggaaagctgggctgagggcttggttcggagagcccgcggagacccgggtgggagtgtgtggaagtggagggagcggggagacagcagcatcggcgctggcggggctgtgtagcttgcagagggtctgtgctctgaggtgggtgagagggtggcatgggtgtccgagtttatgggatccagtcgttgccctcaggactgaggcttccagttgtggtcctaatgaatggaggggtgaatgaatgaccttcctttccctccctgaggcctgaagttgggaggggcttccctgggcttggagaaggggccttctagggttcttggtggcaccctgcttttgaaattgggccttgacaggtcctgggcgtccaatttagtgacaattggtctccctgggagaatggcacttgggctagggctaggcccaggaatgtgggtccgacgagttaagttctggcccagtctcagcctccgtggactggcctggcctggtctgatttccgcctccgtggttaggtctggttttagctttgatgaccgtgccctgccccaccctgcctggtggcctggggaggctcctagtgcagatatgtggagggtttgaactccaaacagtctctgctgactgtaaacacctgtggggtgggggcttggagctctctgttctcttgcgggcctccttctgcctgggcctgtctgccattcgtgagtgagccctggccttcccgtcgtgtgcaagtaaggggtcatttgtggtggaagaagtggtctagacttctccttccccctaggcaccgcctgctctttccacagactcaaggcttctcccaacaggctgccgagcccttccccccagcctcctctgttctttgccctcagaatgccttcagagattccattttgcctggccacctgtggggtattagcttgtggctgtcactcattcatccaaacaatcttgattgagcgcttactatgtgccaggtactggtaggacagcagtgaacaaaatgggatccccgcccatgtggaacttaaattctagctgttgctgcttgcccttgaagccctgagtttgtccaccaagccctttttctgcacccagctcctttcctctctctccgtcaagacctacacaggtctttgggcagcctgaccagcaggtgtctggaaattgagaacacggtattgctggcctaggcctttcctgcttatccctggctcttcgggataaacgtggcttactgtggctctccaggagctgacctctgacttcacttggccaattcagacaactgcttttttttttttttttttttttctcccctcctcaagacagggtcttgctctgtttcccaggctggagtgcagtggtgtggtcatggctcactacagcctcaacctcccaggctcaagcaatcctcctgcctcagcctcctgaataactaggactacaggcacaggctaccatgcccagctaattttttttttttagagacagggtctcgccatgtggctcaggctggtctcaaactccttgttgcctcaaacgatccacctgcttctgcctcgtaaagggctgggattataggcatgagccaccatgactggctcaacttctgacttcatttctgccttctcagcatgctttcctccaggacctggcttcacctgctgtgccgacctaaacaagccccctgccctccagtggcctctgctgttgccacaacgccaacctccagctgtgtccccagctcctggcccttggcctgcctggcactgacggattggtcttaaaccgaatgaggtccacaaacctcttgcaggcccccgtcccagcttccccttttttttctcatgacaaatgtcctgttctttcttcatcatgtccttcaagaagttgtcatttgctccttttctgtatttcctgtgacttcctccctgctggcgagtgccttgtattttatgcttgtgtttctgcaactgctttctggccccccactctttctgtggctgctgagcctagtgccgctcacaggtctgccttctgcagtctggtcaggcttggcctccggactggagtccagggtgctcatggtattccgctcctggtggccatccctttcttccctgtgctcctcttggtgcctcctccccctgccagccacatgattcttcctgctgccctctgtagaaaagggcctggctcacttcctgcctctggtggactactggcctcacagggtccactacttgggttgctgagttccctgtattcagtctcctgccaacgtgtctgccatgctctggtctcttgtgcatacatgatgcagttggatgtggtcctgggcctgcagtgggagccccctaaaatgcactgtaattgctctatatgcttgccagggaaaaaatgcactgtaaccaggagttcaggacaggcgctgggacaggccctgggccccagtctgcaggtgcactgggtgttggcatggcatgtctgggcacctccaaggtggcgtggaggaggccgtgtggctccctggcccaggtcccagcctccttcctccctctatagtcactccctggatacccagcaccgtcgtcttgggtgcctctgcaggtgctatccagagcccttgtcttattgccttgtttttctgtgactcctctctcccgccaacttgggatacttgtctgtgaagcccttccccagcacccccttctccgctctcctggagcatgtctctgtgcctggaggtcaccgcgcctgtgtcctcacccctgctgagtgctgggacacagggtaggcaagttttgtggcccaaatatatcaataaaatatgaagaggaatggtaggggtagtcctggtcccttccacctctgacatatgtagtcttctgcaggtcaggctgtttgtgtgtgtgtgtgtgtgtgtgtgtgtgtgtgtgtgtgtctgtcagagattcactcttgttgtttgtttgagacggagtctctctgtgtcgcccaggctggagtgcagtggcgtgatcttgactcactgcaacctccactcctgggttcaggcgattctcctgcctcagcctccctagtaactgggatgacaggcatgcgccaccactcctggctaatttttgtatttttagtagagacgaggtttcaccatgttacccaggctaatctcgaacttctgacaccaggtgatccgcccgccttggcctcctaaagtgctgggattacaggcgtgagccactgcgcctggccaagtcaggctggttattgatctgctcccctaaaagaccatggcatgagttctgtgggcagagagggggcagggagttgccagtgcagtccccacaagcagctcagtaggcccctgtggtggccctggagggcagctggcagaagtcagaaaggcaaatgagcccccgtgacactgctgtgtccacagaattctccactttgagaatagggcccaggagaggggaactgaaaagaaaggcaacattctcttgggagaggaaggagggacagctctggaggagacaggccaccctggagcccagcccaccagcactgttgcggtgggaggcttgggccctctggccaggctcctgtgtgcttggagccaccccgtgtgcaggggagacctctctgggaggtcagctgaggcctcgtagttggactgttgatgatccccgtcgtcttctctgcccccatcctcttcttggctcaccctgtctcctgtctggtagagaagattctccaatctgtcaagggttcaggcctgctgtgtggctgagggtgctgagagctgccctttctggcagaatgtttggccctcctaggttaatatttggggctgggagcgttggggagcttggcctgggcagtgagtcaagggagctctggcctgggtgacaagagtggccaggtcagctgcttctgaccctccggtcacaccctgtagcagtggctttgccatccccaagacctttggtggcttttccagcatgttgtcctgggcagtagccccaagggtcgactgaccctgaccccacatgggggctgctgaggctgcactgaggctccctggggtgacaggtgggttcactgcagagccaggagccccagatgggtcacgccgccccaagagctgctgctggaggaagagctggactctgagggtgggggcctcacgtagaggaaggaggagtggctgtcctggcctccttttgcttgcccgtggctgttcctcctgggtcctcttgccctgggctggatgccttcttcggctccccctctgcatgtgataacttggggtggcccttggagctgtgccaaagctacacctcggggtcctagtctcaactggcctgcgtactgctgtgggctcaccccgccttcctcccacagccctgggcgctgcctatggcacagccaagagcggtaccggcattgcggccatgtctgtcatgcggccggagcagatcatgaagtccatcatcccagtggtcatggctggcatcatcgccatctacggcctggtggtggcagtcctcatcgccaactccctgaatgacgacatcagcctctacaagtgagcactggggtcaggcccctgcccagggctggaggactgcagggaggggggcggttcacctgtgggtggtgacccggacccttgtctccccctggttggcaggctgctgatgtcagtcctctcttctcgcccccaggagcttcctccagctgggcgccggcctgagcgtgggcctgagcggcctggcagccggctttgccatcggcatcgtgggggacgctggcgtgcggggcaccgcccagcagccccgactattcgtgggcatgatcctgattctcatcttcgccgaggtgctcggcctctacggtctcatcgtcgccctcatcctctccacaaagtagaccctctccgagcccaccagccacagaatattatgtaaagaccacccctmctcattccagaacgaacagcctgacacatacgcacggggccgccgcccccagtagttggtcttgtacatgcgcagtgtcctagtgcccatcgtctgtttccccggccttgcccccgcccgccccgtgccgtggacatctgggcccactcatcgcccctccaggcccccggcgccccaccccctagagtgctctgtgtatgcggatgatttagaattgtcatttctctttactggatgtttatttataaagatctggcctgttcctgcgtctgcggagcggcccttgtctcccagctatctataaccttagctagagtgtcgccttgtgggttcctgttgctgagacttcctggatggagccgccctcaccgccgggcccgtggccctgcgcggagctgtgtccaataaagttcttggatgtgacgggcctgtgtctgctcagcttgttgggggcgggggcgggcgggcgggcgggcgggcgccgggcgctgccggtcacgtgggctggctcgatcacgtgggcgcggcggtcacgtggcgcgccgcttcagtcagctgaaggtcacgtgggcgcggtctcagctctcggctggggttcgtcactgggcgcgggatttggccgccgcggggctccggagccgctcgctcccgacacggctcacgatgcgcggcgagcagggcgcggcgggggcccgcgtgctccagttcactaactgccggatcctgcgcggagggaaactgctcaggtgggcgcgggccggggactgcggggctggggaccgggcggggtgcagggtgcggggccggggaccgggcggggtgcagggtgcggggccggggacmgggcggggtgcagggtgcggggccggggaccgggcggggtgcagggtgcggggccggggaccgggcggggtgcagggtgcggggccgaggtcaggcccgcgatgcgagcgcccacccactgcgtccccagggaggatctgtgggtgcgcggaggccgcatcttggacccagagaagctgttctttgaggagcggcgcgtggccgacgagcggcgggactgcgggggccgcatcttggctcccggattcatcgacgtgcagatcaacggtgcggcccggggccggcaggggaacccaggggaggagctctgagctccatgcgacacttccttttctgtggctgcaggtggatttggtgttgacttctctcaagccacggaggacgtgggttcgggggttgccctcgtggcccggaggatcctgtcgcacggcgtcacctccttctgccccaccctggtcacttccccaccggaggtttatcacaaggtgaggtgaggctccctggctgaggtggagggggctcccggagcaaccagcgccctcattttcaaactcacgccccaccccccacccccagcacgtattccatggtcctgagtctggcctcctttgatgaccggatctgggcctgggtcccgcccctgtgcttctttatcagttgtcgctctgcctggcctccctagaccctctgtcctccgcagctgtctccacactgctggctcagcaccgtctgagccataggccgtccccaccccctgcactgcactctggctgcctccaggcttcagaaaccatccccttaaccaaggccgcaggggattctgtgattggcacagcgatagtccctggtcaggctcttcctccctaacctgtctgatgtgtgactcagtggaacacgccttccagaagagactccccctgctcctgtactgcttgccccacgcttccattttctttcctgcccggaagaaatttggttgtccttggtctttttttattttaatttttacttaggttctacagggttaactttttgctgtatgttactactattcaggctcctcttggctgtacctgtgctactgttttttactgaactatttgagagtaggttgtatccaacatgctttttttttttgtttagttttttttttttttttttttgagacggagtctcgctctgtcgcccaggctggagtgcagtggcacaatcttggctcactgcaggctccgccccccagggttcacgccattctcctgcttcagcctcccaagtagctgggactacaggtgcccgccacctcgcccggctaattttttgtatttttcgtagagacggggtttcacygtgttagccaggatggtctcgatctcctgacctcgtgatccgcccgccttggcctcccaaagtgctgggattacaggcgtgagccaccgcgcccggccagtttttgttatttttaagagacagggtttctctctgtggcccaggttggagtagagtggtgtggtcatagcccattgcagcctcattcttctctgctcaagcgatcctcttgcttcagcctcttgagtaggtaggactacaggtgtgtgccaccatgcccagccaattttaacattttttgtagagaaagtctcactgtgttgcccaggctggttctgaactcctgggctcaagagatcctcctgtcttagtcccccagagtagctggcactacgggcttgtgccaccacacccgactaatttaaaaagctttttcggccgggcgcggtggctcacgcctgtaatccctttgggaggccgaggcaggcggaccacgaagtcaggagatcgagaccatcttggctaacacagtgaaaccccgtctctactaaaaatacaaaaaattagctgggagtggttgcgcctacctgtagtcccagctacttgggaggctgaggcaggagaaccgcttgaacccaggaggcagaggttgcagtgagccgagattgcgccactgcactccagcctgggcaacagatcgagactccatctcaaaaaaaaaaagttttttgtagagacagggatctcattatgttgatcaggctggtctcaaactcctaggctcaggagatctactgcctcggcctcccatagtgctgggattataggcgagagccactgtgcctggcccatcatgcctgtttattccttagtacttaactttttttttttttttttgagacatagtctccctttgttgaccaggctggagtgcagtggtgcgatctcggctcactacaacctccgcctcctgggttcaagcgattctcctgcctcagtcgcccgagtagctgggactacaggcgcccgccaccatgcccggctaatttttgtatttttagtagagacggggtttcaccatactggccaggctgatcttgaaatcctgacctcacgatctgcccatctcagcctcccaaagtgctaggattacaggcgtgagccatggtgcccaaccaatacttaactatttcttaagataatgaatattttcttatggagccacaagagttagtgagtttagaaaatgaaccctgttaacagtactttaattgagccgtctgtgttctagttctgtccagagcccccgccgttttcccctccagcacaggattcatttcaggatcatcacttgcgttatatgcccaaggggtccctctcttggtgtgtgggcagagccagagctgggaacaatgggggtggtgtgtgggttctgggctcaggcttcctggatttggcattggcctcctgatgtcatgtatcggctggaagactcaggacaaccttctgcctttctgagcctccgtttcctcaaacctgaagtgaggatgaaggcagcgtgcatggcttaggggcgttgggtgctcagcatcgtgcgtgagatgctgagtgttcaccactcagtattagccatggatgtctttttggaaatttcccacagccctccccacacagagtcaaatgtcaaaaacctgctgccaactggcacctggttctcacagctgctctctggggctctggggcctgtcagagccacctgtccaagattcaggattcagcacatcacctctgccccacccctaccggcagcattcctttcctacctgtccagcctcttctctgtccccagccacattccccactcctgcccccaaactcttggcctagaaggccctggcctgctccccaggcctcctctgctaagccttgcctacctgtccccactgtgccccccactgcctgcgcatctctggccagcacaggcgtgggaggaactatggctcttcttccttaggaagagtctctgacaagtaggactttgttttcttcccagcatgcactgcagtgcaggtgtcttaacccttggcgcacacacaggatgaaggcagagagccaactattgagggtgggaattgggaagcctcctgcctggatcatcttagaaactggaggccccttttcactcgggtctcccctgtgccgtgcacgccacctcttccagggcccactcaccctgggtggaattggatggccactttgccagaagcttcttcggtcttttgttgtcctgttctggtccattaagaccaccttctcttttctggggggtttccgcctgtcctttgctacggtacttggagacaggtgagctcactttgttctttgctttaagtctgttacctcctgagccaaggtgaggcacctccagggggcagccaggcccctgcctctggccccgcacaccctctacactttgacctttccggctgtttacctgcctggagtgtgcctcactcccctcccctcagttgatcttttactgtgctctctctatgtagcgccctcttgctcccttctaaaactccattctggaaaaactcagccattgtctttttttgtttgtttttttcctgttttaatctttagtgagcctgtgtatccatagggcttgtgaggaaaaacagcggccctttgccccaaccagcatccaccctagggacaatcactttcaactcagtggactcttggaatttgcgcccgtagctctaaaaactgtgctggctgcttctcagtctttcagctcagggcagaatccattgccttccaccaggagagctgaacatcagtgctctcgtggctccgtgagtcctcttagcccctttctctcctctcatctttcctggtagttccccataattgtgatgagaatacctgtgtaggtcagtcatcggagtggtgtgaagggatgtgtggcccagtgacatctcagctgccatttctgcttgctttgccgtgagtgttctttgctttgtttcttggctctaacccaattccaggcttcctcctgattgtttcactcttctctctggccacttatttatttatttttcgagatggagtctccctctgtcacccaggctggagtgcaatggtgtgatctctgctcactgcaacctctgcctcctgagtttaagtgattctcctgcttcagcctccggagtagctgggattacaagcacctgccgccatgccctgctaatttttgtaatttttagtagagatgggcttgctccatgttggcaaggctggtctcgaactcctgacctcaggtgatccaactgccttggccttccaaagtgctgggattacatgtgtgagtcactgtgcccagccaaatgttgctttttttttttttttttgagatggagtttcgctcttgttgcccgggctggagcgcaatggcacaatctcggcttactgcaacctctgcctcctgggttcaagcaattctcctacctcagcctcctgagtagctgggactacaggcgtgtgccactatgcctggctaatttatttatttttatttatttatttttttgagatggagtctcactctgtcacccaggctggagtgcagtggcgcgatctcggctcactgcaagctccgcctcccaggttcacgccattctcctacctcagcctcccaggtagctgggactacaggtgctcgccaccacgcacggctaattttttgtatttttagtagagatgcggtttcaccacattagccaggatggtctcgatctcctgacctcgtgatccgcctgccttggcctccccaggtgctgggattactggcgtgagccaccgcgcctggccaatttttgtatttttagtagagatggggtttctccatgttggtaaggctggtctcaaactcctgacctcaggtgatctgctcgccttggcctcccaaagtgctgggattacaggtgtgagctactgtgcccagcccagtgttcctttttctgccatcctattcttgtttcagggacagaagacctcttattggctggagggtgtccgtgatggcccttttccctgtccatctctcctcgtggtctctgcttccctgcctggccctgtcctcttttgttcgggctccttttcgaggcttgcccaggctgcctgctgaccttggtggtgtgctttctttcagaagaggtgtcagcaggccagctgggggcacccagcctgcaggaggggcattatgggggtactcgtaggttggggtccctggctcctttctcttgggctggctgggttccctgagaagagtctagcagtgctcagaggggctgggcctggctggcaccctgctgagcaccttgagaacacacatttcgcaagttcctgctgtgcccacacctacccttgccaatctgctctacttccccgggggcccgaccggcacactcagggcaggcactcttccgttggtccccacgtcaccctacttctcaaggcaccatcctgagcctgtgggggtcacttcccccactgcgtgcactcccccagacctgcccagtgtccctcttgccaagcctccaaagtctggctgtcttctttctatcatctgctacccccccaaccccgcccccaggtttagggctcttaaaagtcttaccgttggccaggcatggtggctcacgcctgtaatcccagcactttgggagactaaggtgggtgtttggtcaggagtttgaaactggcctgacctacatggtgaaaccccgcctctactaaaaatacaaaattagccgagcatggtcgtgcacgcctgtaatcccagctactcgggaggctgaggcaggagaatcgcttgaactcaggaggcagaggttgcagtgagccgagatcttgccattgcactccagcctgggcgacaagagggaaactccattccaaaaaaacaaaaaaagtgttactgttgtgtgggttggggagttcaggggagggtacaatccagccaccatcctcacctgaagctcttctctctgggaaggctcccccagcccatgcctgtgttggagagagggagtgtgcactggactgcctgcccacctgttagcctctgagatgtgtggtgtgagcccgtgtccccccgttccctgacacactcggtcttcctgatggcgtccagctccggccatggtgtggaccacacacagtgctgagccctggccatgcccacactgagctctgccccagggtccctgctgctcccaggagcctcctgcctcccagccctgctccctgggctgctgtgcccagggccaccctcagtgcccacaagcctgcccacatggccagggaccgctggcatcccacacacctatcatttcttcctgctcctgccatgggtccttcaattctgccggctgtgctttccctgacccctgtgaggggacaggcggccggggctgggctgggtgctgggctctgaactctgacctgagatctctggccttggctaggctgtggcctctgggaatgggctgtgggggacagggctttaacagctggttccccccaggttgttcctcagatccctgtgaagagtggtggtccccatggggcaggggtcctcggtgagtggctgacctcctccccgcccccaccctgggaggctcctgcgggacctgttggcagcccccacccctccagatgcccagctggtggggagggcaggtgataagggctgggtggggcagggacctgctggagccacttgctccctcctcccagggctgcacctggagggccccttcatcagccgggagaagcggggcgcgcaccccgaggcccacctccgctccttcgaggccgatgccttccaggacttgctggccacctacgggcccctggacaatgtccgcatcgtgacgctggccccagagttgggccgtagccacgaagtgatccgggcgctgacggcccgtggcatctgcgtgtccctaggtgaggggccggctcggggtgggcctgcttgggggacctgggccaggtgcaaagtctgaatccaggtcccgcagggcactcagtggctgacctgcgggcggcagaggatgctgtgtggagcggagccaccttcatcacccacctsttcaacgccatgctgcctgtgagtgctatggggccccaggggcggggctggggtcccagcagcccctgctgtcgctcagccatcccttccctcgcccctgcccagttccaccaccgcgacccaggcatcgtggggctcctgaccagcgaccggctgcccgcaggccgctgcatcttctatgggatgattgcagatggcacgcacaccaaccccgccgccctgcggatcgcccaccgtgcccatccccagggtaagctgcggcaggtggccaggacaggtaggatgactgggctagcaggttctgagcctcttctcccccagggctggtgctggtcaccgatgccatccctgccttgggcctgggcaacggccggcacacgctgggacagcaggaagtggaagtggacggtctgacggcctacgtggcaggtgagcgccctgacccactgggtcccaggtcccagcccgcatgccaggtggcccacgacccccccagagcctgccctctctgctctcaaggcaccaagacgctgagtggcagcatagccccaatggacgtctgtgtccggcacttcctgcaggccacaggtcagtgagcagcacgggtgcgggtttaggtggtctgtgagtggtgggtccccaaggggctggaccgggtgccyggactgtagcccaagctctgcccacaggagctcctgggcattgggtacttggtgactcaggcccagggtgacaggcagaccagcagggtccttgttagcctgctgcagagtccctgagacagggagtgctggtgtggttgggggctgttggcaaagccatgtgggcttggggactgtcaccyagctgtgtcccccaagcaggctgcagcatggagtcggccctggaggctgcatccctgcaccccgcccagttgctggggctggagaagagtaaggggaccctggactttggtgctgacgcaggtgagggcctgtcgcagggtcaccgggcagcctggccctgcctgtagactctgttgttcctggggcggcctggacagggccagggagggtgggtcctccctagctccctcctctcaggtgggctgccggctgccagcctcagttgtagccccgtgttgccatcaggccgggctttctggtgttgcagacaaggccaggcaaggggttgcagggagcattgtccagtacctctgtccatctgtgatgggtcagggtgtcttgcactagtcgtgtccctgggcctcagtttccccaccagcgtcgggttgttggggagcagctctggggtaggtgggcggccccactcctgccccctactcattgcccggctctgtcccagacttcgtggtgctcgacgactcccttcacgtccaggccacctacatctcgggtgagctggtgtggcaggcggacgcagctaggcagtgacaaggacctcggctgagaggacacctggccgcagcgggatgccatcagggccgggtggttggggagctggtctccagggagtgagtcgggagccctgctggattgatgcccagggcctgtgcggccgccctggaggcggtggctgggataaacgtgcacccagcaggactcgccttggctccgggttttgcttgtgctcacatgtggcaccatccttggttgccctcctggagaaggcattcacggcctggggtgggatggctgggctgtagtttagcctgggccttgggccccagtgggggacagggcctgtctgcatgaagtggaccggagacctgcagaccccaggaaagtgtcactatgggagggaggggcaggcagtcagtggctggtgccatggggtgaagccaccatgggctgggggtgaagagccggcaggaaggggaccagtcacagggagtgtggacagtcaggggtttgctttctgctcctgagttggggtgtgcagcgtggagcccacagcctggttctgggccagggcacagtgccaggggctccgctctgacctccaggagggagactgggcccgggacccctgttttctgctccctggactgcctagccctgagtgccacggatgaccagcgttctgttttctcttctcaataaccctatctcttcacacatccccaggcccagtgcttgccggctgtggtgaccctgcctggtgctggagggcagtatgggaggcaccagtgtgccctgctcaccccattagtgtcatcctgccatcttctktgtccccttggccctggcacacacccatgtggcaaacacgggccgtgaggctccctgaacagcttcgaggcgggtgggcttctggagccctcttggctctgaggacagccacagtggggtcagacgtcagggattggtgcagccccacgtcaggggtgattgtcttgactttctctccatttgagttctggggtgggtggctcccttcccccttgcttacaggtgctgtcctgggcacaggaggtacgcgcctggctctgccactgttctcttccctctgctgcaaagcccagttaaggaaatgtctccaggtccaaagagataggatggtctgggccccacctgttggaagggaacagccagggaagaaccacctgcctgggcagggcctcgcctgagggagggcctggggcagggcacaaggggttgatctcagcccacaagccccaggggcagcccaggaaagcaggcgacggatgtggatcctgacctcctgagaggtgtgaggtgcagggatacccacctctgccttgacggccgcgcaccccttaggaagtggctgtccagcgcctgcctgtgctgggcctgggagaggagctgtcttgccagggctcccaggcagggagaggcaggtgaggttctcagccgatgtgttagaggttgagcatcgcctgtgcccagcttgctggctgtcagtgcttgatgtgcccatcctcagstaaaacccagagctggcatgttggtcatccccacctcagacgggacgcccagtccagagctggtgagccctgggccagcctttgggcctggcctgccccattcaccggccagcgccccacctccctggctggagggtcggggaggggctggcagagatggttggtccacagggctagccctgggtggtgggagaggggcccagggtcagggtgagagagagctgggccagggagctgctgcaggatgattttgaggtgtgggggaagcactcttggttggttttggtttgctttttaaaaattgtggtaaaatacataacaaaagtaactatcgtaacctgagcagttctgtgacatgaagtgaattcactgctttgtgtgaccttggccaccatcattccccaccactcactcccgctgggctcccagccctgccccaccattccgctccctctacagctatgggttttacaaagaaggatgcagggcgccctgactgcggggtgaggggcaggcctgcccgcggtgtgggcattcgctgaagggggacgcccaggtgtctgcctgagttacgggttggggggtcgggcatgtggggagggatggagttggaggtgcatgctctcagagctggtaggggtggcccgtttcgtcccgtgtgtgaactggagatgagacccggcgcctgcgatcccgcagaccgcgcccggccgggtgtcacttgtgggcgcacgctgccgggatgctgggccgagcccgcggtttaagacccagatctcagccaggtccctttcgccgtccgagcctctgcacctcgtgggctccgagcacatccaggccagagactgcgtttggggcgtgggcacgggagaccgtcatcagccaggacgctctcgaccgatccggccgcgccccgcccagcctcgtagcgcaggcgctgagtccaggctgacgcgcaactctgggagcgttgcggcacgcggggccttgcctactgtgggaggggcttctgggggcgggcttctgtcgggccaattaggatcgccgcagggaaggcacgcgccgcggctgagcaacaggggcgcgcgtcaccttctctagttaacccgcgcggccccgggcacagagcccgaggctgcgcggtccccggcgggcccgcggaccccccccatctctgcgccccccacatctctgcggaccccgcctcgccccagccctcccatccacaaccctcacaaccttgcataccccgctacgctccccaccgcgccctcacattcctgcagaccccgtctccccacaacgctccccgccaacgctgcggagctccgcgtcgccccagcgctccctgccaagccccccacacccctgtagaccccgcctcgccccaaccctccgagctgctccccttatacccttgcggacctagtttgtttcgtcccagtcctccccgtcgcgtctcccacatccctgcggacctccccgcgcctcgcctctcccttctgttacgtatcacgcacaggtggatcccactacgacccagcttggctcctgtcccgcacctccgcacctggcctctagccccgccctcactgtcttgggaaatgaagcggaggggtgggccggacactctagaagcaccctggctcggagcttccctagctcggagttggtttggagcccaggctagggacccagggtgggcgcagcaggggagattggcaccagaagcgtggaggaagggcacctcttcagcccggcttttccgcccctggagtctgggacagctccggagcgtccgggtactccctcccagactggccctgttccttttatcacatttatgtcacacacgttttttctaaatgggtttacacttttgctattactttgcagttcggtttgtgtgtgtgtgacggagcctggctgtgttgcgcaggctggagtgcagtggtgcgatctctgctcactgcagcttccgcctcccgggttcaagcgattctccgcctcagcccccttagtagctgggattacaggcgcacgccaccacacctgactaatttttttgtatttttggtagagacagggtttcactatgttggccaggctggtcttgaattcctgacctcaattgattcgcccgcctaggcctctgaaagtgctgggattacaggcgtgagccactgtgcccagcctttttttttttttttttttaacacggagtctcattctgttgcccagcccggcgcgatcctggctcactgcaacctcagcctcctgggttcaagtgattctcctgcctcagccttcccagtagctgggattacaggcatgcaccaacacgcccagattttttttttttttttttttttttttttttttagtagagacagggttttaccatgttagccaggctagtctcgaactcctgacctcacgtgatgtgcgtgcctcggcttcccaaagtgctgggattactggtgtgagccaccacgcccagttttttttgtttgtttggttttttttgagacagagtctcactctgtcgtccaggctggagtgcagtgatgctacctcagctgactgcaaactcactgaacctctcaggttcaagtgatcctcctgcctcagcctccagttcctggctaatttttttagttttcgtataaacggggtttcatcgtgttggccaggctggtctgtaattcctggcctcaagtaatccacccacctcggcctcccgaagtgctgggattacaggcgtgagccactgcgccttgtctgcgcccagtttttgtttgttttttaaagagacgggatctcactatgttgcccaggctgatcttgaagtcctgggctaaatttttgtcactgtgcctggctaatttttgtatttttagtataaatgggatttcaccacattggccaggctggtctcaaactcctggcctcgtgatccaccttcctcggcctcccgaagggctgggattacaggcgtgagccaccgcgcctggtctgcgcccagtttttgttagttttttacggagatgggatctcactgtgttgcccaggctggtcttgaaccgctgggctcaaatcatcctcctgcttctgcctcccaaagtgctgggattacaggcttgaacgaccatgcctagccataattatccagctataaggtcagctgattaattcgtctctctatataataacatattcacaggttgggagattaagatgagaacatctttggagaggacattattctgccttttagagagaagggcctaggacaggaattcccagtgctcaggtttaaaggaaatatgatgttcccatcatcggtacatgaacgtgcccctttctctgcattcctaccaacactggatattttccacttttgggacttttagcagttgttgagccagcccattttacagcggggataattgaggtttaaggaggggaaattacttgcctaagatctcatgcaactttctgtttcctgactcccagtcaagtctgattctcccttggtatggcttatatgggaggatatttacctggtggcttggaaaccactgaatgactttgtatcttccatccatccatgtatccgcagcccagcgaatgtatattgggagcctcagacatgtgaccagggccttgtgggccagaggcagccaggagaccttttttttttttttttttttaagacagagtctccctctgtcacccaggctggagtgcagtggtgcgatcttggttcactgcaacctctgcctcccgagttcaagagattcttctgccttagcttcctgagtagctggaattacaggcgtccatcaccatgcctggctaatttttgtatttttagtagagacggggtttcaccatgttggccaggctggtctccaactcctgacctcaagtgatccacccacctcactctcccaaagtgctgggcttacaggtgtgagccacagcgcctagccagtgctcttgtcttttgagagcccccttttctctcacctgatctccctgccccctattttcccctttagtctcctttccagacgctactgagtagcttcagggtcagtctagagatgcaatccaggttgggatccttgctgggagagcccttccttccctggctttgtaactcagggccttctggtgtgcacacctgcagggtccaggctgggcctgtgcttctagcttctctgtgtctctccctgagattggaatcctggctctgtcctcaactagcttgaaggggggcccccaggaatggccccttctggatttcatacccttgtgtaaccttgtttcactttttaaaagattttatttaaaaagttttttttttgttagagacagggtctcactttgttgcccaggctgctctcaaacacctagcctcaagcagtgctcctgcctcagcctcccaaaacacgcccgttcactttctaccagggttgtgtgtgaccagcagatgtgttggaagtgatggtgtgtcacttctgaggttaggtcattaaagacgcagcggcttctatcttgtgtgtgttctctttttcttgggccactcgctctggggaaagccagctgctggggcttgaaaacacacacgcctgggaagaggccgcactggtgagggacggaggcctccagcccacagctgtgggaacgtgggaatgaaccttttaggaagtgaatctttcggccctgctctagcctttagatgactcagtcctggcagcatcttgatggcaacttcacaagagagcytgagccagaccacccagcctggcctctcctggattccagacccgcaggagccatgagtttctttgttgttttacacatcaaagttttgaggcaatttgttacacagcagtatataactaatacaccagctgtagggctttgggcacgttccttagcctctgcacccccgtttcctccctcgtgccatgagcattgtagaggcgagtgaggaacacgtagacgcagcacagtgccacgcacatgaggcagctttccagcccctcccgggatggttgtggtcattttcttgcccctccctggatggaccgtgacctcacaacgtcaggccaagttattgcattcttggcctgaggtcatccattggccatagacagaggttctcggcaggaaagggtgagataaagagaggggtcagtctctttcctccagcccgggtcgggagaaccgtgctgggccaggtgagacatccgctgtctgtgcggtgtcctgggatgagccactggacctgacccatggggagatttgtctgtgtcgccagagggcgaggggtttcctggtctagcttgccttgggcttggccaagcattctggctgccactggggcccccaggacaactgagaactgtcctttcttctttgaccttcagctgcccctctctcccctgtcccctggtgcctgctcagatgctttcttcttgtgacccttgacccttggcccttggcccctgccccgaggctcctccaccctgggctccgtgttctagagttcactgtgtactagttcctcaagctgtttgtccttcactgcttccgatttttctgtgcattactcaagaactgcatgggcatgtgtcagtataaaaaaaaataaagttggccgggcgcggtggctcacgcttgtaatcccagcactttgggaggcagaggcgggcggatcacgaggtcaggagattgagaccacggtgaaaccctgtctctactaaaaatacaaaaaaattagctgggcgtggtggcgggcgcctgtagtcccagctactcggagaggctgaggcaggagaatggagtgaacccgggaggcggagcttgcagtgagccgagatcgcgccactgcactccagcctgggcgacagagactctgtctcaaaaaaaaataaagttggccgggcgtggtgactcacacctgtaatcccagcactttgggaggcggagacagacagatcactggagttggagaccagcccctggccaacatggtgaaaccctgtctctacaaaaaaatacaaacatttgcctgtgtgtggtggcacatgcctgtagtcccagctactcgggaggctgaggcaggagaatcgcttcaacccgggaggcggaggttgcagtgagcaga

SEQ ID NO: 93195 - DNA, 28376 bp, Homo sapiens
cccctcttgaaggatctcaatcttctttttgaacctgattagctcctttactgggatcttttttttttttttaatgtcttgcattaatgtttggagcctgtatagtccatgctgtaacccaattgtttcctcttggctgaggctattaaactccaaatggtggtgcaaatggaaccccacatggacatgcattcttccaaggacccttggaccagccccaggaaaagccctagcttttattccccacacaatgcccctctccagcaggaagtagctagaaagaccatcgcccaacttccctaatagcagttagggtctccactcctgagaggggaaatgaagaagaaaaggaagaatcaactgggtaaactaagactagtcatcagagaagctgcctgcctgaaaaatcacaggtacttgcaaaaatacagcagcctggggtaaactcaggctgcacctgcacagagataagcagacaaggcaggcaaggttcagcatagcaaactttttgttctttgagtgattagtgggttctcaggaagaagtttcctcttcttttcaggcatatacgtggagagctctacaggaacttgcactggcaggagaaggacttaactaaaacaaacccacaattatataaacaagaaaagctgtgatttgtgcttacctaaagacatttcacagctgaatagatagggagttgtgcagatggctttatagataagaccggttattcaaacagctacagtggtgagaagagtttcatataaaagcttttgcactcaacagtaaaactgcaatccacttgggatcacttctgcactgtggagagctttctacttttgcttagtaaactttcactccaacctcaccctttgcatccatgctccttaattttctcagttgtgaaacaaaaacctaggataacatgcgaaacaatgataccagtaattggtttcagttaaataatgataaatgggccaattttctaagaattactcaagaacacttaatattacagctgtaatcccagcactctgggagacaaaggttggcgaatcacttgagcccagaggttcgagatcaccctggtcgatatggtgaaaccccatctctactaaaaatacaaaaactaattaggcatggtggcgggtgtctgtaatcccagctattcaggaggttgaggtaggagaatcacttgaactcaggaggcagaggttgcagtgagccaagattgctccactgcacttcagcttgggcaacagagcgagactcagtctcaaaataataataataataataataataataataataataataataataatttcacacaatagtgaggaacaaaattggatgactcacactttctggcttcaaagtttgctagaaagctataggaatcatattgtcttgcttagcatactaaggaatagtcacacagatgaatggaatagaggagagagagctcagaaatagacctacataagtatagtcaattcatctttgacatagaagcaaagataaaaagaaaaaagaagattctcatttcaacaaatgatagtgaaacaattgtccatgagaaaaaaaatcaagacacagactttataccttttacagaattaactcaaaatgaatcatagacctaattataaacccaataactataaaacttattaaaaaagacataggagactgggagcagtagctcaggcttgtaatcacaggactttggggaggctgaggtgggaggattgcttgagcactggagttcaagaccagcctgggcaacatggtgaaatcccatctccacaaaaaaatacaaaaattatccaggtgtgtttctgtacgcttgtaaccccaaccacctggaggctgaggtaggaggatcatctgagcccaggagatcagggctgcaatgaaccatagctgtgtgtctgcactcaagccttggcaacagagtgaggccctgtctcaaaaagaaaacaaaaacaaaaacaaaaatgacaaaggagaaaatctaggcgatcttaggtctgcaattaacttttataaaacagcaatactgtgtggtattcaaatacaattatatttatttgaagtatacatacaattcacctaaagttttaagtttaataacttttggtatactatataattaaatattaatacagtataaagaatatatattattattaacatagtataccaaaatttattaaattactaatttaaattgtagtacacatataaaatataaatctgccattgtaataactttttttttttttttttgagacagagtctcgctctgtcgcccatgctggagcgcagtgcgagcgtgtcggctcactgcaaccattgtctcctgggttcaagcaattctcctgcctcagcctccccagtagctgggattacaggtgcccaccaccaagaccggctaattttttttttttttgagacggagtctctctctgtcgcccaggctggagtgcagtggcgcgatctccgctcactgcaagctccgcctcccgggttcacgccattctcccgcctcagcctcctgagtagccgggactacaggcgcctgccgccacgctcagctaattttttgtatttttagtagagatggggtttcaccgtattagccaggatggtctcgatctcctgacctcgtgatccgcccgcctcggtttcccaaagtgctgggattacaagcttaagccaccgcacccggcccatgcccggctaatttttaaatatttttagtggacataggtttcacaatgttggtcaggctggtctcgaactcctgacctcatgtgatctgtccgcctcagcctcccaaagtgctgggattacaggagtgagccaccgcacccggccgttgtaataacttctaagtgtgcagtttagtggcattaattacaggcataatgttgtgtaactgtcaccactatcacttttcaaaactttttgtatcaccctaatcagaaactctgtaactagtaagcaataactctctattaccttctcatctcagaccctggcaaatctctaatctactttctgtctttattaatttgcacattctagatattttatgtgagaatcaaatgctattgctccttttgtcatgtagctcaggctgatctcgaactcaccaagcacctaagcttcccacagtgctaagattactgtcatgagccactgtgccccaccagaaattacttttactctaccttttgttatgatcttttttcagcatgattttgtttacctaagcacattatttattttcatcatttcagtttatcccagtaatatcaataataatgattactattatttcagcttcttacatatctcaatattacatggatagtaagagacttggaaccacagagtagtgaaaaaagacaaatataatacaatataggaaaatatagagtaggaatgattacttaataaaagtcatttgaggtgctgtgaaagtttgttcacttacctacctaagtatgtaactttagcttttttagcctgtatacattctaagacaaaagtttatcttttttcttcctaatttgatacttgtgtcataatatactaattaacaaaccacactagctgtttggacttgagtagttgtagaataactgaaaataggaaactgctatatatatatgtatgtataatatatataaccttttttcaggtactcctattgcaatacctgcatttcagcactattcaaaagtaaaataagtcccagagccaggttagtcattatgtcctatttattgctaattttcatatacaaatgagagctgtcagaattcacagcttctgaatatcagaagctcatgttttccctggtctatacaaaaaggaaataagtgaggccaaaaatgtactttaacagtgctccataatacgaatctcataaatgagctggaatagaccctgaggtcttcaagcctagtttctcaagatcgtattttgtaaacttgtgctagcagttttgaatatcacaatgattggcatgggctgctgacattttagcaggcagggctcagggtgttagatgtcctgtaattcagggacattcacagtagaaaatactttggttaggatttaaacctacaaaattgctttaaacataaactcaaaagtattcttaggctggttgcagtggcttgtgtctgcaatcccagcactttgggaggccaaagcaggcagatcccttgagctcaggagtttgagcccagcttgggcaaaatgacaaaaccccttctcagttaaaaaaaaaaaattagcctggcatggtgggtggtgtgcaactgcggtcccagctaccgggaggctaaggtgaattacctgaacctgggaggtggatgctgcagtgagccaagatcccaccactgcactccagcctggatgaggaagtgagatcctgtcacaaaaacaaaaacaaacaaacaaacaaaccaaaaggatttttgaatactttaaacatacagggagtgttttttttccccccgagaaggcaacgactgtataaatttatattgtttttaccattttagaaatactaccgtttgcaaccctgttcataatacagtgagttgtgaatacattctgtttgtatttgcagctaaattaggcaaccacttgtgtatttgtcagtgtagcagtggcggtcatttacatgccaaaatacatattttattataaatattcttttaattatataataattaggtttgttaggggccagaggggtgtcattgtgcatcatttgagtttatttctttgggaggcaaagagagaggaaaggaaggtcaaaaatggagaaggccaataaatttattttatatcacgtgtgaatttaacttgagaatggtaaaggtgtcgacacaaaatatgttataaaaaaggaaatctagttgacaactttaacttgccaaagcagtaaaccaacttcactctgggaacactgaatagaaagtgtatgttccaatcactttgaatgttttaattttaaattcggaaaagcagaaatatttgtgataatgttttgagaatggaggtatttgaattttagcactaggaaaccctttgaaggacggtgtaaaatctggatatttaatctggtttcgctgagagttcagagggaagaagtgtttgtaaaaccacgtatatggctattagttaaagccaggaatctagtactaagcttttttttttttttttttttttttcctgcctgtctgctgaatctggactagagggaggactgagaatttggccaaaaaaagtaactccttctagggcaaaagactatttcccacccactgcagcgcctgtaagttgttacgaacgtaggacaactttggtgtagtggttccttcagtaggccgatccccctcaaccctcattcttttgggcaaccaaaagagtctttcacaatcccatggctaggctggctttggggacgtagtatagcactggttaacctaggttgcagggtgcccagaaaaacaagggacctatgccagtgtgcgttaagggcctaggtcccccggtaggtgtgttatcaccagggtcattcagtatataattgtttcattgtttcgtgaaaacaagggacctatgccagggtgcgttaagggcctaggcctaggtccccttgtaggtgtgttataatcaacgtcattcagtatgtaattgtttcattgtttcttcatcactatgccagggtgcgttaagggcctaggcctaggtcccctggtaggtgtgttatcatcaacgtcattcagtatgtaattgtttcattgtttcttcatcactatgccagggtgcgttaagggcctaggcctaggtcccctggtaggtgtgttatcatcaacgtcattcagtatgtaattgtttcattgtttcttcatcctgtgatgctaaagccgtatgctcataaagcgcaggcacaccggtagaaaaactagaggggtctggagttcctaggtgaaccccagcagcctaaccctgtcaagtctgtcgagcctctggctggtcacacgtgctgcggaatccactcagctttcctcaggtgcagtcaggtccatcctgcagagggaccttctgcggacctgttctttcacctccctaacctgaagattgtattcaaaccaccgtggatcgctcacgtaaaatggtcactgcgcctaacacctgggatcccgtaacccttatctatcttggcttcagagagttttttgactagttccaactttgctgaagcttgtcaaaggtaggtgacggctagttggaacggaaaaattttacgaaacttcctattctcagaagtaaaagggaagagagagtgcttaaggaagaagggaagttgagggtgggtaaggagggagcgggagttagtggtagattgtcactgtgtttaagatttccccaaggcgaaaaaggcgaaagatatcttgctagatccctagaattcgaaggcattrggagagggcggggatagcaaacatcgcgcgaattttgagaggcgctgggactacgtaatcccgcgatcttatgactaaacgaacgcgatttagggagaagtaacggtagcgataaagggattgggtggtggtggtggaggggtggagccaacgattacgcacgttgtgcgtgctgtcgtatagctgtgggaggggccatattaccgcgtaggctaaccagtgcgcttaatagctgtaggtccagtgtaagagttccgctattcggtctcacacctacagtggactacccgatttttcgcttctcttcagggatgagtcatgtggtggtgaaaaatgaccctgaactggaccagcaggtgagtcaaagtaagcctaccgaggctttctacgggaccctttacttggcctgacggtttgtggcgcactgttaattggtttttcagtttcacttctggtgggttcgtgtgttatgtgactgggactctagggaaatggggagagaaactgcatgagaccatgacaagaccacgtacggaagggatcgtgcgatggcagtaacgttaatggtagtggttacgctggtattctggtatagtactgggcctcacgcaatggcggcttttgtgtttgcttgtcccgtggagacgcgcatgtgcgaccacgaacccgtttgtgagggggcgggggagggaggcggttcgcaaaagcggaccgtttttatgtccagggtgaggctcttatctggcgcccctgacgtattcgcagtagtgtcattgttaagaagaaagtgtattcaggccacccagtttgtgtagcgagaagaaagagtagtatggtctttgctcgggcaaatggccagagtctttgtgtatacaattgtgtgacttggcagcgctgtgttccttgagcagaggggccaggcctgtggaattcttgaagacgagtgactataatatagcacaacgtaacaagtatcctgtatcttgtttctggtggggtcccgtagccacggagcaaccgttgcccgggtgctgagcgtgccgaaactgggcttccggtatggaaagttttgtgacgcagaaggaccggaaagggatggtggggagggtagggaaggatggctgccgcgtgcttctcttgaccctgtagaaataatggaaattggacgcccgcggaaagacacctggaaggttagagatccagcattgcgctacacccctttgttaattcagtcactggacagccgcctagccgagagctgtgcggtttttatatggtattgtatctttactttaggcgatacatgcagaagtcgtccggtagaaaactaacctcgaatgttgattagcgggacaggttatttgtggtttactttcttgttatcgccgaaggattgttgatataggtttaactgtgtttccattaagggcagatcctttggaagtttgggcgatgaggcagaagataggtggtctacgtgttagatcaggctcgttttctgtgtcaggaacctaccgcgcttttgcatttggcacaccagtcgtttgcaagcttatccctgcatttctgcctcccaagtctaggggagagaatgaataaagagcatacattttttttttaaccaaaaaataccgtcggaacttcttagttgtaattaaagcttagtgatgctaaatgattttaaattttgctgttaggtgtcgtttgagggatttaatggtctgcctttgaaggttatttttccactgacgacgtattaacgcctgcagtttactgagacttgacgtgttaaatagaccacagaaatagaaaattaagagcctgggcaatacgcatttatgttttctatgtaattggcatccctttaactcttgataaaccgtgctgtctagttcactagaattaagtagtaaattcagatggcaagatttttaagtacagtagtatcttaattgatgattcatgtaatgtgatagtatcttgaacttatatatgtaagctttctacggcatagaaagtttgtgcaaaaaggtgaccaaggtgctcttggcattggtcttaacgtgttttttgaaaaaaatctattttaacgtacatggttttttcccccacccccgccaccgcttcagagttgttctaggtaaggtattatgctgaaagcccttaaagcgaaataaccttttttctagttttaaaatccatcagtataaggaggcatgaattgagattggatatgtcattttagaaacattaaatacgagatgtgttgctttttaacttcgcaaccaaagacctccgaatttgatgtttagaatgggagaaataaatgctaccatctccataaagtatcgaacattaagtgacagctgtgtaaagccgcgtagtactcaaaacatagtgaagtttttttttttttttgagcttttgatgtttaggaatttatctgcattaaaaatagttgtaccgtcttcagggcaaagataaattaaggaatcttcaaatgattttaatgtccatttatttttagggttagaatatcaagaaaaccactgtcattgggaacatttcactatcatgactgtagctaaattggatgttgaagttactgagaaattgatggtaaatttttttagttaggaaagttttcacttcggaaaattgttaaggaaaatttgttttgaattaatgaatttgaactcattactgtgaaactgctggtattcagctgatgccatttgcatttgtcatggttggtagacctggacatctttaaaatttggcaggtaataccaggccgacatggcagctaagtttgtggtacaggataagattggaatctaggtctcatttgtcttttgtgatgttatctgttcttgtgtatcagcatgtgagctattgatatctcttctagcttgctaatctggacctgaactctgaaaaacagagtggaggagcaagtacagcgagcagtaagtaaaactttttttaaaaatggagtgtttatcagagcttaatgttaatgtcttactggacttgttaattttaaatttacatttttttctttacaacttgactakatgaaaatatgagatattttggtgtgtctgggtaataaaatacactgtttacctatgtctgctgaaaatacaaaaaattatcctggcgctgtggtacgtgcttgtagtcccagctactcatgaggctgagatgggagaatttgcttaagcctgggaggctggaagcttcagtgagctgagatcaggccactgcactccagcatgggctacagagaccttgactcaaaaaacaaaacaaaaaaccaagaaccttaatgtaatacacattatttttagaaaagcagtgccattcatttctggcccagcatgggatataagcccatccttgtgaattgacctgcattgtgttaaacctaatgaaagaactttaacctgtgcatttatgtgctacacctactgctgttgccgacgaagaacctaacattcagtgataaaaccaagctcatctgattttaaggtgatgagttagctatattcctgtgaaaggaaattagttataaagacattcttttgaaatacttggtcttgtttggttttggaagattgggtgaggttagtatttggataggagagtaaggctggtggttattcagtagtatccctggtttgagtccaggtttcttactgttgttcaacaaggaaagtagttggtatgctttgaaacaaaacaaaacagaacacttttaagttttataaatttatttcaaactttgtcgttatatgaacattacagatatttaaatggtagagacatttttggatatttagttaaatccaaaagtaggaggtttagttcaaatttggatttttgagttacaaaatcaggtagttaagtactgtctacttcataagttcttttacttcttaatcatagactggcctgttgatttaactgaaaacacttgatttgttttccagatcattttcactttccaacttttcatgtgtttttatggtatcactttaatctaccagtacagaattttttttctttttttgagacggagtctcgctctgtcgcccaggctggagtgcagtggcgcgatctcggctcaccccaagctccccctcccaggttcatgccattctcctgcctcagcctcctgagtagctgggactrcaggtgccggccaccatgcccggctaattttttctatttttttttagtagagacagggtttcaccktgttagccaggatggtctcgatckcctgacctcgtgatctgcccgccttggcctcccaaagtgctgggattacaggcgtgagccaccgtgaccagcccagtacagattttttaaaagcctcttactggttagttaatttagtatagcacataagagtcttttttccctagtaggcttttatactggggtaattaccatgtttaatggtcagtgttgattcatgaagcagttattggaaatagatccttttaaaagataattgttagataaccactactagctactgaaatatttgtggtttgcaatgtattttagagtaagcattttttccgctcatcttgcaaagtagtttattgtataaaatacaggttttaaaagtttgttttccaggacctattttttaatagacattttctaaaagcagtatcttggcgatgttataggcttctaattttacattttctcttttagaagggcgctatatacctcctcacttaaggaacagagaagcatctaaaggtacgtctttaaggcaactttgtagacctaacctttagcagctaatcaaagcctagggaagaaagtaactttaggaggtctataaatgttttttgtcccctcctgtgcctctttcagactgtctttaagaactagcactttctgtttttggaacagtttgtataatgttgaatgatggatagttgtttcctttggcaaactgagcccaaagaatctgagttttgtatagtggtttatctgtttgtaaacatttatgttttgaaatttgaaaccagtgtatttgtggaaatgccttacgtaaaagaaactgtgtagtgataaagacctgcttgctgctgtctggaaaagttagcacagcaaaagtgggtttttttttttttagactagttaacagttgttaagattaccacttttggccacatccaataagctggtgagattgtctggtttcagcctaaacaacttcatttgaaaggtgttgcatgaaatgccttaaaacacttaggatggtttactattaaatttgtaatttagaaaagtttaattggggtgatgttttgagtgctgcatatacatcaaaaaaattctaggagaaggaaaggtcaggaaaagtatttaaaaccaaaaggaaagaaggtaatgataaaggggtgtggagtgggtttgtatttctatgtttagtctgtagcctctttaggtctgtttatcagaagaccacttagctaatgattgtattattttttcagaataactggagaattgttattctgaaaaaatattgcatctggctggaattgcatcaaaggtttattaactgccttaaggagagttggcaatattttagtatttgaggggatggaagagaccttaaacatctaacttcctaaatctgggaagtacaatcgatttagtacaatagatctagatttaggaagtacaattattcatttgtctaatattggagatttaaaagcaggggaaaataactttattaacttgtaactttaaacattcattgaaatgtttgaatttaggtaagtgtgtggttgtgaagtgagtttactcttgtcattttttttttatcagtttgtagacatggaaagtaggcaacaatgagggtttttttgttttaacacaagtataccttattcttaacgagcatattaagattacatagttacttttggacttttagaatttgaggctattttagaggtctggtagagcaaagtagacaacatggaaattccttgttttgtattgactacttccatttagctgatctgtttctttttggtgttactagacaaagctagattttaaaagatgaattaagatgctcagctaactagtcctgtttatagtattgttgatagatagcaagttgacttctccaggttcttcattgaatgagtccttgtttactatgatgcttgctacatacagttgctacatactactatgtatgagtagtttttggtcataaactgcatagagttggagctgttttttttttttttttgagacggagtcttgctgtgttgtccaggctggagtacagtggcgcgatctcagctcactgcaagctccacctcttgggttcatgccattctcctgcctcaggctcctgagtagctgggactacataggtgcccgccaccatgcccagctaatttttttgtatytttagtagagacggggtttcaccgtgttagccaggatggtcttgatctcctgaccttgtgatctgcctgccttagcctcccaaagtgctgggattacaggtgtgagccatccctgttttaatccatctgacatatttcttctgattatgtagctctcttagttcaagcttttctgtaggtaacccacagtccctgaggtaatcttttacttagctgggccttcccaaaatgtgtattatatatagcatatgttaaatgtttaggtttaacaccttttgtattattcaggatttgtcaaggatgggacataactaagaaactaacaatgggcttgcactagctacaagttcagcttaaaaattgggaacttggaatccctcttagtcatagcttaaaaaaagactcatcttaaataatttaattggagtaggtttatattttggatatgtaacatttacacttaaaaaatgaatgaaaaaaattgttacgatagtatagtattaatagcatagctatgttacatgcaagctaccttgttctcaggtcatgagattactttgcttcatataataatctctggtggaagaaaacattaaagcttttaacaattctgcttatgggacttgtagaccattggtcccataaagataacataaaggaagactacatgtgaaggacttcatattttgaaagatgcaaattattcaaaagtcttgtcaccttctgatttttgcttttttattgaaggattccatgataaagacagttcaggttggagttgcagcaaagataaggatgcatatagcagttttgggtctcgagattctagaggaaagcctggttatttcagtgaacgtggaagtggatcaaggggaaggtaaatctcagcttgtgtttgtatacagtagaaatttagaaattttaatttggtaggttctcattcttcatactttcagtggtcaagcatatctttaacagattactaatggatttaaagcagaatgttggtttactcattgttttgttagcagtaagaggtctttattaatttattaaattagatgaatatggtatttgacacagtgaaatctgtttcaacttaaatgatacttaaagcctgtctgtgacagctttaaacacttcatttttgatgtgtgttataagttgatcttaaaaacctaatggctgtatttaatcctttctgtttttcacaaataggagtaaaactctaaaaatattctcttgtcacatgtctactttcatataaaggagaaattcaagtgttattcctgctttcctactagtaaatatatttagatgatactattttaaatgaagatgtaaagtacgtaactagttataagtatctaaaaacctaattcttagcatgtgaggtctaagctgtgtgattttataaaaatttttataattttcttaaaaatgaagacataaattacattttaagtactggttaattagagggccttacttcacatgagaaacgaatattgaattgccagtatcttcgaagggtggttgtgttcagtaattcaactgatacccaagtacgtttctagagcgatgataatctaacatgggctaaatcgtgtacttctgattgcttgtgctattcagatttgatgatcgtggacggagtgactatgatggtattggcaatcgtgaaagacctggctttggcagatttgaacggagtggacatagtcgttggtgtgacaagtcagttgaagatgattggtcaaaaccacttccaccaagtgaacgcttggagcagtaagtttttgaaatgtatgttaattgttatgaaatttattgcttagtataacatgtatgtaataattgtttgatttcagagaactgttttctggaggaaacacggggattaactttgagaaatatgatgatataccagtagaggcaaccggcagtaactgtcctccacatattgagaatgtaagttttttgtttgactcttaaagttattaatgcaaacccattggattatgaaaaaaaaattaatgtcattgttaagaataatcctggaattaaaaatttaccaaacttatgaagcatccattatttttatttatttatttttttgagacagattctgttctgtcacgcaggctggagtgcagtggcatgatctgagctcactgcatcctccttcctgggttcaggccattctcccacctcaacctcttaagtagctgggactacaggtgcrcaccaccacacccagctcatttttgtacttttagtagagacagggtttcgccatgttggccaggctggtctcaaattcctgatctcaagtgatcttcatgccttagcctcccagagtgctgggactacaggcatcagccaccatacctggcctccaaaaacttttttcaatgtagattaaacccaggcattttcttaaaaaatgccatgaatcttttactgaaatcatagcatctgtaaactaaatcagacagtttagttggttacttccattaatatgttagtataaaacagaaattgcgacagatacagcattttatatctgctatgtttacttctgtatttacttgyatttgattaacctggttaaatttcttggcagtttagcgatattgacatgggagaaattatcatggggaacattgaacttactcgctatactcgtcctactccagtgcaaaaacatgccattcctattattaagggaaaaagagacttaatggcttgtgcccaaacaggtaagcttactcaatacaaagtgaaagttaagaatacctgatcagacttactttaaaagtagtatgttctgaaggggatgtctgaatcctgtgtttagcatttgaggtaggtaaagattagctgaggatgtgtctttttgtgtatacctttggatccttgggatgaaactaatatttttatctggacatcttgaggaagcttatggcaaaatcttctttaagaaatagaactgcgtattttacagttaactccacgggagttagcaaactgcagcctttaggtcaaacctagctcttgtttatttttcaatagctgtattgaaatatagccatacccattggttacgtctatagctgtagaggttagccagagatgtggcagagagactggcctgcaagagccatgtggctctttacagaaagttcactgacccctgttttaccttctaacagtatgtagtgattacaaagaaatgttgaactgaaagttgatgccacttttcagaaaaatggttgtgttttgtacaaattgaaatacattgtttaaaaataaagcacagtactcactttaggtttgccatataaatttactgtaacttcctagaaaattggaaataaagtaagaaaaattttcttacaattcaagggcatttagaacmctttgtcatctgttaatattcagaaatgataagccagtgttttgttttcaggatctgggaaaactgcagcatttcttttacccatactgagtcagatatatacagatggtccaggagaagctttgaaggctgtgaaggtaaaggttttgttataaaatcagacatttttgttttaaaaagctttgcaaagccctgttgacttttctaacggatgccagatacaccttattttcatttttttttttttacccctttcacccactgaaaataagtttgtagatgtaatctgcaaattataaagagaaagtgatgaatttttaaaaacaattgaagttttgggttatgaatttaaaattatatttatgttttaggaaaatggaaggtatgggcgccgcaaacaatatccaatatccttggttttagccccaacaagagaattggctgtacagatctatgaggaagccagaaaagtaaaatattcattttagtgattattgcttttcttatttgtcaaatgatgttgttatagtcactgacatgttctttgcttaaagttttcctaccgatctagagttcgtccttgtgtagtttatggtggtgctgatattggtcagcagattcgggacttagaacgtggatgccacttgttagtagccactccaggacgtctagtggatatgatggaaagaggaaagattggattagacttctgcaagtatgtcagtttttatatatggggtgcatctatttctgtattaaaagttgattacttttgttgtattttactagtactgctttaacttcaataatttaattttctacatagttttgaaaattgcagttaacgtttttgtaaagagtaagtgaaattttatttgaggctctgagcttcattttaacaatcaacatgggtaattcggttgttaccttgagcatttcatctcatgattttgtgtgtgtttgtgtgtgtatgcatttgttgagtatatgtcaaattgtgacactgcaatagttactacttgagttactatattagtgcaattaattacacaactatatatagtaattagtttctcagatctaataatccagtatcaactgaggkttttcgtaataggtacttagtgttggatgaagctgataggatgctggatatgggatttgaacctcagatacgtcgtatagttgaacaagatactatgccaccaaagggcgttcgtcacaccatgatgtttagtgctacttttcctaaggaaatacaggtactgtttgacgtttgaactttcattcagaacatttgtgtttattcattatcttcagataatttatgtattaaaataggtaattgagtatttttctcactgtttcagatgcttgctcgtgactttttggatgaatatatctttttggctgtaggcagagtaggctctacctctgagaacatcacacagaaagtagtttgggtggaagacttagataaacggtcatttctactggacattttaggtgcaacaggtaaattatgaataagaatagtgtcagttacatgtaaagataatctctttacatatcttctggcctttcctgtctttctaaacatggctaaaacaatgcttacattaattggctctgtttgcatgcatccaagatgtattttagcacaaggactagaattaagccagttaataatttagattaagtagtgatgctaattcactgtgagtaaacaaagccttataatttttcagggagtgattcacttactttagtgtttgtggagaccaaaaagggagcagattccctggaggatttcttataccatgaaggatatgcttgtactagtattcatggagaccggtcacagagagatcgagaggaggcccttcaccagtttcgctcaggaaaaagcccaattctagtggctacagctgtatgtatattttattttttaatttatcatgtgtggatagtgctttttttttttaaaagaagttaatttttcaggtggcagcacgaggactagacatttcaaatgtgagacatgttatcaattttgatttgccaagtgatattgaagaatatgtgcatcgtattggccgtacaggacgtgtaggaaacctgggtaaggggtttgttagttcatttttttttaattgtgatgcatacagccaggatttgacacagaatcttaaaaatagaatgtttatttttgaggtaaaatttcatatcagattaatcagccaagtaaaagtttttctttcagtatctttgatttggttatattacaaattacaatgtcgtattttagtttctttcttactatattttatacaggaatataagaatactccactactttatggaaacttcatgtactttttttgaacactttaggccttgccacctcattctttaatgaaaaaaatatgaatattacaaaggatttgttggatcttcttgtagaagctaaacaagaagtgccttcttggttggaaaatatggcttatgaacaccactacaagggtggcagtcgtggacgatctaaaaggtacacactgtttcgagccttcactcttgttattgcttactaggggcaagaagctttcagagttaacttaaaagtgttaaacagttattttcaacaataataaacattttgggcaagggatgattattagagagggtgacaaggaattaagtgttaggtccttactcctgagtcctttagaaacactgttagaacacattgggacattaatgggatggttcccattggaacataatggaattgaactgaaaaatcaaattgggaattgcagggtttaagcagtaattttcagtttaattgaactttgtacttaacactgccatgccatatttttgcttacagtaatagattcagtggaggatttggtgccagagactatcgacaaagtagtggttccagcagttctggctttggtgctagtcgcggaagcagcagccgcagtggtggaggtggttacggcaacagcagaggatttggtggaggtaatgttaatttttcttttaggaagggctttttgttkttcttttttttttttttttgagatggagtcccactctgtcactcaagctggagtgcagtggcctgatctcggctcactggaagtgactctcctgcctcagcctcctaagtaggtgggattacaggtgggtggcaacatgcccagctcatttttttctatttttaatagagatggggtttcaccatgttggccaggctggtctctacctcctgacctcatgatccacacaccttggcctcccgaagtgctgggattacaggcttgagccaccgtgcctggcctaggctctttgtttttcttacgagttctctttttcaaagcataattcattggggagatttgatttctgagggacacaaaatccaactctagatttcttttactggttttatgttaaagtacttgagaaaaaaaaggtattaacgaatgacttaatttctctctaaacatttttcttgataggtggctatggaggcttctacaatagtgatggatatggaggaaattataactcccagggggttgactggtggggcaactgaatctgctttgcagcaaagtcacccttacaaagaagctaatatggaaaccacatgtaacttagccagactatattgtgtagcttcaagaacttgcagtacattaccagctgtgattctcctgataattcaagggagctcaaagtcacaagaagaaaaatgaaaggaaaaaacagcagccctattcagaaattggtttgaagatgtaattgctctagtttggattaaactcttcccctcctgctttagtgccaccccaaactgcatttataattttgtgactgaggatcgtttgtttgttaacgtactgtgactttaactttagacaacttactactttgatgtcctgttggctcagtaatgctcacgataccaattgttttgacaaaataaatttactaaacttggcctaaaatcaaaccttggcacagaggtatgatacaactttaacaggagtcatcaattcatccataaatataaaaagggaaaaaaacttaaggcagtagtctgcattaggactgtttgagttttgcagacttggggttgggagaacatcttaaagcattaaagcatagttttttgtatggccaaccttactaaattaagttctgacttgctcactctatcctggataggcacttgggaacttasactctttaagccattccagtcatgatgaggtggaatgtatcagtataccaattaatatttttgaaagagytcttttaggttaatttaagtacagcaatttctcatgtaatgtttagggagtttattctaacctaggcaaacggcatgctatcacaagaaaggtttaaagctttgataaaatgggggagatttaatcagtttttttaatgcctgctataaaaatttgaaatattagaatggccgaccatggcagtgaccaggcctcactacaggcctggttggattctggtctttaatgcatgctagtgttgatgttttttggtcaagaacggtttaaacaggaaggattgtgcagcaggctttaatttaatgtagattcatactgctctgttaaagctgcattgaaatgttaaaatggcttacacttgcagactttgcaaatcttaagactaacaaatccttgaaatcacacagcttgcaaatacgtactaaactgcacaaggtgtgtgttctatatgtgcagttttagcgtattttagttgcataggtttccatggtatttatagtctcttgtgctaaatttggccaaagatgattgtccaccactaaaaatgcctctcccacttggaattctgtactgattttgtggccagatgcaatgatctttaaaaacaaatcttttcaatggcataagaagttgacraaaatttcttaaagtgcaatagattttcaartgtattgtgccttgttctaaaacttttaagtaggtgcacttgacagtattgaggtcatttgttaaggtgctatttcaattagtgtaggtttagactcttgtacatttctcccataactttttacaaagtattttgttgcacattcagagaattttatatatatatgtcttgtgtgggtgtcctcgaccttccaatcttatttcgtctcttggagattgttgaatgcagccagtgaagaagtagattcctaaattttattggggaccatggaatggtagttgagaagaaaactatttgcacacaacagattttagatactttttgctgctrgttgtgtaatatttattgaacattttgacaaatatttatttttgtaagcctaaaaatgattctttgaaagtttaaagaaacttgaccaaaagacagtacaaaaaacactggcacttgaatgttgaatgtcaccgtatgtgaaataatatattttggggtagtgtgagcttttaatgttaagtctgttaaacttgagtcaaattaagcagacccggcattggcaatgtagctgtaattttctgacaaaatttaagacaaaattgtcaacttgaaactaaaacatgccaaggttttgatatacttgtcttaagatattaatgaaacacttctgaacactgataggaagtgtccacatccacaaagtttctcttgagttttgttatgtgttttgttgtgtttgattttcagtgattgtctggtatatttacagtcctcaaacatggttatttctgtcagtgacttaacattcggttttatcagccagcagtattcttcagtaaataaagaatggaattgctgaatgtaatcattgaacctcgagtcactgtaaaagttcagtaattgcttattgtattagttttagatgctggcactgcatgtgctctgtttattctgattttactaaaataaaaagttcaaaagtcttcctgctgtcacttgtagcttaatgttgagttgaagatgaacttgtgctcttaacctgaagattggaaatctgatttcttggctacctaccaaagctgtttgtgaaataccgtcctgaggctagaagtacttctttgccttaatgacgaaggtggtagaaggttggagttgtgaggcaggatttgtgttctgactgatgtgaatctaaaaggtctatacatgcagcatatattgcattttggtctaagcaacttaatatgagtgtgattgctattttaagcatttttgatgtgaaagatggctgaactaaatgaattgggtaaaaagtcagttgcctaacaaattactttttgattgtaagtagttacttaaggtcaagaattaattggagtaggttaatgatagctgagaatcgcataagcacgttttgtccaacttcttttttctggtggctgacaatccctttaacacattgcagcagttagtgccgcttaacaaacacgataggcaaactggtctaacgtgttaatgtttgaaatagttttttttaaggaaatcaagaacctcagtgtccctttgtgtccccttttggcaaccaacctcaaactgcaaaggataagcactgttcttttaacagcacacataagctttagtctaataaacttggtgaaaatgaacagttttttttaactcattttttgcactaagtgttaacgttcgtgagatggaattacaatgttccttagatttttaacattctgatagctgtgtggaattctgttgtgtaaatagcacctaatttctagtttgtagcagcaacaaactattttaatatgattatggtaaacgccaatgctccttcatgtcttacctgttttcagtaggtactactggttttcagaagtatttatgccgttttgcacttggtctcacagtttatttgtggttgctctatattctcaacattacttggtttcttacacaccttatatatgtaagtaggtgtgttattttaatttgtatttatcatcctgatgacgattgatacgacacgagctgtgttgaggttcacgcagttaaaaagaatttgtccttatcaattacaggcacacttagtaaatgatctgatttttgggtactgctatctcccgataaaagatacaatgtaggtaaaattggatttgcaattaagttgttcagattggttgatggtaatacagtttagttaacaatttactattgatgtttgaagattagtaaataaatatttgtagaacacatactatgtggaaattctgcagtgaactagccaaatagtgaccaaattaaggtaactttttctagcaatggaaatggtctcccatttccttccctcctgctcaggtgatttttaggtgtgattttccactgaatcattgtatttgtcttctccaggactgagggctcagaaattgaatgtgcgtgtgtttgcgcacaagtatgtgtatttgtcttttgaagaccacagtggtctaatgtccatttttaggagtatgagttctttagattcagagaataattgatcagtcaggatctgagttccagcaagaagtatagctggaatgatctcattcctattggacaaatgaagtggatgcatctctacagcagtcacgagaaaagttagacaagcctgtcctgcaagaaaatgtgaacttgaaatggtactgatgtgtgctatgtagcagttctctgtatgaaaaatgagcttttagaactttgaagacaataacagtatgtttacaaaaaatgaacatattcacaatgatgctgttatttaatagttgcaaggggagatgaatagatttctataatgagatactatgtatttgaaacagtaaaagttcctgtatccccctcacaaagggtgtgtgactggggagtggctcaatccttaagtgtcccacagctccaaaccttagggggagcatgcagacaggcaggtcttggcgagtgtgggatgtgacctgttgtgtacagctcttgaagcccagtgggcatgtcgtacagtgtgttctccaggttttgccatctgcaggcaggttgtgctaatcagctcagttagaccctctgccttattgcaaggatagaggactttctgtgtcctggattcttgtcttagtggaccagaaaaatcagatcacatgtgggcttggagagtgaatgcaaggttttattgagtggtggaggtagctctcagtagatggatagggagccagaaaggggatggagtgggaaggtggtctcccctggagtcaggctgctcagtgcctgggctgtctcctttgacccccctctatggaatttccctcagcatgcatgtcattccactgtcagtggcctgttgccgtctgtgtattctgccagtgtgttcctcttgatgtccagatgtttgtgtgtgtgcctagtatggtcttggggtttttataggcacaggatggggggcatgggaggccaggatggtcttggaaaaatgcaacatttgggtgtgaaaacaggagtgcgtgtcctcacctagggccgtgggcatgaggttggagccctctcaaggaccctgcccgtctctacccagcacttctgccctcttcttgtatcatttttcccctctgaagaggtacatgtaactgccataaaaatatggagacaaccagtcttagctgcttcctgctgatggggcgttgtttttgggaaaacagattcctcccagacagaggtctatctaagggctcacattgaggctctggttgcctttctggagtttgatgacctctatatgtgagaggaaaaaaaaaactttataaggttaagtatgcatgcgttaaatgtgtattatacaaggaaaaatttagtgctaaagattacagagataagaaatgaaatatactaacaacaacattgtatccttagctgttttaccctggtgaaagaaattaaatcttgtatagggtcagttaaactttagaagagaggtagctattgtagccatatctttagcaattaacaagtgtgccctgcctggaaattctggtgtttgtagtcttgtgtggtggtcattaaagcttctgcctctcttgtgcctccctttttctattgtaaaagactgaggtggtcactttcaggaggtcctgtaatatactacctggccccaggaactgtttctccaacttcctcctaatatcaggggctgcctgagttataaatttatcctttaggattagctgtcccttgattgagtcaggagatagagaggtgtactttactagggcctctctcagcctttcaaagaaggcagcgggattttcatcgaatccctggttagtcatggacagcttagcataattgagaggcttggtcttcatcctatgtaagccttccattatgcacaccagaaagtatctcctcttccagcctgccatctcatgactgggatcctatttagggtcattcactgatactgcttttcttccagttggataatatttgctcccttccctgacactatatgtgatgcaaagctcatccccaaatctgtctgctgcttgcagagtggcctgcttctcagtgtgcatcaggatctgattccaaagtaacataacatctttccaggagagttcaaatatttgggtgaaattctggaaatttgctttaagttttatagggagaaggggacctggacttgggccaaattcactggacatctgttggaggggcaagagtgataactggggcttgtttaggggagggatttctaggagaggacaagtgagaggctgaagctcgatagggaggttggtgtggacccagaggagcagagctggagggagctggctcctctgctgggggtgcttctgggactcagatcttttaattcccctgggcttgccccttccagccttccctgagatggcaatcaatcctacactgttggcaaagttctggattgccttgcaaggtatagaaagcctgcatatgtgggacgcagaccatatgtcttcacgtctatgaaaaagttccaaatgtcagatggtataagggtgagtggttccttcttggggtgaacccagtttataatttgtccaaacctttgtgcaaagggatatgaggcatttttgctccagattctgagggtcaaaatggtctcaatggttcaggacacactgcagaggagtagaaggtggggttggtgaaaagagctggttacccattctgaaagacaggaaatttatcattttctttcatcagttttgctgaagcaaaaactcagggtttgatggagaaagaaagctagtgccctcccttttcttccacctcttatccctgagtctcagggaccgtggcaggtgctggccacagataccaatgtggtgtgttcccatgaagcagggaaaatctggagaataggaattaaccaccctcacctctgcctccttttctccctgctgttggcaaactttgagttccctaggcctgtttatgccatggagtatggtcttcttccatgggttgagggtttagtctacaggaactgatgctacccatttacattgtgcctgtggcctggctttggatccctccagcctggtctttctaaggtctcagcctgaagcttggaatcaggattgggactgaaaagatatttcagagactctttctatttagatagtgtctcaaatgagtgctgctgaatttggttatcagccagcaagggatttcctttgttaacttccctatcagaaataatgttgggaagagggagtcctctcacttagaaaaggaaaaaaatagaaaaaacagtttaagggtcaaaaggggaatgtcctggggaaagaactccttgctcagtgtaagaggttccttttaatccttgtatcctttcccgggttcagactgtgttgaattccttggccaggggaagaaaggttctgttggcatgacaggccataagtgcccacctgccagctctgtgaggtcccggctaccaccgtggttttctcttaccttcgtcagctggtggctgttaagtacagcctttgcatgctgtgaacatgtccaggtgcccaagctggaaggagaaagggtaaggggagtttccctgagctgtgtgcgtctgcacgtgtcagggtggaggcagagatggcacctctaagaacaatttgtctgatttgcgtttttggcagctgagcattgccacagcctgtagcaaaattctttaacattataaaggaagagataatagccatttcaaaccatgacagagagaaaagagacaaagtcggggttttgaccagcccggttagggaaattaaatcttcttgaaaggaaacatccttttatctgcaggaaagagagagaggtggcaggattttgggaaagaggcagatctgacagtttcacatttgctcttaccttctgggatcccagatgacccccagttgaaacaggaaaagttcccttatccccctggcagggtgtcagactctgggagtggtcctcctcttcagtgtcccgcagctcaaacccatagggggagcatgcagatgggcagattgtgggcagtgtggggtccaactccatggcagtgtgtaggactcagtgtttacagctcccgaagctccagtgggcatgtgttgcggtgtgctctttcagctttaccgtatgcaggcagcttgtgttaatcagctcagttagactctctgccttatcgcaagggcagagagctttctatatcatggggttctttccctagcccacaggaaaaatcagatcacacatgtgcttgtagaatgagtgcaaggttttattgagtggtggtagtagctctcagtagttgggtggggagccagaagggcgatggagtgggaaggtggtctttccctagagtcgggccactcattggccaggctctccttagctgaatttccctcagtgtctgtatggttccactgttgatggcctgttgat

SEQ ID NO: 93196 - DNA, 56538 bp, Homo sapiens
gaacaaatttaatttgttcaaaatcactgttgaactaaggggaaggagcagaagcagctattaaacatgtattgaacaccattaactaggcacacttgagcttgctaaaatgggttctcttttttttgagactgagtcttgctctgttgcccaggctggagtgcagtgggcaatctcagctcactgcaacctctgcctcccaggttcaagcaattctgcctcagcctcctgagtagctgggatcacaggcgtgcgcaacaatgcctggctaatttttttatttttagtagagacgggggtttcaccacgttggccaggctgatctcgaactcctgacctcaggtgatttgcctgcctcagcctcccaaagtgctgggaattacaggcgtgagccaccacgcccggcctaaaatgggttctatgagcatcaaataagatagcccacaaggctgatattaacccccattttacttagaagtaaacttggagcagtcaaacaatagccgataagtagaatctagatgtaaactcaagtcagactgacttcaacatttttgcttttctcccagtaaaagctgccttgagggcctcaagaggttcttgagtccatggtatttacaacatgagaagagttgccagtgagaagaatcacaaaatacctgtaataataaattgtttcagatgaatgaaacctcatctggtcttatcttgtacccaaaccctcccattatgggggtctggagagattctgtgatttttccaaggtcaaatgattattatgtgacagagccagaaggcttcactgaacaagcataaggcgctgggactgagagaagaagaaagcatttccagccccctgcgcactaagcatgtggtctgggaagtcctgtagcctctctggacttaagtttcctcatcaagaaaacagaagacctcaggtgataattaactgagaattcatacaataaacacaccacacaatttccctgagacttatttccttcctctatgaggataattattagtcgtgttgctaaagagagagagaccgcaagagagaccgagatatatagagagagttctctaatgtcccccacagaccccagcaccaccactgttggccagactgggcccacagtaagcaattctgggcagcctatgtcagactttaccctgagttccaccttgcgcctgcgttggcttttttttttttttttttttttttttttgaggcaagagtctcactctgttgctcaggctggagtgcagtggcacgatcttggctccctgcaacctctgcctcccgacttcacacgattctcgtgcctcagactcccaagtagctgggattccaggtcgtgcagcaccataactggctaatttttgtatgtttaatagagattgggtttctccatgttgcccaggctagtctcgaactcctggcctcaagagatctgcctgcctcggcctcctaaagtgcagggattacaggcgtgaaccaccgcacacagtccccgttgcccttcttggtataggagagtgtattcgtcagctattgtcacaatatttgatatagtttggatgtttgtcctctctaatctcgtgctgaaatgtgacccccaatgttgaaggtggggcctaatgggaacggcaatcaatcatgcaccccttctgttaaagttccagtttcctcccctgagtaactggtcaggattaggggaagaaacctggcctggaatagaagtttaagttattagattctccacaactaagtcagaactttccagaaccttttcacaaacaacagtcccagatacctatgtttgaaaatggggactaaatatctgttattttaagtagtccaagagcttttacactaaaagaaatgaataaaatattactctcctcagtctcccatgaattctgtatttcactaaagcatctcaggtgggaaatcctcctttttgcatcccacccttttggggaaggactgatttcgccttggtttttgttgagatcagaagacacagatatacctttaaagctccccatcagaattacaatccagaactgtatttccttggtttccagttttgcagtgaatcagtttcttgcctaatattcacaggttcactacatttgagacacagctaggtgggaaaaaaacagatgccatgcaccccctagtctttcaccaaagagacgcactaccctaggtgtttcaggtcacttccagagcacttctgaccatttgaaaaggccctgctttgtgaaatttggcagggatgagtatgagcctgcattcttccttgaagaactgctcccttgggaggcctgttgtttcttctcagaaattgtaatctattgccacctggtggtcattctgtcttcgagtttagaatagcaagaattggacgtttcaagatttgcacaaggagatttgcccaaacacaaatcaccctgtcctccttgattcatttatttgtattagaatattttcatcttctgactatcaagggggaaggaccatttgccagttatccgaagaatccagctctcttctttagaaaaagtggctgtaattcctagagtcctctccagccttccagcattctgctgtcacccctcccaccccctctcacccttttaacattttcctgcctcccagctgtgagtgttgtgtggtctgttgggatgggggtgtggatttagctatgatccttcaaaaaagtccagaataattcagggaactatctttaaagtacaaaaacagcaaatggaccttagctccgacttaagcagaatgaaaggttaagtaacgcttcccccagttctcgtctcgggagacagacgtttaaccggtgagcactgccattttttttttcctttctggtcataaattagacacttaaaatagattttaaggagccagctgaaacgaaccaataccatggctctaaattacgtttcctggaggctaaaaattctaattgcgtcaaaaaaaattgacgtgtcctgtctactcaccttgactgaccacgttttaggcrtgaagatctccccgcagcccgtttgggcgctccttcaacgcctcacgctcctcctactcacccgtttttccctttgcagaaaaggcttggccccaaatccggttggaatatctttaaacaatcccccacccacccacgacggggaaaggaataaagggcattgtgggcggagggtcgtgttcccaagtcccagcggtggttgacctaaggaaacgttatcctcggcagacagggtggagtagccggggmtgcaagctcgcaaatccctaatgccggagagagactggaggggtcgcatatcgccccctccttcttctgcctttgagcgccgcgttcccatttcttcaaagcgcttcaaatacaatcgaaacagctgggcggacaccactcccttccgggccacccctcatcaccggttcgagtccccggagaggatatcttttttccacccccattatcccaagaatcctcccccaggaatgataaaagattaaaggaagagtgaaagacataaacaaaaatataggtttcaaatgttgtttagagccgaatgacaaccacggccactcttagttcaaattcctaccggagagaagagcagtgggcgaaatacctcaccccccaactaggcaaaacaaacagcagttactgtcaggagggaggagggctggggcgagtctggtgggttggcccatagctattggcggaagcaaacgaaacagaggcatggggaccagaaggacgggcgctgtccttcgtgctgaaagatctatgccctacctcaaaactcagtaatctggatggagtggaattccaggccttcaattcattaccattcctgctgtgcccaagagttcgagttggaggagatcattgaaaattaaatcaaatttatgaagtttctaagtgcgctcctctccctgcctcaccggaatgtccactcccggcgtgcaggataatataaaccgcagggacaatgcaagctccaaaaaataagtgcttggcacatagtaggggattaataaatattcgtttaatcaattattgctaatattcaattaaacattctaaacaaggacggacaaaagtcttcattcctcccctactcaccataaaggagaaagagagggatgtcctcgaagctggacggactcagcttcagcttgcgttacctagccttgcaggagattccttctccaacgagattatttcattggctaaaacgttaggggtgttttgaactctggggtcaaaggaggaagtggttggaaatgtctcaatctcgtgccacaggtgaagtaaacgaatcttcctttccagggaatcacgggttttgggaaaaggttgaggcgagcgggcgtctatgctggacaatgaagaacgaggggcaccgggagatgtgttgcctcctccttcctgtctcctgccccgtgcgtcttgaatgatttagcactggcacctggctccctgattggtgcgagcgtctcgtttagggaaggctctaggagggccggtggatggaattccgagcttcacctggttgtatgccgcccacttcaagcagcgcagagcagctgccggttgagtggtttggggggacgtttcctacgtggagcagrcacccccagcctgtccagccccaagcctcagtgcccggggctgcagtcaccgcgcgccccgccgtttaggatgttttttgtgtccttaaaaagtgccggggatttcatcgtcaggtggagacaaggcgacaaaacagtagtttctttagtaccaaaggcaacgcgattatttcaaaccccacagcgagatccctcttgctgatcaggccatgtctgcccagggcggacccttcgatctcccttatggaactctcggtaatttataatatttttgtgtgtgtttccattgtgttgtggtgaaaggcgataaggcattcaaagaaaacggacgggcctccgctgaaccagtgaggccccagacgtgcgcataaataacccctgcgtgctgcaccacctggggagagggggaggaccacggtaaataccagtaaaggaatcactgcctacacggtgtcacccagacacgcacagacatcaacatttttgccctaaagaaaaaaactgggggagaagaaaggggagaacttaaactagtgacagggcggtgagggaaggcatgaagaggcaagccggcgcgtaaccgtctggccagcagctccaggtgtgggctccgctcgggcgctggcggagagacccgggagcgcagggcctctccgtctctgggctcttggcgccctctggtgggaatttctctttcaacgcatttttacggcgaggggcttctcccaacgcagcggttcttttaactacgcctaaatattgcaaagggagaatccttaaagcgcgtgaaatcgaagggggagcgggccagggcaaggggggctggtccgcccctyccggggcacctctgtgctcgggtgccccatgcgcgtgcagcggcgctcgtgcgtgtcatcaaccttcaracgtgattaatcaggaggccttcttttcccatcaccaagggggccaaagcgaggagcgagcgcatagcaaaagggacgcggggtccttttctctgccggtggcactgggtagctgtggccaggtgtggtactttgctggggcccagggctggatgaggaaactgtaattcctccatggtctaagaggtctcccctcatttctgcctcctttgcggttacaacaatcccagctccgtagagagccaacgaggacacgacccaaagcgcgctttcgctcaaggaagcgtcgcagggtcacagatctgggggaaccccggggaaaagcactgaggcaaaaccgccgctcgtctcctacaatatatgggagggggaggggaaatgggagaggggaaaggaggggagggaagaagaaacgctcagaaaggcagaattcttcgtaggaattatcttttccctcctctcacccgacagcctgcctatttccaaaggaaaaaaaaaaagcgtgttgagtacgttctggattactcataagaccttttttttttccttccgggcgcaaaaccgtgagctggatttataatcgccctataaagctccagaggcggtcaggcacctgcagaggagccccgccgctccgccgactagctgcccccgcgagcaacggcctcgtgatttccccgccgatccggtccccgcctccccactctgcccccgcctaccccggagccgtgcagccgcctctccgaatctctctcttctcctggcgctcgcgtgcgagagggaactagcgagaacgaggaagcagctggaggtgacgccgggcagattacrcctgtcagggccgagccgarcggatcgctgggcgctgtgcagaggaaaggcgggagtgcccggctcgctgtcgcagagccgaggtgggtaagctagcgaccacctggacttcccagcgcccaaccgtggcttttcagccaggtcctctcctcccgcggcttctcaaccaaccccatcccagcgccggccacccaacctcccgaaatgagtgcttcctgcccgccctagtccctgctctccacgggtgcgctgcgcagggacccccccccccccgcctccctcgtcactcttcttatccctgccctccggattcacgccccggggaagcacggaggctgaggctctagttgaagtggggcaagagcgattttcccttgagcttccatgctgcgagcgcctgtccctccaaagggcgcctgggcagcagcagccgaaggcgctactaggaacggtaacctgttacttttccaggggccgtagtcgacccgctgcccgagttgctgtgcgactgcgcgcgcggggctaggagtgaggtcggagggagggtgtggaggcgatggccggtgggcccttctctgtggggtcctcgatctacccagattagcccgcaatctctctgtccsggggccttcgggcgccatcgcgccagcgccgagagtcgagcaggggcgccgcgcaagatctttgtccgccgcctcctgcgcgctgcgcgcaagttcgtttccccggtgacgttccccatgcttrcttaccccaccctctctggatctgtaccgcgagaaatctggggtcctcagggggctaggtagaggagaaacgctgaaaccggaccgaaacctcgccctaggcttagcgatggctaaaaaccggctgggataagagggaggcaagcaacattccgactcgctgctttctggctgtctggagtgcaaggtgactgtggttcttctctggccaagtccgagggagaacgtaaagatatgggcctttttccccctctcaccttgtctcaccaaagtccctagtccccggagcagttagcctctttctttccagggaattagccagacacaacaacgggaaccagacaccgaaccagacatgcccgccccgtgcgccctccccccgctggcccacacgccggctgctgagtgcccaatggggcttgtagcggctcggctggaaaatcgctcactgagcgctcccctgtgctcctagccyagtcccccacacccttgcgtcttgtactggccttggacccccaccccgaccccgaccccgcctcgtctcggcgcttcactccaggtcgcgccgatgcaccgccagactcgagagcggcccagggctacgctccctgcgccccagtaccggagctagcgcgcacgtctcctccgctgcccccacccctgcgcacccctaccaggcaggctcgctgcctttcctccctcttgtctctccagagccggatcttcaaggggagcctccgtgcccccggctgctcagtccctccggtgtgcaggaccccggaagtcctccccgcacagctctcgcttctctttgcagcctgtttctgcgccggaccagtcgmggactctggacagtagaggccccgggacgaccgagctgatggcgtcttcgaccccatcttcgtccgcaacctcctcgaacgcgggascggaccccaataccactaacctgcgccccacaagtaggtcccgccccaattttctatcaaatgaactgcagggaagatgggggcgctgggacgtcgggaggctgagctggcggaaagggaagggggagcgcggagataatggaggctgggaaataaatggggctctgaccccgtccctgccagaggtcattcggctgtcagggacgctaggtgactcccagggcaccggaragcgaggaccacgcaaggtccgagcagcggcgatcgttgagggcttcgcggaggaggaggggcgcgcagccagggtgttgtttttattctgttgtgtgtggtttctttgctccgtgggacgacaggggtcagcgcagggggcggaatgaagagctaggagccccagcaggaataagagttttcagtccccggctttcgttgagccaagatctgacctcctcctttccccctgggctgtgttcaaagtctataatcagcggaaatttcgacgttaattgcagcttttagaaaactcaaggtccctaattgctccaaatttgcatcaagctattgacgagttagggagaagtcaggggcgggaaaggtgcataaaactgagactgagccttgacatttcatacaattaattacatctcagagaaataaataaataaataaatwaataggggagcgggcggcatcctgagtggcaagagatggggaactgggagggggcaagaagctttatcatagagaggagagagcacctctctccttatcccaggcaagagatctgtcaggaggtgacatgtcccgaaaagagagaaagaaaagagacaccagataaaagaggrgggaggatttatgcttccctgtcttaagtgcgacaggctcctcaacccatttccagaatctatctttaattttatttcctacctctgtaaaggcttgagatgagaaaattgtttttctttttccttgttggagtgaagaagtgtctcctgaccccacccccctaaaaaaacttatcagcttcagactgtaagtgttcccactcccccatttatttatttctgagatgtaattaattgtatgaatttccagaatttgtatacagaaagggcttaagaaggatagtgtggttacagggagtgcttattgatgcgcttttatggcactttatatttgagaaaataagtatcctcatcaatgaagtggggattattaccggaaagcccctttakacgctggcattggctcccgggcaggaggtctcgtgttaagtcctcaggtctcattccaatttcctttgcagctccctcttcccgccacccaggagggatacaattacccacacaacaaagagggcctcgggagagtcgccagccctggtagcatatgaaccaggcaccggcgttggagctggccagggcagggcgggaggaacgcgaggcctgcgcgcctttgtgtggtgctttcgccttgatggatttcttttctgacgctttccacatttcccgctcccttttgccgcctgggggtgggggtggggggttagcgggcagttgtgttaatttgccctccactcccggcgcccttacggaattcccggtggccgccagtcgcyggcgcaaatgccaagtcaccggtaggagacmcaacagaggcgatgacctgaatccgcacgtggcctggttcgcctggaagctgccaaagcgaaggcaagagagcccgggaccctgctgtaaaacagcaagcagcacgtgtcccaggcacactgttgcgggcccttagcctagctacgcatccgcaccccaggcttcaaaggcgcgctgggcgctctatccactctcaccctcccttgcagacaatacctttgcccgcccagctggctccacttctttgcccctttagagtctcctgggaggtggcgttagtgcaggcaacctaaggcactctcttgttccagaaacccttgggtggggcttggagccctccttgtccccaaccactaggtcttcccgacccttgctacatcaaaggggctctctcgcttgctctccccgtctccctttccctttmtttcattgcaacccccaattttgaaaggcagtgcaatgtgtctgaactccaacttccctgttgattgaccttggaaaactcatgtaacctctctgagcctcgatgttttttctttgtcaaatgactcttagatcaacactcctgccagtttcataggactgttacgagaattagatgagatgatgttgaaagtgaaagcactttatcaggtccaaatagctctttatccgccaggtattattagggtttcgcttttgcactgatttcctgtctgtcactggaactccatctgtgacatgtcttaccgacgtcaggctgtttcttctccccgctggggctctgttgtgcctcaggtttaatggatgtcactctccttatcgcctccaacacctgtgcgaagctggaggcaccagtcagggtagggtaagcgagtgcttggagaggtttgctttgagagattggaaggggatttcgtgctgggctcaccacaccactccgcttgggggcttagtggggatggggctgcttcccacgcttcttgctggaagttgaaccccgaaggcagcaggtagaccttgaggggtttgagaacagcctggaaaagaaggaaaatccagcagcacctccaccctcagttgtgactcagaggaaaggtgcttgattccatttacctttgcctgctccagacccaagatgtcagagggaagggttaatgaggggcaggttgggaagaggggccagggatgaggacctgaggcgcactattgtcttccccactccccggtctgactgaagagcagccatgcgagcccgatcatctagtcaaatactatttttcacccaattaattcttgaactcttccacgaccccatttcatgccagtttattttaagctgccactaggctggagacccgccaagaaattatgagacgtttcggtcccagatgcctgtgttccctttctgggctgctgtggtcgccctttgagtctgcggggcccggccagtgggtgttgggcagctcgatcggagcctggccctttgcgtgtgggtcagccttcacccaactccgaccccacctccggagctgccgggcgggggtcgcttacgggcccggaggggcgccgggtgccccgcctctcagagacaccgttcyatatttgaagccaggagcaggaagggagtatgatgggggcttagagtatatgcctgtcggctcacagatttggctcctagctcctttcaggaagtagcttttaatgaagagctctggcaaagtcctcatcctcccccaagaaaaccattgtcctccacccatttccccgcggtcggaacctccctaaccgaacctctctccctctctctcgtcctagcgtacgatacctggtgcggcgtggcccayggatgcaccagaaaactggggctcaagatctgcggtaagtgacaggacccactggggcccggctgggtggcgcggcgggcggacctttggggcttgggagactgggacgcaagcggagggggatccgggctcatgggtctgattttctaatgtaattacagccaggacagccagcgaccacgctcccctacaggccctgaccctcctctgcccgccccagacctggtccccaggggtcttttcctctggagtccccartccccaacacccagtggagcgaacgccgggtgccctgcctgggcgcagaagcgggaggaaagcgcccccgcgcggcaaccccgccttcctagccctgcgcgcaagcagctcccacccggtgccgtgcactctgcctgcgcgtcccaaaggtcgcgtagaaaaggtgaactgatctggcttgctggagagcagaccaaaggcggtgtatctgcctaaagctgtagctgacacgtctcccccatcccctacatcatcgcctacccctcactcgcacctccacccgcgcagtcgggtcgcattgaaagtggtctctccaccttgaggggttttgccctgagatgtcataacggattcaagtttctttctttggggcttcggaggctaaagaaaaggattgcctggagccctccatggcctgcctgagggaggcacgagggtttgcctgscgcatccttgaaggcgaggagggaagggaaaggggacgagcagggacgaggagccgcaggcggcgaaagaaccgggaaggaagaaaatagatcagggagctggagaggagaaagaactgctctctggagacaggagggtctgaaatgaaaacgcccaaaggatgtaatttttttaaaggaaaaagggagatttgttcgaagggacacagctgagtgattctggctgaacaatgaggcctcactttcctggctacatttcaccgactaaaattctctagccttatcgggccagaaaatacggatgtccccgggcagaggttggagargcgggggaagattaacgggcggcttattaaagagccatccgtcagctcctgcgcgcgggagatagcggcagagcaggcacgggacacgcccgcccgccctagccccggagcgccgagagccgcccgccgcctgggtgctctctgcacctgatcttcccagcctccctgggtcccggggcgagggcggtggcagtttgcagtcagagcagagtggccgctttggggaactactcccttccctgcttggccgcgccgcgccctccctgcatttctggggctctgtcctctagaccctgggactcggcgtttagggaggaacaggcgctccattcctagacccagccattttccaccgaaagcccagccctgccgccgggcggcctgggrgtttggccttctccccagcgcaggacgcccgtggggcraggccagggctgcatccctgtgctggggcagccggcggccgcggatctttgttctataaatagccccgtcccactcccacccccacctccacccccaccctgccgccattctgggcttaatggcccgtttcgcgccaggtcccttcggcggccgcagcgctcggcttctgcagccgtcattgtcatgcagccagccgggcaggcagaactgagcgagccctgggcagccgaggacagggtaggggcaggctctgggcgacggctccttaccagcggcgcctggcctgctgagggtggggggcagccctcattcacccccatcctgccccctgctgtcccctgctcctctggctgcaggcgctccacttccgcgggaataaaaggtctaagtgcttcttatggggacatacccgacgagttcagaaaggctaaagaggcgggaaagagtggggcttcgctgggtccggaaatagggaagccskagttggcctccactccccctccccsactgtcagccgaagctaggagggagagctcctgggggctacagtcctcagagagtttcctccctgtgtctgctccccacaacccatggtagtctgttgaggagaaattgccttgggctaaaatgcccygcttttggggccacaggttaggaggcttcccattaggtttgattgtgaaagaaaacaaaacaccaagatttattttccacaccttgagacaactttggctttccattttaatctagtggaggcagagtgcagtcttttgtgttggccctgggtccacagctccctgcctgcctacacacacacacacacacacacacacacacacacacacccctcccttcatccctggagggatggacctggagggtcccttcttgacttgacaccatccaggttggtttaccctttcacattaagagagcagaggaactcatggtcctcttcccacttccaaacccactgccctggatgactctcagaagcaccctcagtgccttgccaaaattcaacccccacccactctccccctgcccttccccaaaatccacagaatgaagctgcaaggaaggccctgggccccactagtggtagccctgaaggcagaattagctctggaggcagaatcccccagggagagtaatcagctagaagaaacccatggtcttgccaagagctggagagtgctgcaggcatggtggcatgacctaaatacgatgagttgcagggatccctaagttctggctccaggctctgctaacttcccagggtgtccttgggcttccatcacttatctcttgctgccaactacagcccctgagctgttttatttagcctacactcgtgtgtgtgtgtgtgtgtgtgktatgtatgtgtgtgtaattttgtatcaagtgccaaaccttaaaaatagagagatttcaagtgctctctttttctggtttctcttgaaaaaacttgggggtgggcaatggggagggaaacatggcaggtgctgttagcccaagaaaatcagaaaaagaagtcatggtggctcacatctgtaatcccaacactttgggaggccaaggtggtaggatcatttgaggccaggagtttgagactagcctgagcagcatagggagaccccatctctacaaaaactttcaaaaaattagccaggtgtggtggccacatagctgcagtcctagctactcaggaggatgaggcaggaggatcgcttgagcccaggagtttgaaattacaatgagctatgatggcgccactacactccagtctggacaacagcaatacagtatgaccctgtctcaaaaacaaacaaacaaatgaaaaagagcccctccgtctatgcatatgcaattccatgccatagcttggtgaacagagartgtgctgggcttcagctcccacgtgccctgttggccataggtgtttatgccatacacagctcaaagccccacttggcaacaactggctggagccaggtgctttstagctacacatacctgtgcgcacatgcacgcacacatacacatacacactctctcactgggccccataagcctttgagtttggcagcaggggtgaggarcctgcagcaggagctcccctcagctcagaggtrgagtcatgatttttctccccttgcggctggccagtgtgctagcacccaaccaaacacaactgcagctttgcctctcctctgctttcctctttgcctctaagaatgtagagctctgtgacyagttacycacaggcttaaactaggtcctcgaagctggggtgtagagcaagagggagtacactcggcttcattctctgggaccccttcttacaggaccccttgctagccagggaaattgtcaaggcactgacctccrtgtcatccaccacctcttcatccttggagaagcagttccttccagggcctctcagagccaagggaggcctggttcacctacctttctgaggatcccagtattttagagaacaaacaccttcctaaacaaagtgaaagacatgtgacaatatatattatatgtttatattagcaaattaattgttttaacataaattataatgcagtgtaagtgtgctattcataaaataattacaggatttagagaggattctgattcctagtayattactggaagtgcagcccaaggaatgggatgcaggtttaaagccgtgtcgtagggccrggcgcagtggctcgcacctgtaatcccagcactttgggaggccgagacaggtggatcacctgaggtcaggagtttgagaccagcctgaccaacatggcgaaacccccatctctactaaaaatacaaaaattagccagacgtggtggtaggcacctgtaatcccaactacttgggaggctgaggcaagagaatcacttgaacttgggagctggaggttgtggtgagccgagatcatgccactgcactccagcctgggtgacagagcaagactccgtctcaaaaaaaaaaaaaaaaaagctgtggcataaygatcgtttctcagcctcatgagcgcatctctgggagagcctgtgtcaaaacctcaagccgagtttctgcttcctgcagctgcccagagggaaggggcttcaaggtggggagactcagggagtgagtcagaagcctaagcaggcgtcggggacaacagagtggaggttcagctgggcaggacctcactacatgaggccacatgggtttggtctttcaagtctggcaaattccacagctcaatgttctgggatgagaggagcagtctcagagttcaggtgccatctgatcctgcatccctctggcaaatgagtgctggctcctggctctggactttgaggatttggaggaggaattcaggaagtaggcaaagagatatggaaaaggatacaatcccatctttatacccaagtgtggagctctattatagtgtatttccccccttctcatgtcctttgggctttagtgataaatgtaaaaggtgctgggagcaacaaaaagcttggtggctctgctttccccttcttccctccagaaatagcccctggctcccttgtgtgggargattctaatcaccgcagccctcccatgcatccccccttctcccacccatcacagttgaattgtagtcctgggaagcaaagctgaattctmcagattaacttgcctttttgcacctcttgggactttcttccaagtctgccttgtgacacgtgtgactccgcaagtttcttggtatttacagaaacagctttggggtcaccaagaagcttagaacctttttcctcttttcagtgtgctgcattttgggctaagactgaggctgaattgaaggaggagaagccaaaggaaagagcagacgtgcgggccaggagccccacaggggatggtggagatgtggagggagtgtgctccacgctggcaggttctcctgcccttttggcttaaccctctttccccgtttgctgccggagtttgtcctgctcaccttgggcaggagaactttccactcactccgaggggcagaggtgaggcactgagaatcccgccctgggctcagatccctcctgtcatctctgtggagttcttggatgactagttttattccagcatttgtcaccatctgccaggcttgtaggctcctggagggcaggggatctgtcccactagctttatcagtccccaatcctagatgcttagcaaagtgtttttgtacaacaggtgctcaataagtacttatagaattaaatggcaacacagaagattgaagctttttttggtctcacagtaccttcattcaaggagagggggtggtgcaagaaaagctgcattcaggtttgcattcagaaaaataccacttacgttcaaccctgtgagcattacctggtgctggaggaaagtgtctgcccgaatcctctgtgttggacctcactccttctccttctgccatcctcacccctcctccttctgctgtcctccctctgctgtcctcaccctcctccctctgctgtcctcaccctcctccctctgctgtcctcgccctcctctctctgctgtcctcacctctcctctctctgctatcctcacccctcctctttctgctgtcctcacccctcctctctctgctgtcctcacccctccccttccctctgctgtcctcaccctcctccctctgctgtcctcaccctcttccctctgctgtcatcttcctccctctgctgtcctcatccccttccctctgctgtcctcaccctcctccctctgctgtccccaccctcctccctctgctgtcctcacccctcctcttccctccgcggtcctcgctgtcctccctctgctgtccttgatctcctccctctgctgtccttgatctcctccctctgctgtccttgctctcctccctctgctgtcctcaccctcctacctctgctgtcctcaccgtcctcctctgctgtcctcacccctcctcttccctctgttgtccttgccctcctccctctgctgtcctcaccctcctccctctgctgtcctcaccctcctcccctgttgtcctcaccctcctcctctgttgtccacacccttctccctctgctgtcctcaccctcctccctctgctgtcctcgccctcctacctctgctgtcctcaccctcctccctctgctgtcctcacccctcctcttccctctgccgtcctcacctctcctccctctgctgtcctcgccttcctccctctgcggtccttgctctcctccctctgtggtcctcactctccttcctctgctgtcctcacccctcctcatctctctgctgtcctcacctctcctccctctgctatcctcatcttcctccctcagctgtcctcacctctcctcctccctctgctgtcctcaccctcctccctcagctgtcctcacctctcctcctacctctgctgttctctcccctcctccttctgcttatacagcccataaacagtgctggcagcatcttctctgattgtgtctcctcctttaaagccctatcctggggctggtcactggagtggaagctgtccaacttacttaattgtgagttcactgtcacattcagagaggagaacgggcttcacttactgtttttctctcttgcatgactgggcctctgccactgatgacatttggcactgcccccctccctgcctgaaggcgagcagtgccagagccactgtatttaaaacacagacactcacttcttttctcaggagaaacaagagccctgcttggagagttgattcactctgcagctgaccctcaggggctgggcagtttgcagcaytctctctgaccagcttcttgtgccataggcttcttgcaaaggaccaacagcctggaagagaagagtcgccttgtgagtgccttcaaggagaggcaatcctccaagaacctgctttcctgtgaaaacagcgaccgggatgcccgcttccggcgcacagagactgacttctctaatctgtttgctagaggtagcccctgccccactcccgccccatgctagccagtagatttcttatttgagtttcttgactttttcctgcaattttacttcttttatcaagaaatgtcattattctctctgaacccacatgaaactgcttttgtgactttgggggaatataattgactccctccctccctgctggccaggtctccatcattttggaaactggatgaaggcagtcaataaaagtcaactctaaagacactcgagggaacaaatatggattcatagactctcagagtcaaaggaaccttgcatataagaaaatctaatgatttccttaataacgtttatcctggaagattggccacacacatacacacaaaatcacactatgggaagttgcatgctgagcctcataaccaacgagtgtcctggaayttgttttcctttcagagatgttttactaacccctgctgccccacaacactcatctcaggaggtgctttaccagtctctcccaaacagctcataggtagatccgcttccatccccttctgtgaacttcccacagggccacagaaggcagaccagagtattaaacaatatgtcactaaaaccctggagctaacccaggaagtcacagagagtatcgtgcacaactgcacagcctgcctgtgagctacagaattgggcccctacagcttttttccctgcctaacctctagcctgactactgcagagcctgtcacccaaagtcacctctggatatctcaaagtccaggcccaaaagggtggggtcaagaaagaggcaggggttccctgtcccaccttcttgagccccatcttccagctccagtttcctgtcgaaggacaccgccaaggaccaccctcctcagggggaaccccagcctctacccacagaggccttaccctctgatgccaacagaccaagcacatcacaacaccaaaccagatagacagggacacacctggtcccaggggagcacgacagatgccccctccatcacactcctcacaggtgcccattcaacctgcagatgacaaccgcagtcgcaggttgttcacggcgtctcagagcacttcattccatgtctgagcagcctgtcagaaaggctgtgaacccccaggaagcatgtgcaaaacttctgtgtatgtgcatttttctggagatgtggtatatccgattctcagtgcacatacatatcccagaatgaaatcaggcctatacagatagcatggttaatattaggggtctctgggctgaagaaatctagatatgagtcaggtgaaaaccattcattgctctccccaattcagatctgcttccggctaagaacggtgaggagcaaaccgtgcaattcctcctggaagtggtggacatactcctcaactatgtccgcaagacatttgatcgctccaccaaggtgctggactttcatcacccacaccagttgctggaaggcatggagggcttcaacttggagctctctgaccaccccgagtcyctggagcagatcctggttgactgcagagacaccttgaagtatggggttcgcacaggtaaggaggagagttgggtagacaggtagtggcaactttgccctccatctcacccttgccagttgtgaggatatcaaacttgtgttggaagaaaaacacagccctggtgagataaggcggcaaagtacccagtgaccacaagaacaagcttgggcagtaacagttggtggagggacccgacccaggcaaaagttcatcagcatatatcatggtaaaagtagataaaaaagatataaatgcttggtgctaggtcaagttctgtataaagagttttcattctggccaagcacaatggctcatgcctataattccagcattttgggaggccaaggtgggcagaacacttgagctcaggagttcgagaccagcctgggcaacatggcgaaaccttgtctctacatatgtgtgtgtgtgtgtgtgtgtgtgtgtgtgtgtgtgtgtgtatatacctatttttatatataaatatttatatataaatatttaatataataaataaataataattataaataataaaatttaaaaataataaattataaataataaatataaaaataatatataaatatttatatataatatttatattatatattatatataaatataaattatataatatttatatatatatgaaaatgagctgggcatggtggcgtgcacctgtagtcccagctactcaggaggctgaggccaagaggcagaggctgcagtgagccaagatcgtgccactgcactccagcctgggcaatagattgggaccctatctcaaaaaaaagaattttcattcttggatttaggctattcacaacctaaagagagcagaatgacccatcctctgcttcttttcttgcctccattttcaggtctatttcattctgataaatsctgcccttgcctgtccctgacactggggagaattgggctatttcctctccctttctgtattagtttcctaggaatgccattataaatgaccacaaattggatggctcaaaacaatagaaatttgttctctcacaattctggaggctaggagtttaaaatcaaggtgctggctatgctctctctgatggctcttggagaggatccacccttgtctttaccagcttccaggtgttgtggatattccttggcatttgttggcttgtagatgcatcgctccaacctctgccttcacttcacatggccttcatcctgtgtgtgtgtccaaatttctctctccttataagaatgccagtcgttggattaaggcccaccccaatccagcatgacctcatcttaacatgattacatccgcaaagacccgatttccaaataaggtcacattcacaggaaccagggattaggacttgaacatatctttttgaggaacacaattcaacccatgacaccttttaccagctaggccaaaaagacacatgcacacacaggccaaaaagacacaggcacacatgcgcgcgcgcgcrcacacacacacacacacacacacacacacatacacacatgccttctcattctactgcaacttctggaacttaggacactctgagtcaccaaattctatttccagtgggagtccttgaggatgtcctcttgcctccttttcttgttccaggagctctctctaatcagcaatcctcatcaaagcagttrctttccaattgcctccagttcaaggactttggggcctctgtctgagatgcttagaaasagctcagactgtggactaagcccaggagtgacacagtggtttcttctccctataactctctccacactacagtctggctttcctgagctctcaggcagacasatctagaataattgacagtccctagcttagttgccaccacaggggaagccccaaggccacaactggcaatcctgtgttctttcttcttctttgtctctccttctttattttcsctctcattcttcctcgtcatttgaagatagatttaagactgagactaggaggctggtggtgatagagctgagtaagactattgkatgtcaaaaacaaagtgttataatgaaataatgatgctggccaaagatgctttttaaaatgaggaatcccagagagctgctgaggtctgccaacaccactggaataagtgcagcttcattaaatgactgmtggatacacaagactcagttatatgtacaaaatttatgttgtttgatttttaaagaaaagcactctatcaatttacatttagttacttctcatcttggtcagatggctaatatattcctratggaaaacaaatagtgttattcggctgcattttaaaaagagtcagaattccccatgtatgtttagcttgacttgctttggtgtgatattttgaactttgccagtttgctctacatgcgctttctcagagagatgagaactacatcatttyattatgaaagcccagaatggcgttgtccctcaaataaaaatacatgattttgtcataatatcaactaatattatctacaaaaccaaagcatcttgtggtcagagaaagcactgacgggcctggcctggtggctcacactcgtgatcccatcacgttggcaggctggcaggtggatcacgcgagctcaggagttcaagactaacctggcaaaaccccatctctaccaaaaatacaaaaattagctgagcgtggtagtgtgcacctgtgatcccagctactctggaggctgcagtgggaggatcacttgagcccgggaggcggaggttgcagtgagctgagattgtgccactgcaccactccagcctgggtgacagcaggaccctgtttcaaaaaaaaaaaaagagagagagagagagaaagcattgactttcattagtccagtgtatgaacccacttaggtacttagcctgcaaacattcatttttgttcctcagagttgcttcttggggcagatatttgtctttacagagttcacagtcttccaagcaatatgaaacctcctgctatatctcaggattttggccctgataaaagcatgctgttgctgcygtgtcaaaacagctcctggttgctgatgtggaatttaagcatagataaggagcaatagggtaaaccccacaggtagctacacacagtagaaartattttttcaaggatattaatgcattaataggctcagccaaaataatgaattgggttttaatagtgaaaacatactgatccgggtatagtctgtgaagagatgatgatggcatttagaaatttctctataaattaataaaagacttcttttaaaaaatgaaccagcctatagagatttcccatgaactaacaggcaccagtcagccttcagccacagcagctacttaagtgatttgtagatatgctggactcccttcgttgttctttttaaaactttttcttatggaaaattttaaacttatacaaaagtagaatcctataatgaaccctataaacctaatgccctgctttattatcagcttttacctgtaccgccatccattccccatcacctacattacatgaaagcaaatccccaacataatattattgtatccataaatattcattctttttttttttttttttgagatggagtttcaatcttgttgcccaagctggagtggagtgcagtggcgtgatctcggctcactgcaacctcccctcttgggttcaagcgattcccctgcctcagcctcctgagaagctgggattataggtgcacgccaccatgcctggctaatttttgtatttttttagtagagatggggtttcaccatgttggccaggctggtctcgaactcctgacttcagatgacccacccaccttggcctcccaaagtgctgggattgcaggcatgagccaccgtgcctggcccaatattcattcttaagaactttttttaaaaaagtccacaatgtcattgtcatacctgaaaagaaaaatttatagctccttaatgaaatatttagtcagttttcaaattwccaattgtatcatgaacgtcataaatgctttwagttarttaaactcatttgaatcaggatccaaataagtttcttacatgcagttgtttgccttgtctcctaatcaagagatctccccctccaactcttcttttttttcttgtagtttatttgtaggaaaactttrctttaaaaaataattctttccttctccccctacctgaatttaggccatgagcggcccagcaccatatctatcatctgctactttcatccaatatagagaattgaaattcaaattgaaactattttgttacttaatagaaattctgatagatataagatttgggggcacaaggttgtaaccataagctaaaaataagattttgaaggactttgtgtcctttatattttaatggacaaagagatactatttcactttgtgttaatctctctgtctttgtccatcttttgtttctgccaagctgtatggttttgatacattatcaaatagtgtgattgcatttatttaccattcagtcttgtcttaaaatgaagtgttattgttaaaagtttttaaatggatattgcatatatattttaatggctttcaatacaatgtgttgtttcaaaagacctcagattctgttggcaatgagcaaagtagagtaacatggaatcatttaactatctaggatagtccacatgaatatctagaatatggccccatacttaaactaagtttactagttatgcttcttttagttttttctaaaaaacagtattattttgtgagggctcttaagatgcagagactggtatcttctgatatgagaagtcatagtccagatgttctgaatcacatctagggaagaatagagattctcagagaggagagttagaccaggaacattctaacactagctctctgaccgtttttggttgtttttctttttttttttttcagaagcaaaggcaatttccactggaaacacagcagtcagcatatctttctaacaccagttcccagccacacgtccctagataatctattgcgttgactccttcctgacagctgagccaagcctgctgatgtggagttgagttttccgttgaatgctaagttggcaaaaacttggcaacaatcctgaatttgctgagagcaaagcctgttaaagcatactgtgggttgcacagggatttagagttacgtagcaaaagcaattatttcaccaacaactgaatgagtgaaataggctgcccatttcacagaggagagctaagttatctcagccataaatttaatttgaaggtcattttactatatatatattggcaaaacacatcaaaacacaaaacactggaaagcatgatttgtttcatgatactggatattattctttaaaagcacgatgctttagaaacatagaagtttgagggacattatgaatgttaatgttggtatagggtgggtcaacctgcccttcctttttcaatatccttgagcagccttattcgacatatcactgggatggaagccccatcagtgtgacccagtggggcaggccgtttgccttcaagataggttgagaaatctgcatttgccttgatgcttttctgtttcctatctaggtcatcctcgatttttcaaccagctctccactggattggatattattggcctagctggagaatggctgacatcaacggccaataccaacatgtaagtctcatatgttttcatataagcaaccctgatgtatgactatggcttgttgctttaamagttcmgkcccmghggttctattttattaaagtttccctggtcattttttctcttaaaatctttaggtttatcacagttctgatttaatggtaaatacttgataaactattgttgaatttaataatggaatttaaggaaagcatggtcatgagaaataataactctaacttccaaaatgtagtsttgaaatttcatgttaaaagacccatttctgttaatggtgtatctaaagaggttatgttttgaggtatsatcttggttttacctttttccacccaagcacattggtccttatcatttaggtcatgtttcttccataattaaagcagccataaacccacaaaccaatttgatcaacctattgcttaactaaaaattctaaaacaaaattcagccgatactgatacagtatatattcttttcaaaataagtgattgtttttctaaatgtgacattttttcatacttgtttgtgtaggcaaagccttcctttgtttctaagttcttgaaaatttacacaaaactgactctgaggtcctgtagggtatggggtagaagtactacctgggtagtcttatagcaatcatcccagattttcctctacatgcatgtgccctcttttaagaaaatgtcagattactaatcgatggaggggccatcagagtactgcctttgctctcaacactaatgacaatgttttaccagtatctatacatccagacaatggcactacatcctattaaagtatccaaaggaaaataacaaaacaaatatcttataataatttaaaaacaactatataagaattacatgggtgtccatcactgtggaaatattcagaaaatagccactcactttttaagttcatagaaaagtagattccaaaaaatgaatttaggtaaaagggtagtattgcttaaaatgagaaaatccatttgatatcaagatagaacgtaaattactgaagtttaaggtagtctgtttttcttaaactgctctcagccagaaaacctgaagggcatttaaaattatatagtgacccatatgtattctaaagctgtttaatgctgtgactcagaatacttaactatattcagaaaagtttctattaattaaggattcctgttttcttggctaatttaaaacaacagtgacaaattttaaagagcaaatgtgacaagtgaagcctctggtggtaaaaaagcataaaagattaaactgattgaaaaactaaaacgatgttcatgctccctgcttgcaggtcatggttagcttcacagactgtccatgttgggtcactgagatttggaagagccaagaggaatacaggtcaaagatacagttgcttggaatttgaacaaaaagctccatttagcaatctttactgtactgtgatttttgagataaaaatataccagccagcacagacatcatagtagagttaattataacttgagaaaagacactaatgtttaattgtagtatctagcactaaggaacaatttaaattaggaaatatagttgttgtttttaactcaaccatttggaaaataagtgaggaaaacagagtaaaagatacatatctattaaagtccaagtacccatattaatacargcactgaatttactcagcacctttaagtgtgtgttctgcagggcactcagctgctttttccatgtatatatatgtctccaatctcaaggtaaataacggacctcccccctttcaaccacttatgaccagatattcctaaaccagaaaaatcccacaaattctccttttttggcatgtgttcataaaaccaaagtcccttactcttctcttagctcagctgcaaaacactaaaatgtgtcccagcyatctgaggtcaaggccaatccaactaaatgacatgtagtaattgcagctgtacttgaatgggagatatttataaaatatgaccgattccaacagatcgatagagaaggttatttaaaatagcaaaatagtttctgtcagttctggagacaaggcattgtctgaagaagcaataactattatctagaaattgttctaagccagttgccctggaagatcatgaaatgtggcagcactgtcaggagctgaggcaaaatttgctcccttgtgacaattccttctccagtcgggaacagtgttcaaaataagtctgggaaagaatggcaaaaggatctttctatggcagtgcaggatttatttagtgataatgcctggtttttggtcctgtactctcattgaatttaggtggcacctgacatagaaaataagaactatattcctcagtcatagcctcttaaaaagaacgatccaataacctgacacaggtgcaaagtgcaaggtgtctgactattagaatagaaagatggtaggttgggtgtggtggctcacgcctgtaatcccagcactttgggaggccaaggtggatgggtcacctaaaatgggagttcgaggccagcctggccaacatggtgaaactccatgtctactaaaaacacaaaaatgagccgggtgtggtggcgggtgcctgtaatcccagctactcaggaggctgaggcaggagaatcacttgagcctgggaggtagaggttgcagtgagctgagactatgccaccgcactccagcccgggcgacagaacgagactccatctcaaaaaaaaaaaaaaaaatctatgtccatgcctttacacctgtttctgcacatagctgtgcagtatattcttcttctaagcaacgacccagtgaagatccaaacaaaagttcacaaatatgtagttatccaaggcacatacagctcttttcttccagaacagggccaccaagcacaattgcgcaggtagggcccgagtgtaaacaacagcctgccctcaaacatctaatggcaatacataatcttaatggcaagatctatcataaccctttgctatgaggttatgatttcaagtatctagcactttattttcatagaaaatatccaggagaaattctctatgggagttattcatcattttacaccaccgggcaggtcattagataggagcctgcagtaagcagttctcgtttgtcatggaaaagcagctgtgacatagacttggaattctgcttaaacacactaactcggagatcttaaaacaaaccactgaatttctctgaacctcagttttctcatcaggaaaatggaggataatagtatccatcctacagagtggttctgaagactaaaaatggctccagtcctaagtgcctagcgtatacaaggtacagtgtttgcacctaggaaaggcaaccaccgcacagtcactgttgctatttgagactttcctgactcttttatttctgtctctcatcatctggacagtagagtgtttccctaagctcccctcagctatgttaccttttaaggtgaagatgtactacctgccacatctgtaaggagaagtcaagaggagtatcaggatagagtcagcatggaagattatttctctcattaaagaagttcccagtttgacagtcaccagggatccagattttgtgtgcctttctaatccctattgtagcacatggctcccatcctcaaagttgcattatggtgcagcctggctgctggagctccagccatcactccggtgttccagaactcagaaaggaagggagggagggaggaagggaggaagggaggaaaggagggaggtagggaagggagggagggagggagggagggaagggcaaaagagacatactcctctttgattaaaaaaaaattaaaaaaaaaaccttctcagaggtctcacacatttccataaagcctctttagccagaacttagtccaagaccacaccaaaaaagggtagaaaatatagtcttcgatcagagtgaacagcaaccctaaataaaatttaacaaagcaagggaaaattgatatgggtagcaacaagcagactctgccacacaagaactacagcttgttgacagtcaatttgccttcgctctgagtgaactcctccgggaaggtgagttgaaccactgcaaaagggctgactcacttccctactcrgaatatagacatgctcagaatgctcctctagtgtcactycatgaatgccaccatcctactgttttaaatctttacttccaatcccatgttcttatgcttcaacccagagcttctggcaggtttagtttctggttctgactctgaaatgtaatcttgtactttgactttagcatctaaccwgcttcttctgaattcatatttgacctttgatctcttgacttcatttgctttcctcagtcatttaggaaaacagtacccaacctggaatcyaggttgcaagagaagaatctcctatagttctatacaaaatgatgtgcctatcttcattttttacttggagagaaggactacagatttcctaggattcccaaagggatctgtaatcccaattaggtgaagaaccactgggcatggtggctcacaactgtaatctcagaactttgggaggcaaaggcgggaggatcgcttgaggccaagaattgaagaccatcctgggcaatatagtgagacctccatctctacacaaaataaaataawgttaaaaataagaaatttttaaaaactgctttggtgaactacaaggccttctttaagagtgcagctgcacagattgtaaacatggcccaggatggggcagcagggtcagaagaagtgtcaggaatgaagaacaccatgtcagcccatttgtcaggcctggctgtggatcagcagccatggactgatatactagctttcaggagagagtgtcaggcctaagctaataagtcaggaaaagagtggaaaattggtcctttagactcaggcagggactatcaaacaggatacagctaaggccaagaaccagatgctagaatcatcctagtaggtttcctcctcaaggttgagaatggtgtcttctaatatcttagtttccttagtacataggatgtcacctggcagagaatagccactcagtaagtatttgttgaatagaactgaaagaaagtttaggaatcaggtacctggcatagataaggaacctgaaatagattagatcagttaagctcatgataaactctctagactcttcctcctaatcctgagagtaatggccatgttcctggtccttggggaggctaattcatgcaaaccttgggcctaaytggttttaaatctgaagcatggagtgggacctatgcctgatattcagtcccattccctctcccttgtccatgtggttcctgcctggccaacactgacttgatcctaagccaactttcatccagtctttgatatggttctgatattayggtatgtgatttcatttgttccttgccttaccccagagagctttcttatatagtactgggagattctagcacagacactgccaccagtatctcctcgccatgcaaacatttttgtcatgtcaacatttccaaaaaccagtggaaccattaataacacatttgttcaagaatggttaaaagcccatcatgagtttgcctcttggtacacttggcagcacaggctaaaccaggaatccttctcttcttcttcctttatcaggccatcagacatgagggagtgttggttgctacggtgatggggctcagagcagaaccaaagcatgattgtgacctccagaggtgatggtaactgcacacatggtttccaagggtcttcctcctaaatttccaggggcctcccaaggaaaatggacatattctttttggaaataaaatacttctaccaacatatctgaggatccttcaggatctttttgtcttcttttacctccatgtgattaatttgactgcttttttcatccacaattaaaacttagtagcttcacctgtgtcttatgtaaaacaatagttatctcatccwtacaaayagctttgccttacattaagcaagcaagaattcccattagtcttcaacattagcacttggctcaaacaccctaaccagtgataaagcttccccatgtcacttagctgagtcagtctaggcatctcttttcggtgaggatgatctgagcccagcctacagactctaatgctaaagaatgccaagcaaaaacaagaaagacaaaaagcctcagagcttagtaaatatctttttgttttctggcttaattttctgtggacagaccttccttgatttttcttaggccccacgtttggtctcacgatcttgtttcaatgactagtctaccagactatgcctctgtgttgaattgctttgaaaagagcatggcttgctacttttaaatcagtttcttagaagacaaatgtaaccttccaagatatctgatgcccacagctagttgtttatgccagttgaccgtcttcttgttatttataatttgtaattagaaaatcatcacttagaattattcttgacagatattgacttcagagaattatagaaacatagctgtccttgaggattattacagaaaaaccatgtagataattatattgagatctttaaaacctgggtcaatatttccaattatcttcacagttagccttcagatgtttacattatttttaaaagatagactttggctctggcttttatatattctacaagtgtgaaactggcagtcagcttttttttttttttttttaaacaaattgtaaaccaattttacatagaacttggaatgcttttttcaattaacatttgcattgtcctataatcttagaggtaaaagggactcagaaaagtcattttctttccttctattcctctgggtggaccatgcctaagacattccattcagataagaatctattttgttggtgaagtatcacagggctggcacttccaccacctctytcagtaacccaggctggtttctgacattttatgatcggcgacttaatgcatttccaggaaatgaatcatgttagtggtttggaacagcttttttttagaacccaactacaaatactaaaccaatcctctgtgttcctaaaataagtggtttgacttctttattttctttcatccttcttcttaccacctttccaggtttacatatgaaattgcaccagtgtttgtcctcatggaacaaataacacttaagaagatgagagagatagttggatggtcaagtaaagatggtgatgggatattttctcctggtaggtttctcttctcttcctcttctcaaggtttgggattcttaagaatacaaaatatgaagtaggtttatggaagaataatgccttaacattttttttggataccctgacttcctattttttcaagatgaaggctaacaaaaatgctacattctatatgaattaactaacaaaggctatgcttaaatctgtaaaaactgacaaaggctgtgtctagataatgctaaataaccccattttttcttttttctttttttttttttttttttgagacagggtctcactctgtcatccaggctagagtgcagtggtgtgatcctagctcactgcagcctcgaactcctgggctcaagcaatcctcctgcttcagcttctcaagtagctgggactataggcatgtgccaccatgcccagccgttttaaaatttcttttgtagaaacaaggtctcactattaaacaactccattctgtcaacagcagtttgattatgctggggatcagtgaatcaagattattaattaattgattgatttcagccaaaatagtatatctactttgaatctctagtttgaagtagataaaataagaatttttaaaacaagaataggtattctgatggtgtcagagacagtgtgattgtgtacaaggggaaaagaagaaataagaattgcagttatctaggtaattcaagcagaccacaaatttgcctaagtttaattgtcagataattaatgtaaaattaactagtttgtgttggccaaacatacatagttatgtcagttctccttgtgtctttatttaggtaaacatgagtttgttcttattttaataaacttagagctctcctaaatgactcagtaactcagttgggctgaagagagcacctaggcaggtaaccaagaaatgtcattgtttctttctgtaagctccgttactctttctttctctgtctttctgaactcagggaacagattcatctttgttcagtaaatagattgagcagaaagtaaagcaggaaggatataactcacctatccctttgcagccactgatgcagctacctcttatatttctgtctagacttcaggtggaaagcgcactgaagtacacgaatcacctccagccaaattgcctagatagctttggtaataagtgtgactacttgtattcccagggtaaagggtccagtgggaagccccagcaatagggaagccagcaaaacctatcaggatattatcctttcgcttcctgacctcccttgtctcttgagacaccagctcagcgttcgtttttagaaacaataatcaaagagccccaacacctcccaatatgtccgcttgctgacagggggcgccatatccaacatgtacagcatcatggctgctcgctacaagtacttcccrgaagttaagacaaagggcatggcggctgtgcctaaactggtcctcttcacctcagaacaggtgagtcggggatgctttctcatggatagtggtgttttttaggggactttccaacttctaacctcgagcctctgtttgttgcagagtcactattccataaagaaagctggggctgcacttggctttggaactgacaatgtgattttgataaagtgcaatgaaaggtaggcaggggagggtgaatattaggttcttgatgtattaaatgtgttcatctgttaaatttgttttattgtgcttaaggactggctcagtacattgtgccaagytgctaatggtctgttgaaaatatccgattaaattgctttttgctgctgctaaagtttttttcatgtgcaatctcattgaytcttcattttaatttccctccttttccaataattatagggggaaaataattccagctgattttgaggcaaaaattcttgaagccaaacagaaggtakgtactccrtggtgcatctgaactccagttttaaaataccttctttctgtcctagacaaaaacagtccttgataatatgagacaattttcttgtgcttctaaaattctattcttcaaatttgcttatttccaactagtaaaataatttggttttaaagctgtgtctacacaatatcagggtttttttaaaaaatgaaaaatttggtcattaaactatttgtcctatcttcattgtgccaagtgattggtttgatgttcttcaataaatcaaatccctgagcatcatgaagatatagcctaattgaactttttatttactacttgttgggtattatctcattttaacagatgccattttagcttaggattctgtttagcaaagtgcttccatgccctggcagatggcccatggtacttggcacatccagcctcaacaaactctattaaacaaaaaaactcacagaacagatgtatccacaagtcagtgccaggtagctgtcaggccacttaccaacacatggttgtttcagttacattcttatacctccttctctaattgtagttatttgctggggtcttggcacaggaagtggatctaagtgttgtaaagactgagcaaggagcagaggtggagctgagcttcacaaaagcctaagaggcagggcatgggggctcgcacctgtaatcccagcactttgggaggctgaggcaggaggatcccttgagcccaggaattcaagaccagcctgggcaacatagggtaacccacatctctgtaaaaaattttaaaaaatagccaggtgtggtggtgcacgcctatagtcccagccactcaggtgaggtaggaggattacttgagttggagaggtagaggctgaagtgagccatgatcgtgccaatgcactccagcctaggtgacagagcaagaacctgtctcagaaaaaaagaaaagcttaagattcacagatttccccaaacttgtcttagatctattactctactccttcgtttattttttgtttatgtcaacatttaaccacgtccactgttagtgagtgtatcagctttcacagtgtatagaccttttttaaataattgaaccccacaatgtttcagtataattattatatcaatacacttaaaacaacacagcctcttaaaagaatgatgcacaggtgatattcagaactatctgaccatcattccaaacacttattattactctttcctgctttattttttgccatagaaattattgctattaaacatactgtatattttgcttatttaatttagcttattatctgtcacctgccactaaaatgtaaactccgcaatgacagaattctttatctgttgtgctcactgctgagtccctagcatctatggcagggcctggcacataaaaggcaatcaaaaaatgtttgttgaataaatgaatgaatgagtgaatgagccaacaaaacactactagacatagtatctggtaatacataagttttgccatttactgttagaaataaatgttacacaattcttcttcctgtgaaaatcagcaaatgagaaaggttaaaaatactcatcagcctatatctgtcttaccttgtagggatatgttcccttttatgtcaatgcaactgctggcacgactgtttatggagcttttgatccgatacaagagattgcagatatatgtgagaaatataacctttggttgcatgtcgatgtaagtgctatataactcaggccagtccatgtggggggtggaggcacctcttttttatgacttgcctcaagcttmtccccacgccccagccagscctctctccacaccacattagttccagttcttgtctggaccctagccagccattcacaactggtacacaccacagacctggaacatcctctgggactcatccacttccttactagtcgattgytgtcttctgtggttcatcctagaatatggtctcattgccttcccaggtagctttgttgggacaagtggctacagaataaaatataactgatttcagagggaaaaaatagaagacacaacatacagaaagtggccatgaatgtgaaccctcagctacctgccttcagtccagccgtctatgacacgtctcttaaaaaggttatatctggctgggcgcggtggctcacgcttgtaatgccagcactttgggcggccaaggcaggtggatcacctgaggtcaggagtttgagaccagccttgccaacatggtgaaaccccgtctctactaaaaatacaaaaattagctgggtgtggtggcatgtgcctataatcccagctactctggaggctgagacaggagaatcacttgaacctagggatggaggttgcagtgagctgggatcacgccacatcactccagcctgggcaaaagagcaaaactctgtctcaaaaaaaaaaaaaaaagaaaaaagaaaaagaatatctgctacatttaggaaaaataaggcagtatacggaaggcattatcaactaagagacttaatcccaaatcttcccaggaacacaaaagatgcattttcacatgtgtgactgggtgtatttttttttttctttctctctgcccattttcttagggatttaacttctcacaattggccaataggatcatctgccttgctactgaactaatgactaacaaaggctgtgtcacgtggcatcccaactattcagtaaacatgcatcatggtacccacaaaaatgtcttgttgttacataagttgttgtgagacctccaaacccagcaggaactgctgctttttgagtttttcaggagctgttagaattctactctgggaagaaccagacagcaggcctcagttttttgagcagcttccagagccacccggagggggactcactgtgttggctttccacaacacattgggctaatgggccattggacctttgggtcttggcagaacaggcacctcaggctcagacctggcctagctgtatcacttgtgcagctaaagtccagaggaactttgaaaaagaaatgacaagcaatgaagaatcacaactgattgaacaatcagtgtgggctgaacttttctgagaaacttatgtttttcaccttgtactttcttgctcatgttttagtagaagtgaggactgactagttttagattcttaaatgtcactgctcccctcttcctctcctttctctgtccccacaggctgcctggggaggtgggctgctcatgtccaggaagcaccgccataaactcaayggcatagaaaggtaayggccagaactcgccaggcctccttccacccagcacatcaaacagaccatgctctgatgtcagcctgcaccaccctgccctgatccccagcatcatatttcggtctaagtttgcttcagttcagcaggcatttgttgagcatttattggatgactgatttcccagtcaaatgagtcctgaaggagttcacaatttagaaagaaagaaagacaggccaggtgtggtggctcacgcctctaatcccaaaaatttaggaggccgaggtgagaggatcatttgagcccaagagttcgagaccagcctgggcaacacagtgagaccctgtctctaatagctatcaatcaatcaatcaatcaatgagaaagacaataaacaagtagttwgaacacaatgtgataagtgtaacaggagacaattgcaggtacccaggtaggagataagagagactaaccagtgaggggaattggaggccatcagagtttgccaagggcacaggaagggccactggttcactttcctcttcttcctcattaagcttacttccagaaagggcaggacactcagctcctaacttattttctttttcactgttcaaattcagtggatgttctaggccaaatatgattttgacctgactcctaagtgttgacccataacaaagtcacaatgattcattgattcgttcagcatgtatttactgagcacctatcatgagccaggtaggagttgatgtgaatattcagttatgtgtcttccatccagccacctatggtgcttttctaataaaaatgcatatctgataaatgcagaaaaaataaggcagtatatgaaaggtgttatcaactaagagatttgtcctcctgaagtttacattccagtgggctagatgttcataacaaatatttaatctgtctcatagtaaagaaaaataaaacagggttaggtagcagtgagtgacaaggcatgctgtttcagacagggtagtcagaggccttcctgaggaggtaacatatcagcagatactgcgataaagggagacaggaagcaaggatatgaggaacagtattctaggcagtgcgagtggcaagtgcaaaggccctgaggcaggactgttcttggcaagtgggaggaggatcaaagaggccattggggctggagcaaggtgagagaggtagaagcagactaaggagggagaggcaaacatggagcaggcagggagagcccgcccagggcttctcccacagccaggactctggcttttgttacctctactgtgcctccccaaacttttgtctcagttttgaaagaccagtgtcaacgtgggtgagaccggctctgtgaagtggacaaccccgtaactcggaggataatgtaaaaaatctgggcagggtgtagtggcctgtaatcccagcactttggtaggccaaggagagcagattacttgagctcaggagttcgggaccagcctggccaacatggtgaaacccccgtctctactaaaaatacaaatattagctggcatggtggtgcacacctgtaattctagctacgcaggaggctgaggctggagaatcactagaacctgggaggcagaggtttcagtgaaccgagatcacgccgctgcactcccgcctgagtgacagagcaagactctgtcttaaaaaaaaaagaaaaaaaaaagaactgtggatgagccagcccaatttaactttagatttctcagacaattttaattttctgtctttgagtctaggaaaacttaaaacatttcacactagactttttcttttctaacattttaaatcacataagtcttctaaaggaaattgaattcatattatgtcttattactttccttttgtagcagcaaagaatcatttacttcagacctttaggatatgcagaaaaccatttaagacattttatgagacctaaatataattttttaatgacttggtaaatgatagcaatgagaaatttgattaaattcactaccatttaaatatgacctgacactgatgctttttagtgagctaagcacttagttaactttccttggaatttttcacaggtctctttcacaaaggttttattatacactgaagggaaaagttcttcagaccttcctctcttctccttgaaacagagtgcactaaattattttgttaggtcctttaactaaaggacctaagcacgatgaagaggttgaaagttcacaacaagggtttagctctarggagagcagaggcaggatgattctgagccaattgctctatctaggggaaaagatccttcacaggtattaaaatgcagcacctagctataggccaggcctttgggaaggagtctgcaaaccaatgaggcaagttacccatgttttcatcatcatacattagacttagttgtttctgtaatgccctagctagtgtgctccttaaccatctaattgtgtctgacagaatgatgcagttgctaggagaccatgcttgttaagctatcattgcagcccaaactggcaaaatcactctaatttagcatttaaataattctgctaggtagtcagagtctagagtagtccagtcgagccttgcttttaggtgccactcttgatactgccccataagtgggtagggcagcatcaccagcctataaatgagaagagaaaggcagaaagaagccactgtgtctcctagagagaagcagtctagtggagtggttacaaaaaagggctgtgcacttagaggccctggacttgaatccaggctccaacacttcccaactctgtgactttgggtaatatatttaaccttttggcatgttagtttccccatctaaaacagaggtaataatagtacctaccttatagggttgtggtaaggattatgtgtgccaggcactcttataagcattttatattaagttattttgtcctttattcaattctgtgaggcacacactccccatttaaaagaaactgaggcacataagagttatataatgtgcccaagctaacaaatattagagctaggactcagacttaaacagtttggctccaaagcctgaattcttaaccataccatattgatataatacctgaaagctctcaagacaataagacatataataagttattcataaatgttagctattgttaatagcagttacttctaagatatagtccgtaatgtaatactccgagactgcctgcaaaacatttgtttgctacttgattagtcaattcaggagaataggcatggataatatttactaacttgagttggaatgggtgttttcctcaagagaacagttgcgtctttccaactcctgcaccttctcgaagtctcatgtgcttctttcagggccaactcagtcacctggaaccctcacaagatgatgggcgtgctgttgcagtgctctgccattctygtcaaggaaaaggtctgtactccctccaaagctacactggggcccgtacgttctttagaaagcacaaaaagacacacgtggggtctctttgcagtacttgttggctgactcacgagattggcagccccactgagagactrctgctgctgtcctttcctgcccttgcagctaacctggtttcttctcttggctcttgctggctactgtgcttcttctttgatcagtactcarggtctgtcagcaactgaacctttaaggaaattatttaattgagtattccttcatgtttgcacaaaaaaagtgggagcaagtaggtgaggcatccaatcagttttgtcctcagtgaggacaaaagcactcactggagcatactcggagttcttagtataaacgtgtggtcccaagaactgaaataaatgagacagaacaacaactacaaatatcaacttagggccacaaggaatattgccccaaaagctgctgtaaatggttgagcctcatattcccttcttcacatgcctaatgttaggatcctgccctccaaggctttgttgctccagtaaaacttctgcacacagaagcattccaaaaagtctgtctccagcctgtaggagccagaatctgcacagcgtctttagtccactcatatgtggaatccatgttaatgtcataggaggtcctggaaaggttggaagacttttgccagagcgcttttggagagaaaaattcttcacagcatgaaactatcccacccactgaggaattttctatctctaaccctggcccactgaatgccgtagcacttcccaatcttgaaacaatcccagacacccatacacatttccccttagagggatggcatctgagacggaaagatcatcttctaatcagagagtcagagacaaaagggatggcagtttttccaagagtgattttagaaaagggcatcagaacaagtgtaaggcctcataaagacatcagaagaaagattgcatatgaccccaagcccctccttccaagcagcctagttttaaagccacccacatctctgatgtgtaaatgcagatgcacccatcttaatttccatgatagggtatactccaaggatgcaaccagatgtgtgcaggatayctcttccagccagacaagcagtatgatgtctcctacgacaccggggacaaggcaattcagtgtggccgycacgtggatatcttcaagttctggctgatgtggaaagcaaaggtatgaagggaatagttcaggaaatagagcagaaatgtaatttgcacagactggctggcaaaagaggggcaaagatatatcacagataattcactatatggggaatcaatatctagataattgaattaactgtgttttctttgtgaatgaaattactttattccttatgtcaaattctctctccttttgttcagtctcctcaatttgaactattatgaagtcttcttataacgttctcttataacaactaaaaattatgccaagataaggatttctgcagcaatccttggggatgctggaattatttagtgcaggcatagagaaagataaaaaaaaataaaattactgcattattctgagtagaaccttgaattctttttttttttttttttttttgagatggagtctcactctgtagcccaggctggagtgcagtggcgcgatctcggctcactgcaagctccgcctcccaggttcacgccattctcctgcctcagcctccagagtagctgggactacaggggcccgccactacgcccggctaattttttaaaaaatatttttggtagagacggggtttcaccgcgttagccaggatggtctcagtctcctgacctcatgatccgcccacctcggcctcccaaagtgttgggattacaggcgtgagccaccgcgcccggccccttgaattcttttatgaggcttctcaacatgggctatgtatgacagttttaacttcaacttcaataatgcctttcccattgtttgtagttaatacaccattctggaaaatgtatactttattgtgaaaaatcctacttttagatggtagcatgctgtgtctgcattcatcaaccttttgggtttcatttctgtacctaaggaaaaaagctaactattggaatttcccccaaaatatgagtgagggagaggattaccatttgattatttgtttcaaaaatatttgtatgcaatcaaggaaaagaaattttgatttcatagttttatattacataccttgtttttgttataaattaattttaataatttctatgtttaagattgagtctaactgtctaactaacactcaaacaacaagattttctggcaaaatttctagtcaaatatttcttctgtaggaaaaatttggtagattattagttttttcctcagtaagtcattttgtcttttttttttttttttttgagacagtttcattcctgttgcccaggctggagttcagaggcgcgatctctgctccctgcaacctccgtctcccagattcaagcagttctcctgcctcagccttccaagtagctgagattacaggcatgcgccaccatgcccatctaattttatatttttactagaggcggggcttcaccatgttggccaggctagacttgaactcctgaccccaagtgatccacccaccttggcctcccaaagtgctgggattacaggcgtgagccaccgcacccagctctattttgacttaatatagaaatagtctgaatttgatttctattacaaagtaatcataggaattttaaacatataaatagccataggctgggcacggtggctcacgcatgtaatcccagcactttaggaggccaaggcaggcggatcatttgagctcaggagttcgagacccatctgggcaacaaagtaagaccccatctctacaaaaaatacaagttagtcaggtgtgatgacgcatgcctgtggtcccagctacttaggaggctgaggtgggaggatcacttgagcccaggaggcggaggttgcagtaagccgagatcatgccactgcactccagcctgggcaacagagtgagactccatctcaaaaaaaaaaaaaaaaaaaaaaagccataaacggcaacaacaaaaaaggagtcgtgtcattttgaaatataatgaccacacaacctgtttcagtaatttgtgtcttcttttttgtttctaacaataacctcttgaaccatctgctgcaggttttgaccatagtgattggttgctgaaatgggaccctggtacaggcttcattcctaagtggactgactaggktgtacagtcagcagtgacactacctggggaggctgatgctttctcagtgctggactttgctcaggcccattagcaatccacagccagccttgtgcatctgctctccttgttaacaccgacccactcaacaaccctcatactgctgttattaatcagccatgctggcttttgaaactcatgctcaaccagtttgtcaatagttggaactattgcaatatcagggcatatactgagaccaatggcttccccatctacctgcctgcctgtcacctaaaaggcataacactgttatgtggaaggttgcctgcctgagagggcatgggacatgtttcacaaggacttactgctggggaagatgagttctacagcagtatctttcgaagtttttctgatgaagaaccagttatttgttgttgttgttgttgtttttcacctatcatggaccaataccctaaagattaattgttagaaaaatgaaatttaaaaacatacaaagaacaagccactgttttttattagagtcaacagacaaaatccctttgtccaattgccattaaagtttcctatgcttaatctcaatttctacactcatttgattgtagaccagttacagttgtggagtggcctcagttcatagatgacactttgagtagcaccatcctaaagcaaaccagaatcaggcataggtccagttgagaataactacccagagactggagtgcctttgaaagaggaagcaggcacacatcatttattgcatgcacatctgtgaaaaagctgacatatttgattagattgttcttcctaaccagctccaaaaatactttttttgtttatttcccatagacagggacagcatagccttcccaaatgctcatcacagggaaatgcaaccacaaacatgacttttctctttaaaacagggcacagkgggatttgaaaaccagatcaacaaatgcytggarctggctgaatacctctatgccaagattaaaaacagagaagaatttgagatggttttcaatggcgaggtaggtaatcatcatggaccaggtacacagtatttccagaaaaactgmtgagggaagctcctgaagcttctggcaacatgggaaaatcaatcccatgttgccagaaactgcttcaaaatttttattcttatacactcttaattcctctctttaattccttccatgtctatgaacttttcttctggtagcactgggatgactttttcctttacatcttttaaaactgtgttgctcttggccagcttttggcagacaagaggtctttccttgacaggtctgaatccttcatcattcttgggtttgttttgtgttgaacctttatgaaaaagtgtttttcaggctgggcatggtggctcacacctgtaatcccagcatttcgggaggccaaggcaggaagattgcttgagtccaggagctcaagaccagcctgggcaacatagcaagaccctgtctctataagaaaaaatatatataatttatgaaaagaaattttacaaaacgataaagtggttttcatttccaggaagcttataggatgggtatattcttacctcccaagacttgttctaaaataaggttctacttaacatagactcataaggaagagagcaagataaaattgtctctgccctcagttcatgtgcatactgcacacagcaaagtatttgtcagtgtttactgagtacccactgtgtgccaggcctcctgctaggacctagattctagagtattgaacaaaacagatacattctctgacccaatggagcttacacttgaataaagaaagatagaataggagccagtgttgaataaaagaaaatccacttataagccagtataatataacactgcttacagtcaacattattctatttatcaggcaacctaaactactaggaacacatgtgaatcaccaaatgaacaaaaaagagccctgggcagtttaaaatcagtgacactgctctgatcatttacacactactttaaacactcttaatagcagattaaaaacaacaaatgtgatatctcaaaccaattagaggcaggcacagtaatggcaaacagcaaccagcgagaaaactttatagcaagaatagggaagaactcaaaaagcacaggaatctttagaggagggacactaaacagtttgaggcatctcaacaggccttgccttatgctgtagaaacagtcttttggttttttttaggagcaaccctattaattgatatatccagtcttaatgtttgttatgatagtcctgagtcatcaagaaaagattcaatatcaatataataaactcaataaaatattcatcagcatccataaactatgtttcaattatcttctatatgtgaggcactacaaaatgacaacatggacagacggataccttttttaaaaaattgcccaaatgtaattatttgtaacatttcaatgtttaaagtcggtaactttagttacctagaaaattggttgtagggaacagctctcttgccacatatgattggataaatgaggcattgttctccctggtgtggaagtaacattgcctttgagatgaacattcaacctctttctttggtccaagagacttccaccaaggatgcatattggtttgggaacagctttctctcaagttatcctaattttctttgtttgtcttttaaaatctctgcagcctgagcacacaaacgtctgtttttggtatattccacaaagcctcaggggtgtgccagacagccctcaacgacrggaaaagctacacaaggtatggacttgctttttgkctcatctaatcctctgcaatttctctggctggtcaggacatcctcattccaatgtgcctttctagtgggggaaatataaaaaataaagccttggggtgggtttctagtaatggggtggtggggagccatcctgttatattcctcttgagcctgcatcgcccccttactgtggttaccacgggaacttctaaaggatgcatcttgtctccttgtccttggttgatgttcttcattaaaggagccctatgcagggkaagggaataatgtgcatattcctagggacattctagattaaactgtgtctgttacaataacattttaagttcaggcccactgtaatgctgattcattctaactgttttctatatccagtttatatcttatccagggttcttaagattatatttaatttatataacatttcattcatccaaccattcaacaaatatttgttaaacacagtctgtgtgccaggcagtatcctgggctctgggttatacaaaaccctgaatttgtggtgttgtctataagagttttttggttttgtcttcattttttattttactatcattgttccatgactgactttcaaaattcggttgcacagtactttctgagggaacttgtgaccaggtagtcatttgatattagcccctgaagattcctggatatgaaatatttctttgcttttatgtcartgtaaacacaaatagtaaaatgcaagttgggttgaaytgttaaaaagagagggtgttcatatcaatcttgagttttgttttgtgttttccatcacaaggtggctccaaaaatcaaagccctgatgatggagtcaggtacgaccatggttggctaccagccccaaggggacaaggccaacttmttccggatggtcatctccaacccagccgctacccagtctgacattgacttcctcattgaggagatagaaagactgggccaggatctgtaatcatccttcgcagaacatgagtttatgggaatgccttttccctctggyactccagaacaaacctctrtatgttgctgaaacacacaggccatttcattgagggaaaacataatatcttgaagaatattgttaaaaccttacttaaagcttgtttgttctagttagcaggaaatagtgttctttttaaaaagttgcacattaggaacagagtatatatgtacagttatacatacctctctmtatatatacatgtatagtgagtgtggcttagtaatagatcacggcatgtttcccgctccaagagaattcactttaccttcagcagttaccgaggagctaaacatgctgccaaccarcttgtccaacaactccaggaaaactgtttttcaaaacgccatgtcctaggggccragggaaatgctgttggtgagaatcgacctcactgtcagcgtttctccacctgaagtgatgatggatgagaaaaaacaccaccaaatgacaagtcacaccctccccattagtatcctgttaggggaaaatagtagcagagtcattgttacaggtgtactatggctgtatttttagagattaatttgtgtagattgtgtaaattcctgttgtctgaccttggtggtgggagggggagactatgtgtcatgatttcaatgattgtttaattgtaggtcaatgaaatatttgcttatttatattcagagatgtaccatgttaaagaggcgtcttgtattttcttcccatttgtaatgtatcttatttatatatgaagtaagttctgaaaactgtttatggtattttcgtgcatttgtgagccaaagagaaaagattaaaattagtgagatttgtatttatattagagtgcccttaaaataatgatttaagcattttactgtctgtaagagaattctaagattgtacataaagtcatatatatggaaatcctgttacttaaatagcatctgctcttctcttacgctctctgtctggctgtaygtctggtgttctcaatgcttttctagcaactgttggataataactagatctcctgtaattttgtagtagttgatgaccaatctctgtgactcgcttagctgaaacctaaggcaacatttccgaagaccttctgaagatctcagataaagtgaccaggctcacaactgtttttgaagaagggaaattcacactgtgcgttttagagtatgcaagaagaatataaataaataaaaatattctccatggagaatttgaacaaaattttcttctagtttgtgtttcatacagagatgtttctaattagagttccttgggttgcccatagcccatttgctttctattggctgactttaggtgatgctcagtaccctgattaagctgaaggagactcgatccactgtcacaggctctgaagctcctcatctataaaatcattatgggctgggcatggtggtgcatgcctgtaatcctagcactttgggaggctgaggcaggcagatcacttgagctcaggagttcgagacccatctgtgcaacagggcgaaaccctgtctctgcaagaaatgtaaaaattagccagctgtggtgatgcgcacctgtggtcccaactatttgggaacctgaggtgcaaggatcacctgagcccaggagatcaaggctgcagtgagctgaaatcgtgccactgcactccagcctgggtgacagagtgagaccctgtctcaatcaatcaataaaatcattatgattataattaattaaatgtgcagttcaagccttgagaaagaaaagccatccctgtttctccttttcctacttgcatcttggagttacattcattcagtcattcaacaaaagataagtattccttctagtgggcatcttacatcacttggtatctctgctaactgagtgcctctaagatcacagaagcataacttcctgctgctttatgcttgtagagtggtccccattcacttcctagggaaatatatgttggtgctggatcattaggatatgggactgattttctacaatattctttgtgtgtgtgtgtgtgtgtgtgtatgtgtgtgtgtgtgtgtgagagagagagagagagagagaaagagtctcaactctgtcaccaggctggagtgcagtggcgccatctcagctcactgcaacctctgtctccccggttcaagcgattctcctgcctcagtcttctgagtagctgggattacaggcgtgcaccaccacacccagctagtttttgtattttagtagagccacggtttccccatgttggccaggatggtctcaatctcttgacctcgagatctgcccacctcggcctcccaaagtgctgggattacaggcgtgagccactgcgcccagcccattttctacaatattttattcagctatattaatacaatctcactcatttggaatacaagaagctccctatttagcacaggtagggaatacagaagagtcctttgtaattagcacactgattgcatgtaaccattgtattaaacgactctatagggagtgatcataaagccacttattctttctctcactgtttctataaaacgcccctgggggctgattttttccatgcccccatttgaatttaggccaatcccatagcttttctgtcctctcgggtgcatgaacagtctcatttttgcaactgagggtccaggttgatgtaataagcaaagtttcaatttttatatgatatagagtttctcccccctccccccgatctggcactgcttcagctgcaagcctacagtggcagggagagcaaggctgacggtgggtgaggtcaccttttttcttcatctttcagctcatctccctagctcctgtgcttcctcattcagggtcaggcctagcgggaggaagggataacgtgacaaaggtaaaattttacatggctattaaattgtcattgggcatcaagttccctggaacatgagtttttgttttttggggggttttttttttttttttttttgagaaattttctggagtgaatgaggatttttggaattaaggtaaaatttagatacaatgaaactttttgtagtgtactgtgtatagttttctgtggattttgacaaacccattcagtcatgtattaataactatcatcatgatcaaggtctacaacaggtctgtcaccccaacgaatttcccatccccctttgtactgaacacctctcctactcagcccttggcaacctctgctttgttttctgtccctagacttttgcctttcccaccatgtaaatggaatcatataagatttagtctttttttagtctggtttcttttgcttaacgtagtgcacttgaaatccatccatgttatctctatatcagtgttcattccttttcactaccgcatagtattccatttgcataaatgtaccatactctgtttatccatcccttagtagaggggaatttctgttgtttccagtttttttggcgattagaataaagctactggaaacaatagtgtgcagatttttctgtgaacatagatttcatttaacttgggtaaatacctacgtgtaggattgcaagataacattaataatatgtttaattttatcagaaactgctaaactattttccaaagtggctgtaccattttgcattctcaccagcaatgcacaaatattccagttgctccatattcttgctgacacttggtactgtcattttccccccatgctggccattctaaaagtgttatcttgtggttctaatttgctttttcgtgaagcacttttgaaggatccctctggggtcctcccagctcattgcacaggaggcagtaaaggtttatcctcctgcaaccacttaggactcagaccctcaggcctgggcccctggcagtctacactgtccagaccttgtagttgggatcctttcttctccaagtagtacatttggccaggatgccttttatttaacatcagttactggccaggtgcagtggctcacgtctgtgatcccagcactttggaaggccaaactggaaggactgccttgagcccaggagttcaaggccagcctgggtacattgggagatcccatctctacaaaaaataaaaaaatagctgggagtgtggtggtgagcccctgtgatgccagctactcagaaggctgaggtgggaagatcactggagcccaagaggtcaaggctgcagtgagccatgatcatgccactgcattccagcctgagcaacagagtgagacaccatctcaaaaaaaaaaaaacagaaacaaaaacaaaaccctccttagataatctacaataactgattttttttttttttttttttttgagacaggatcccgctttgtcacccaggctagagtattgtggcatgatcacagctcactgcaacctcgaactcctgggcttaagcaatcctcccacctcagcctcccaagtaactgggactgcaggtgcatgccatcatgcccagctaattttttatttttttgtagagatggagtctcattctgttgcccagactagtctcaaactcctgaactcaactgatcctttcacctcggcctcccaaactgctagaattacaggcataagccactgtgcctgaccaagaagggctttattagacatacatgtataggacaaagggtgatgacattatacttgagtacccattacttagcctaagatatagaacattattattatcatgaccttagcactctccaaccccgtcacgaaccttccctgattggatgctccccactctctaagaagtgatcactattctgaattttgtgttactcactctcttatttttctatatagttttaccacatactcatgcatccttattgtttagtcttacctgattttgtactttatgtaaacagaataatacagaatttttatacttctgtgacttttctagtcaacattatgattttgtttgtccagagctaacctctagggagacttcgtgcagtttaaaataaaaaaggtacccctgtcttgatagctaagcatccctgtgccagtggagctggaatagacttcagcgcctactcaacctattggcacaccctgcaaacacggtctcatgtagaagcctcatggttttgagagtcacctttgacaatggctgcagctgtaattcattcatttttatggctgcaatgctattacagtgtatgaatatacttcagaaggtttatccattctattgggggtgaatatatgagtttttccagttttgcctttagagataacattgctatgagcattctagtacttgttttctggggtacatgtacaaaagtttttctaaggtttatacctagaagtgaaattgctgggtcacaatgtatttatggaactttactgagtagagcagtcataccaagttgcatttcaagcagccatgcacattgtgctataacttcaccatcagttggcctaagatttttgccagtctggcaagtatgaaatagtatctaattgtaaatttaatttgtgtctccctgattacaaatgaggttgagcgccttttcacattattatgaaccgtttatgttctgtcttctatgaaatgcctaaatcatgccttttgtcaaattttcaattgtttgtctttttcttttgattctttaggtattctttatatattccaaatcctaattcttttaaattatgtttggcaaatgtcttcttctaattcagggccaccctttttactcagttaatggtcttttctgaaaacataagttcttaaatttaatgtaaatttatcaattattttcattgtttctgcttttcttgtatgtcttctttaagaaattcttccgtatcccaaagccataaagacattcccatatattggcttttaagttttaaggttttatgcctttcacatttaagccttcaatccatcttgaattgatttttgtgtttggttcttttttgagactgaaagggctattaatagcccctcaatcttccatataaatttagaaccaattcatcaagtttctaaaaaattcctattggcatttttattgaaatttcattgaatcagtggatcaactgaagaacactaacatctttttaatattgaatatagtagccataagtatagtatgtatttccacttaactaggtcatctttaatgtatttcagtagttccacaacagtcacagaaaactttctttttttctctttgagatggggtctcactctgtcacccaggctggagtacagtggcatgatctcggctcaatgcagcctcgacctcctgggctcaagtgatcatcccaccacagcctcccaagtagctgggaccacaggcacacaccaccatgcccagctaattttttgtattttggtggagatggtgtttcgctatgtcacccaggctagtctcaaactcctgagctcaagaaatctgcctgcctcagcctcccaaagtgctgagattacaggcatgtgccaccgcaccccatccacgcaaaacttttgacagatttattcctaggtgctttatattgttgttatttttaatggcatctcttaaaaattacattttctaactgttgctgatgtatagaaatataattgccttctaatgaaggatttttttaaaaaaagaaggaaagcaattaaaaagaacaacaaaaaagaaatgtaattgcctttcggttgatgattttatatccagaaagcttgctaaaacgcaaataatttgtttctttaatgctttctaaacaggcaaatataccatctatgaataatggcaactttgcttattcatttctgattcttatgtcttttattttgcttttccttgatatactaaacagtccaggatatccagtacagcatgcaaaagaagtgttagtagcaagcacccttacctgattcctgatattagagggaatgctttcaccagtcaccatttggtttcacatttcctttagtttttttgtagatcccctttaatgggttaataacatttcttttaatttttagtttctatagtaaataaatgtttaatttcatcaactttttctgcatttgttgagatgatcatctttcttcttcatgtgttaatgtggcattattcataaactaaattttccatgtcttgagtcagtttttgcaagttgtatttttccaggaatttacacatactttaagttttcagatttattggcataaagttgtctataatattct

SEQ ID NO: 93197 - DNA, 20679 bp, Homo sapiens
atcccagctacttggggggctgaggcaggaagatcgcttgagcctgggaggtcgaggctgcagtgagccaagattatgccactgcattccaacctgagtgacaaagtaagacccagtctcaaaaaaaaaaaaaattatctgaaatctagccaagcatggtggctcccacctataatcccagcaatttgggaggccaaggtaggaaggtcacttgaagccaggagttcaagaccagcctgggcaacatagagagaccccatctatacaaaaaatcataataataataactgggtgtggtggtgcctccctgtaatcccagctatttgggagcctgaggcaagaggatcctttgagcccaggagattgaggatgcagtgagccaggattgcaccactgcactctagcctgggtgccagagcaagtccctatctgaaaacaaacaaaattatctgaaatcctgttctggctacagtttacctcttttagtatttgacatgcttcttttcagtctttctcaagatgtgtatttaggaattttttttctatctccttgttgttgcaatactgagatttactgtatattcgttttgtatcctgttttgcaaataataattctactttattaccattagaggagcactagtgtcccttacaaagttatgctaatggaaagaatttctgctcttgcaacagtgtgtggtccttagaagaaagttaatatttaatattaacagtgttaagatggtttcacccccaggtaaatcagtaggaaaatggaggggaatgcattggtggaaaggtgaaggacagaagtggagttgaagcaaaaccagattctcactctacacaaaagaccagcgtgcctctctccccagttcagagccagcaagagccccactaacaccaccacccgcttggtacctgaaagaactgacacaaagcacacgcaaggacgtggaggaaagcaggagttaaacagtcaacaaaaaaaagctgaagaaggtttgggactgggaagatgcagatttagaaaaataacattatgaaaatgggcacccttgaagaacattctgtgcccctcgtccccctcaccttatttattccatcaccaaataaagtcacagctgtcggtcctctgctatctgaagcattaagtgaaagtgctgtttcacccagcagcagatttcagggtgcaccagcccaggagggatgggcatggcggtatctggtgtgtggttgggaggaagcgctatcctctacttaggaggaagaattacagagcagcagggagcttctccagagattgaagaggctgctggtcccaaccttctgtacgcatcgcacctcgcagatcctgccacggggagccacatccccgaagggacaaagccaggagagtcgcttgagaatgattcatgccatttctgttaaatgcctggcacgcagcaggacttgatacattttaacaactactcttctattttctttaagtctactacagtggtttgaggcacaggctttggtttaaaatagttctaggttgaaatccatgctcaaattctactcattagctctctggcctcagagcggatttaccaccagcactctaaacctgtttcctcaacagtaaaattgaattaattaaatctatttatgggattgaattcgctaatgtatgtaaagcccagcccataattaaatggtagcagttagaattgacctttaacatatgccatattttgatggtcattcttgttttttcttttttcccacattctatttttgaacacctccctgtctgtatatttatttaatcatttctttcagaactattttgaaatctatttttgtcttttttttttttttgagtcacccaggctggagtgcagtggcacaatcatgactcacggcagcctcaaactcctgggctccagcgatcttcccacctcaccctcctgagtagctaggactacaggtgcttgccaccatggccagctaattctttattttttgtagagtcatggtctcactatgttccctaggctggtctccaactcctggcttcatgaaatcctcccacctcggtccgccaaagtgttgggattacaggcatacgagctgcagttcctggccctatctttatctttccatagccttatttttccatctctaatctcttcatcccagcatagtgtatccattcgtgcttctagtacgggcaatatgaatttaaataagtgtataaataagtgaaacaaatatagctcataggtcctttgatggaagtgtatatgagcacaaagaaggaaacggacaaataagagtggatccaggctgggcacagtggctcatgcctgtaatcccagcactttgggaggccgaggcaggcagatcacttgaggtcaggagtttgagaccagcttggccaagatggcgaaatcctgtctctactaaaaatacaaaatttagccaggcacggtggcacactcttatatcccagctacttgggaggctgatgcaggagaactgcttgaatccgagaggtggaggttgcagtgagctgagactgagccactgcactccagcctgggtgacagagcaagacttcatctcaaaaaacaaacaaaaaaaagagtggatccaggccgggcacggtggctcacacctataatcccagcactttgggaggctgaggcaagtagatcatgaggtcaggagcccgagaccaacctggccaacttggtgaaaccccgtctctactaaaaatacaaaaagttagctgggcatggtggtgcatgcctataattccagctactcaggaggatgaggcaggagaattgcttgaacccaggaggcagaggttgcagtgagctgagatcatgccactgcactccagcctgggcaacagagcaagacttggtctcgaaaaaaaaaaagagtgaatccaaaaaggctttacagaggaaacgattctccagcctagtcttgaaacactgaagtttcaaataagatagccctgggtttgaacctgtgtcctgccacacactagatgtggatgagttaactaatctgaccaaatgtcagtctctctcaggtattcaatcagaatgatgacaccaatttaatatatgggtgagataaaatgagctgattggcagggcatggtggctctggcctataatcccagcactttgggaggctgaggcgggcagaccacctgaggtcaggagcttgagaccagcctggccaacatggtgaaacctaatctctacaaaaaatacaaaaattagccaggtgtggtggcatgcacttgtcatcccagctactcaggaggcgacacacaagaattgcttgaactggggaggcagcagttgcagtgagccaagatcacaccactgcactccagcctaggagacagagcaagactctgtcttaaaaaaaaaaaaaagaaaaaaaaatcgccaggcattgtggcatgcacctgtatagtcccagctacttaggaggctgaggcaagaggatcgtttaaaagaggatggtttaagcccaggaggttgaggctgcagtgagctatgattttaccactgcactccagcctgagaccctgcctcaaaaaaaaatcaaaaaaacaaacaaaaaaacaaaacaaaacaaaacaaaagaaatcaagtgggctatagatcgactcatgaaaatgatcctcacggatatgtcagtccccaggtaatttctataattacccataaacagctgtacacattgtctgtggtgtactttaaactgtattttccccgctttttgaaaaaagtgtaatgcagggttgaaacagaggtcttgtcaaagattgagatcagctttacctacaacatcctctcaacctaccaatcttgaagacttttcacttaaaatgacattgatcttcacctgaggtcgggagttcgagaccagcttggccaacatggagaaaccctgtctctactaaaaaataccaaattagccaggcatggtggcacatgcctgtaatcccagctacttgagaggctgaggcaggagaatcgcttgaacccgggaggtggaggttgcggtgagctgacattgcaccattgcactccagcctgggcaaaaagagcaaaactccgtctcaaacaaacaaacaaaaaaaagatattgatcttgtaagtgctctttcacaattccttttatgataatgttttaactaggtttgcaaattaaatccaaattttaatttggatgcgcaaattaaaatctcaaatttctcaggtcaattccttggggttttttgttgtttgtttgattgtttattttcgcttttgtttgtttgttgagagggagcctcgctctgtcgctcaggctggagtgcagtggcatgatctcagctcattacaacctccaccttccatgttcaagtgattctcccacctcagcttcccaagtagctgggactacaggcgcctgccaccacacccggctaatttttgttttttagtagagatggggtttcaccatgttggccaggctggtctcgaactcctgacctcaggtgatctgcccaccctggcctcccaaagtgctgggattacaggtgtgagccaccatgccctgcctctttgttttaaatgacaaggatttcatttcatatttaaactgctgtaacacaagggacaaggaaaagtgaaaagaattttgtttctctagagaaaaaaaaaggctaggcggtacattaaacttggatggcagcctgtcatggaacctggggattggtcacattggccagtactttctctaacccagagatcaaaacctgatctgccaccactgctgggaatggagtcagtcctggtttcagctatagctgacaccatcagcttcaatctgagccaatctactttctgcctttcttctagtagacagcgagagttcaagccagcctagttctcaacagcatcatctgctaacatttatcatctcccccacttccctctcacacaataaggtaggcactggggaaggtagcacagtccctgccttcaaagtgcttacaatcttggtgcttacaataaaaatgccgatcaagtgaatatgtcactagaaggcagcacatgagaaattaatatgaagatggccggacacagtggctcatgcctgtaatctgagcactttgagagaaggtgggtggatcacctgaggtcaggagttcaagaccagcctggtcaacatggtgaaaccccatctgtactaaaaaacaaacaaacaaagaaaaaatatatacaaaaaattagccaggcatggaggcgggcgcctgtaatcccagctacttgggaagctgaggcaggagaatggcttgaacctgggaggcgggttacaatgagccaagattgcgccactgcactccagcctgggcgacagagtgggactgcatctcaaaaaagaaagaaagaaatatgaagatgaatgttttgagagtctggggaaagtgaagttcactatgagctgagctggtggaaatggcttcctgaatgaaggaaatccatggtgccttctccattttgtgggaggcactggtttagagagtggttaaggacataaactgcaaagccaggctgcattgtttgaacaagctcagctctgccagtaacgagctgtgtgaccagggcagagtacctagcctctctgtgcctaggtcgcctcctccctaaaattaggacaatagtaattatgtctccctcatagacttgtggggagtataaaatgccttaagctaaatgaagcacatggcatataatgaaggctaatgggggcttcggaccattgttctttatgacacggtttcttgagaccgaggcatgtacaagccagtgcacagaatcgtgtctatgtaattagttaattctgtctgggaggagtgtgtgtgtttaagacagtgcctgggatgacttataatgtaatctttaggcaaaacgctttgtaattggtgcagctctgagaacacacgcatgcattccaggcggtgctgctggggctcggcggggccgtgtctggtctgcaaggcgcgcgggctcgtggggggttggctggggagcccacgctgcctggcgactcgggccaccgaatgtgagaccgagtccctttatgtcacyagcgcacacgctgatttgaaccctgcttcgacgtgtgtgtcatggcttaaaaatagctgctaatctgtcaacctgtcttgggcagaaacagcsgcggcgacagcagcaggagcgtcatggccgtggcgctgtctgcgccggcgatccgcctttcggactgaggcccagcgcagcgcttgcaaagaggtagaggggctgcggcgggccttcgccttttcagctggctctccacgctggggagaggcgcccagctaggggcgacgggggagggaggggaccgggaagcgggcacccgagcccakcgagccagcctctctctccmgggcgccctccctccgcgcgcggggcccggctgccaggctggcgaggactggggcgacagccatggacctgttacaaaggcgaccgcaggcggagggagggagcggcgggccagggcccctggagccgacggatgggattggagaatgcccagggctgtatccctggacagaaaggggcttctgcatcccccgggaaaaacagccccacggagatccttcttagacctgggctccttcacgcttyccccatcccattcatcatctcgtagacagcagactctctaagaggaaaggttgtattgcaatacagtaatggggtctttaggcctgggtgcaaaggtagaagaagatgatggtgatagtgatggtggtgatggtggtagtgatgatggtgatggtggtggtgatgatggctgtagtgctatatttctgtgctccttccggacccagccattgaaaactctctctccctaaactccctaacatccaatcttccctcaccaatcctggtcctaaaacccctgcttctaatgccttgtaagtgcttggtttctcttggcactggagcaagggagagctgggccctgtctaggggtgtgagatggggacagagcatgggcagggacaaagatggcctctcactgctggtcatagagttgaagtccccctggcaggaggccaggaagggagtggaaggggattctgcaggctccaggacctcctgctttcaaacaggcaggaccacaggtgtgagaggatggggagggagggggaaggggccttgccattgttgcctccctgcctgaaggtcccagggcaagcctcaaacgctggtccttcccagctctgcagctcaacaggtaatctgagacacacctgctaagcccctcgttattgacctcgtgttttgtagggtcacttgactccaacagccatacggttggtaattctaagcctctgagcccctggacctggcaggatccctcatttttccctttccttcctgctttctaggcccccaccacccacccctgtcccccctcccctcaagacacacacagacaaaacactccaaccctgcgtcaattcccccaccatccacctctgtcaccctcccctcaagacacacacagacaaaacactccaaccctgcttagattcagaaattctcacattagagctgagatctgatcagtaatttcctaatgctgatccaaggagggtggtttgcctgttgtgcacatagattggtgccttcttccataagctcatgcattcagcaagtatttattttttgcaaacttactcttcctctttattgctattctccactcaccccatcccacccccaccacacccttcccatagcaggtttatctctgaggcagtggcaggtcacgaaggggttaaagtctaactctggcacagagatggcaggcctgacatgtgtcatggcctcagctgctgttgtctccctgctaattctctttggatgggtctaaaggtacccccaaccccatcccagctccctaggctctctgcygatagccccaggcagatgagactcagattccagctggcaagatccccagcagtggggacaaccacccaagtgccgtgtgtgtgtgtgtgtgtgtgtgtgtgtgtatgcgtgctggcagtgggggtggggtgatgaagctgaaacctagcagctgggcagctccctctccccgtaaacaaggacatgtgactctcccacctcgttkcgtggcagagccaaagagctgagcaaaaggagctgctgcagcttgaagaaaaagccacccctgaaggctcctgccagagccaggcttaccttctctccctcgagaatcttctcccgaaggaccagcccagggaagggaagcagctgctctggactcactcaagtgtgtctcacaccccttcctcttccagcagcagctacctggcaactgaacccatcatcaccacagccactcctgcagctgccacggtttctgccacytctaagatgtgccctggtaactggctttgggcttctatgacttttatggcccgcttctcccggagtagctcaaggtctcctgttcgaactcgagggaccctggaggagatgccaacygttcaacatcctttcctcaatgtcttcgagttggagcggctcctctacacaggcaagacagcctgtaaccatgccgacgaggtctggccaggcctctatctcggagaccagtatgtatcgggcagactgggcccacggtagagcgtgtgtgtgtttgtgtgtrtaagaaaggagaagggtggcagacaggtatgcagtggtgtcattggttcctggttgaagattgaggggatagggcacatgggccaagagtagaggctgcaggtttgggagagtttggccaggattattgaaatgcccaactctggccagtcacagtgtctcttgcctgtratcccagcagtttgaaaggctgaggcaggagtatctagagtacaggagttctagaccagcctgagcaacaaaaccagaccccatctctacttattattttaaaataaaataaataaaataaaaatacccaagtctggacagaaagactctgttccagtaataatatcattcatgtatcacatatttattattacatgccagtgctacataccaggcacaatagatgacttctctgaccttccatctattgtgcaatgtctctgggaaaaggcagccactggaagccaggagcagtaggtaggaagctgcagtggtttctcttgagaccaagcaaagcggcagtgcctacagagattctgcaatttgaaggctatggagagaaaaacatcaaaggaagagccatccccacttctctccctcaaagttatacaaggatttcttttgcttctttggtttgttttggttttggtttctttcttttatttttttttggagacagtatcactctgtcacccaggctggagtgcagtggcgcgatcttggttctctgcaacctccacctcccgggttcaagcgattctcctgcctcagcctccagagtagctgggactacaggcacacaccgccttgcccggctaattatttttttgtattttagtagagacggggtttcaccgtgttgcccaggctggtcttgagctcctgagctcaggcagtccacctgtctcggcctctcaaagtgctaggattataggtgtgagccaccgtgcccagcattgttgttgtttttgagacagggtctcactgttgcccaggctggagtgcagtagcccaatctcagctcacagcaaactccgcctcccgggttcaagcaattctcctgcctctgcctcccaagtagctgggcttacagacgcccatcaccacacacagctgatttttgtatttttagtagagacggcgtctagccatgttggccaggctgattttgaactcctggcctcaagtgatccacctgcttcagcctcccaaagtgctgggattacaagcatgagccaccgtgcctggcctacarggatttttttcacacacatyatctctcttaatcttcacaacagccctgtgagataggtatcactctccctgggttacagatgaggagactgaagctcagagaagttgtgcctggccaaggtcacacgggttgtaagtagcagagcccgggcttggaggctcaagttcagtgctctttctgcttaaggagtttgcactggacagggcaactcagtttgccctgagatatgactgtggtgcccaggggtgtctgccaccaagctgaggggtctgggccggatgaacacctgaaggtgacgtcataaaacagggtaaatgtggccgggcatggtggctcacatctgtaatcccagcactttgggatacttaggcggatggatcacgaggtcaggagttcaagaccagcctggccaagatagtgaaaccccgtctctactaaaaatacaaatattagcctggcatggtggtgggcacctgtaatcccagctactcgggaggctgaggcagagaattgcttgaacccgggaggcagaggtggcagtgagccgagatcgcgccactgcactctagcactccagcctaggtgacagagcaagacaccatctcaaaaaaaaaaacaaacaacaacaacaamaamaaaaaaaaacacagtcacagtaaatgtgagccatggaatatctggcaaaaacacaagacggttctgggtgtcaacaagagtagagacataggggagttaggtgtggaagtggatgtcasaaccatactatctcagagtgagcaggaccgatgaaatgagcagaacaatctgcctgacattcatttcccctctgcagcatccatggctacatggccatctcctctttctgcctgaataccccagggacaggaaaaccactctctctcsaggttctccaccctttcctcagctagactccaccattagaatgtacttccttgtatgaaattgaaatcagctggccaggcacagtggctcacgcctataatcccagcactttgggaggcctagataggtggatcacaaggtcaggagttcgagaccagcttggccaacacgatgaaatcccatctctactaaaaatacaaaaattagccgggcatggtggcaggcacctgtaatcccagctactcaggaggctgaggcaggagattcgcttgaacctgggaggcagaggttgcagtgagctgagattgcaccattgcacttcagcctgggagacatagcaagactctgtcccacctcccaaaaaaaaaaaaaatgaaatctgcttccctggggctttaattccttgatcctcattgtacccttgagaaccctacagatccaagacaatctcaattccagaaaacacactttcagttttgttttgttttgttttgttttttttgagatggagtcttgctctgtcacccaggctggagtgcagtggtgcgatctcggctcactgcaagctccgcctcccaggttcaggccattctcctgcctcagcctcctgagtagctgggactacaggcgcctaccaccacacccagctaattttttctatttttagtagagatggggtttcaccatgttagctatgatggtcttgatctcctgacctcgtgatccgcccgcctcggcctcccaaagtgctgggattacaggcgtgagccaccgcgcccggccgcacactttcagttttattatggctatttttaccccatccccttagtcttctcttctccaggcaaaacatcccctataccttcaaccatggctcacaggacaagactccaagtcattgcccatcttggttcctcccttctggatcactagtaagtaaagtagtgtccttaggccaatagtaggatccaggaggccaggcatggtagctcacgtctgtcatcccagcactttggaaggccgaggcgggaggataacttgaggtcaggagttcaagaccagcctggccaacatgataaaaccccatctctactaaagatacaaaaattatccgggtatagtggcatgtgcctgtaatcccagctacccgggaggctgaggcaggagaatcgtttgaacccaggagatggaggtggcagtgagcactctggcctaggaaacagagcgagactccatctcaaaaaaaaatcaacaataggattcaggaagttaacagggtgtagacaagggagtcttccccaacaacctggctttcccacccttcctctaacctctactcaatgcagggacatggctaacaaccgccgggagcttcgccgcctgggcatcacgcacgtcctcaatgcctcacacagccggtggcgaggcacgcccgaggcctatgaggggctgggcatccgctacctgggtgttgaggcccaygactcgccagcctttgacatgagcatccacttccagacggctgccgacttcatccaccgggcgctgagccagccaggaggtaggaggggaatgctgggagcagraaagaacagggtgcctggaatttggggaagtccaagggtctgagagtggagtgagattttagtgacatgacaaaatgctcaggatcttgttaagaaagaaaaaaatattatctcaaccatttttttaaagcaatacagaaaaagacaagaaggaaattatcaaaaatgttaagagtggcaagttacacctgggtggcaagattatatgtgatcgactttttcttttttgtttttttgagatggagtctttctctgtcacccaggctggagtgcagtgacgtgatctcagctcactgtaacctcygcctcccaggttcaagcgattctcctgcctcagcctcccaagtagctgagattacaggtgyccgccaccacatccagctaatttttgtatttttaatagagacatggtttcaccatgttggccaggctggtcctgaactcctgacctcaggtgatccacccgcctcggcctcccaaagtgctggaattacaggcatgagccactgcacccagccagcaggaggatttcttaagcccaggaattagaggttgtagtgagctatgattgtgccactgcactcagcctgagaggcagagcaagaccctgtctccatatacatatatatatattcaatggttgagaataacaagctagaatggtggagagattgaggaaggggccagtaatgacagtgttttcaatggactcattcacgctactctatgcaaagctggctcttacatcagtggtgagtctccacctttgacccctttcaggtttatggacactgagccactgcatgtccccttcctctcattctgtccaggcctctccccttttgccagagatctgcattcctaacatccactcatctgcacccattcctgtcttcatgcacctgtacttacctgtcttcctcttccctgtccatgtcaccctttttttttttttttttttttttttttgagatggggtttcacttttgttgcctgggtggagtgcaatgacacgatcttggctcactgcagcctcagcctcctgagtagctgagattacaggcatgggccaccacrcccagttgatttttgtatttttagtagagatggggtttcaccatgttggccaggctggtctcgaactcctgacctcaggcaatcttcccccttcggcctccaaaagtgctggaattacygccgtgagccaccatgcccggccccatgtcaccctttccccagcctcctccaagctgccacaagcagtctcaaagctctctctgtgtctctcctctcagggaagatcctggtgcattgtgctgtgggcgtgagccgatccgccaccctggtactggcctacctcatgctgtaccaccaccttaccctcgtggaggccatcaagaaagtcaaagaccaccgaggcatcatccccaaccggggcttcctgaggcagctcctggccctggaccgcaggctgcggcagggtctggaagcatgaggggagggggagagaggtcaggccaggcccgtgggtaggtccctggctcccagctggagataggaggcccaggtggcaggtagcaggaggcccagatcacccatcctcccctggggtcaggagaggccgagccccaggccactgtcactctttgtgggaggggacggggagtgaggttgggcagtgtggtggatgggcacccaggaagggttgaccagggaaggaggcagctaggctgtagatggaagatggtcctgggattcgaacaccgctgggatctggccagggtgctccctgggattcacagtcccttcccctctttgtgcccaagtgtttccctctctccctcaccaaaacaaaagggccatctctgccctgcacttgtgcagaaagtcagggatacggcaagcatgaatgcaatggtgtagagttgtgtgaaacccctagcatagagacagacagcgaagagatggtgtgaaaagcttgcagaaccagacagagaaccccacagactttccactccaagcacaggaggaggtagctagcgtgtgagggttggcactaggcccacggctgctgcttgggccaaaaacatacagaggtgcatggctggcagtcttgaaattgtcactcgcttactggatccaagcgtctcgaggataaataaagatcatgaaaaagaagagagtttcttgaagtcattgacagtttgaaagagttctaggcctctctcctgggaaccccaaccttgctggagaaaagaacagtcgtgactccctcgtatcctccaccagccttcaaacctccaccagttcttctggtgctattctcccaagtccaatttcatgctcctacagcgatatattgggctgttgtttccaggtagtccacaaaggggcagcagaggaccagaaagttcaggtttgcaacaagctctgctgctgttcagagggcacaccctgtaccttcccagctttgaagaagtctctagacccggcgcaggggctcacgcctgttatcctaacactttggaaggccgagtggatcacctgaggtcaggaattcaagaccagcctggccaacacgacgaaaccccatctctactaaaactacaaaaattagccgggcacggtggcgcacgcctgtaatcccagctacttgggaggctgaggaaggaaaatcgcttgaacctgggaggtggaggttgcagtgagccgagatcgcgccactacattccagcctgcgcgatgggagcgagactccatctcaaaaaaaaaaaaaaagaggtctctattcacacacctgggtgttaagaaatataataccgccaggcacggtggttcatgcctataatcctagcactttgggaaaccaacgcaggccaattgtttcagcccaagagtttgagattagcctgggaaacatggcgagaccccatctctataaaaaaattaaaaaatagccaggcggggtggagcatgcctgtagtcccagctacttaggaggctgatgtgggaggatcgcttgagcccaggaggttgagactacagtgagctgtgacggcatcaaggcactgcagcctgggcaacagaccaaggccatgtctcaaaaagaaaagaggctgggtgcggtggctcatgcgtgtaatcccagcacttttggaggctgaggcgggtggatcatttgagatcagaagttcgagaccagcatggccaacatagtgaaaccctgtctctactaaaaatacaaaaattagttgggcatgatggtgcacacctgtaatcccagctactagggaggctgaggcaggaaaatcgcttgaacccaggaggtggagattgcagtgagcggagatcacgccactgcactccagtctgggagacaaagctagactccctttcaaaaaaaaaagaaaagaaaatacagggggaccaaaaaaaaaatcacttaatatagctgtatgtccagtcccaaagtacagaactcagaacattaaagttggtaggtgccttcatagattatccatttccactctcctcaatcatggtcttgctctgttgcccaagctgggttggggtgatcttggctcactgcaacctccgcctcctaggttcaagcgattctcctgcctcagcctcccaagtacctgggattacaggcgccaccatgcctggctaatttttgtatttttagtagagatgcggttccaccatgctggccggctggtcttgaactcctgaccttaggtgatctgcccacctcagcctcccaaagtgctgggattacaggtgtgagccacttattcagtatttttgataacagtcatcaagcatttgctcgaacatctttgagaataggaaaccactacataatttccacaccatcccaccagctctaaattttagaaagctctgccttgtatgcacataatgcaatcgtgttatggtggtgctgagaggaggttgaaagatctgaccagccaggattcctgggctgactgtagcacacgccaattaggggaggtgactaagtcacttacttcttccccctctgtttactggcaatcgtacagcagacttccatgggattgttgtgatcatttaattacataagaggctgggtgcatggtggctcacgcctgtaatcccagcactttgggaggctgaggtgggcagatcactagaagtcaggagttcaagatcagcctggacaacatggtgaaactctgtctctactaaaaaaaatacaaaaattagctgggcatggcggcaaacacctgtaatcccagctagtcgagaggctgaggcagaattgcttgaacccaggaggtggaggttgcagtgagccaagatggcaccactgcactccagcctgggtgacaagagtgagactccatctcaaaaaatatatataatataaaatagataagagacataaagcccaaacatcagtatttagtaagtgttctttcactagttcaactatcgtggaagacagtgtggcaattcctcaaggatctagaactagaaataccatttgacccagccatcccattactgggcatatacccaaaggattataaatcatgctgctataaagacacatgcacacatatgtttattgcggcactattcacaatagcaaagacttggaaccaacccaaatgtccatcaatgatggactggattaagaaaatgtggcacatatacaccatggaatactatgcagccataaaaaatgatgagttcatgtcctttgtagggacatggatgaagctggaaacaatcattctgagcaaactatctcaaggacagaaaaccgcatgttctcactcataggtgggaattgaacaatgagaacacttggacacaggaaggggaacatcacacaccggggcctgtcgtggggtggggggaggggggagggatagcattaggagatatacctaatgtaaataacgagttaacgggtgcagcacaccaacatggcacatgtatacatatgtaacaaacctgcacattgtgcacatgtacccgagaacttaaagtataacttaaaaaaaaaaagagtgtgcatcgaaaaaaaaaaaaagttctttctcttcttccctccctgtgacagcccttcccgtggtttgaagccagctgtcagggttctgtgtcctcctacttttagcctaacagccacgattgttttcaatcgcctgcatttgtcatattttaaattgccaacattggcattcttttccaactacggcaactgaaattccagatctcacagaatgtatagttctcaatgctccaggctagacctataagataggaggccagcaagatctatttactggctgtgatctcaaaatgtggtcactgttaagggacacatttattaactggcatttaaaaatgccagttatctaagggagagagtgaggccttcattagaaatgttgactctcggtcgggcacggtggctcacgcctgtaatcccagcactttgggaggcctaggtgggtggatcactggaggtcaagaatttgagaccagcctggccaacatggcaaaaccccatctctactgaagaaatacatatatatatgtaagtttggcgtggtggtgcatacctgcaatcccaactactcaggaggctgaggcaggagaatcacttgtatcagagaggtggaggttgcagtcagctgagatcgcaccactgcactccagcctggatgacagagtgaaactctgtcacaaaaaaaaaaaagaaagaaagagagagagagagggaaaggaagaaaaagaaagaaagaaggaaggaagacagaaagagaaagaaagaaaaagagagaaagggagaaaggaagagaaagaagaaagagagaaagagaaggaaggaaagaaggaaagaaaaaaggaaagaaggaaagaaagaaagaaagaaagagaaagaaaaagaaagaaagaaagaaagaaagaaagaaagaaagaaagaaagaaagaaagaaagaagaaagtaaggaagaaagaaagaaagaaaaagaaagggagggagggagggaggagaggaggggaatgttgactctaattaaatgctttgattcgctgtcagaccatgggccaaaggacttaagtataactaaaaagagccctcaaatcactcaggctcttagaaggactgactgtaattatgatctcaccttctttttcctattgctctttttattttcttagagatagtcttgctctgtcacccaggctgcagtgtagtggtgtcatcatagctcactgcagccgtgaactcctgggctcaagtgatcctcccacctaagcctcccaaaatgctggaattacaggtgtgagccaccatgtcctgccagttctcatttagaaaatatatacttactaatgtaacctaacagccataacaatatctatccagtctgaatggttttagactctttgcatgctgaataacttcagaatttaattctaacttctagtagggaagtattgctactaaagtatatttgaggcctggcgcagtggctcatgcctgtaatcccagcattttaggaggctgaagcgggcagatcaccggaggtcaggggttcaagaccagcctggcaacatggcaaaaccccatctctactacaaatacaaaaattagccgatgtggtggcacaagtctgtaatcccagctactcaggaagctgagtcacgagaattgcttgaacccaggaggtggaggttccagtgagcagagatcacaccactgcactctagcctgggcaacagagtgagactccgcctcaaaaaaaaaaaattatatttgaccaaagaacaacttccagattatcctcataaaacagtttatacatttttattatttaacaaagacatattatggctatacccaggcattcttctgtctttatagatatcaactcatttaatcctcataaaagccctgtgaagtaggtataattgcaattgcttaggaatgggcagattaaatttgcctaatttgcccaaagacacaaaatagtaaatagaagagctaggatttatacttgggttctcagactccagaatatatatataaatatatatatttatatgtatatatatatttatatttatatataattaatatataaattttatatatatatatatcatcatcctactatgctttgccttcaactccgccatctcaagttgtgtgtgtgtgtgtgtgtgtgtgtgtgtgtgtgtgtgtgtgtgtgtgtattgggggagggagaagaggacttgctactcagacttcagactgggaagccccactcttactagctctgagagcttacatctggagatatcaagtgactgaagatttccctatcttttctagagattgccactcttctagagggatctatatagttcaaggggaagaactgagaggccacagcctgggtgtcacatagatagaatcagtcctatccttccggggggccaagggtgacacctgtcacaaatgagtcttactcccacctccaaaaccaaaattaaaaatccagccagcctcccctatcctgctcttgagcagttaatcatttgatcccaaacaatggaccacagcattaataggaataaacgtgctcttgtattcagcctgtgcttccagcccatggagcctcaatgctccaaaattgagatccaagtcaatcttgtcatcctaccccttcttcccttatcacctccagccaccaactctgcagtgttcactcaaatccttgagcagacccctggagcctttgctttctctgggaaggtggagggatgtttgcccagtccttcacccctgtaactaatcccagctgggaaattccacagggatgcagctaagggaaaactactgattctgagccccagtgtggcagatggagctggaaatacacaggtaggcagctcagaattatgctggctatagtgggttcagcattgctgcaccaaaaggcccctgctagaaacggatcccttaaagaaaaggactgaatagaagaaaaatggtccagattataaggaaagataaagcctgtttatcataagtttctgtccttattacttttttttgagtgggatgaagaggcaagagattcaaaagtttatgagaaagccctgttcacacccaaatccctagaac

SEQ ID NO: 93198 - DNA, 65397 bp, Homo sapiens
tttttgcattaatatttacatcagccaggccaggaaccgtggctcacacctgtaatcccagcagtttgggaggctgaagcaggcagatcacctgaggttgggagttctagaccagcctggccaacacggcaaaaccctgtctctactgaaaaatacaaaaaaaaaaaaaaattagccgggagtggtgacacgcacctgtagtcccagctactcaggaggctaaggcagaagaatcgcttgaacctgggaggcggaggttgcagtgagccgagattgcaccactgcacttcagcctgggcaacagagtgagactctgtctcaaaaaaaaaaaaaaattacatcagtcaaacatgatccttagtcaaaaatatgtcattaacaaaaagcacttggcacttaacagatggttgaaaaatgtcaccctccccatcctcattttttctaaaatcttagctgcggtaaatacttaattgtcctccccatccacctttcagggggtgggaggtaaatcacatttaatgtgaacaagagacaaaaagaaaaaccctttaggtacctgcctaccccccacgtttgccactccaaaggaaaagctgctctattcagttttgttttcccaccactgaggcaagccctccttccacactatgaagacataaattaccaacaccaggtgaagcccgaccactgcaataatggccactaaaaggcactgtcttcacgggacattaacatcagactttggagaagtaatctacaggaaaaatgtaaccccacagaaatattaaccataaaccccgcaaaaaggaaaaaaaatcttgaaagtcatggccagaatgccaacagagttgggctccacggcagtgactgcatgattggcagagcctgtgggagtccaccattatcagtcagtctgtccagtggtccatgcctcagagctcagacaactgcctgcacccaacctcatgcctgtagcaaatgatgccaatgcagcaaacgcaattgggcagctgggacacgtctagcttctggatgctcacttcctgacagttggcagcccacacttttttttttttaaacagctttactgagatttcatttacgtcccataaaattcacccatttaaagtgtacaattcaatggctttttagtatattcacagagttgagaagctatcactcacatttagaacattttcataactccaaaaagaaaccctgtaaccattagcagtcactccccatgtctccctcaccccctcctgtcctccaatactttagacaaccactaatcccagacaataattttatacagcactgatttgggttgcttggaactagatcaactgataatagatctgagatgaaggtaatctgaatgcacagcatagaaggggttttcaaacaaatgtaagaaaaacatagagatgaaacagcatgatccaagtcattgccttccagtcaaaaaacaccaggaacacatatagttaaacaaagttgggtttattgactggttgcaatgaagtaggctgtaccctaagaggtgtctccataagaaggtgttagaaagttgtcattatagcatatagtcttggccaggcacagtggcttacacccataatcccagcactttgggagactgagacaggcagatcacttgaggtcaggagttcgagaccaccttggccaacatggggaaaccccatctctactaaaaatacgaaaattagccaagcatggaggcacatgcttataatcccagctacttgggaggctgaggtgggaggatcacttgaatccgggaggcagaggttgcaataagccaagattgcaccactgcactccagcctgggcaacagagcgagactctgtctcgaaaaaaaaaattttttttagccttgtgttaagtgattttggagagttttagagtggtttctctagattggatgctgtgagtaagcaagggtaattctattctaataatcttgatctagaaggcaggaagaatgaactgaggttaaagctgtaattgataaagaaacagcagccattcatattagcaaggatagatggatatttcgtcttttttttttttttttttttgagacagagtctcactctgtcacccaggctggagtgcaatggcacgatctcagctcaatgcaagctccgcctcccaggttcacaccattctcctgcctcagcctcccaagtagctgggactacaggcgcctgccaccacacctggctaattttttgtatttttagtagagacagggtttcaccgtgttagccaggatggtcttgatcttctgaccttgtgatccgcctgacttggcctcccaaagtgctgggattacaggcgtgagccaccatgcccggccgatgtttggtcgtttttacagtttgtacaatgttcttgtttttgtctgaaacaagattatggaagtgtctggttttttccttgatccatcacaatcagagaatggcatgcttttaaaaaaaactaaacatattattggtgatacagtagacaactattaatagaacaaacaacagtttgttgttgatctatgggtagaaacaaaaagttttattactctaaagcaaaagtcacaggtaaagtaaaggttaattgcagtagcccagccaacctacctcccttcttctggtatcaaatcccattcctcatactacaatgactgaagtgatccaggctaggccaaatctaatactttaggctcacagcctattagattggtagtggtatctggtgtaacaaataaagccaaacatcagtgatttaacccacataatttgatttatcagtcacaccacattccaatgtggatatccctagtcagtggaagaggacttttctccaaacagagattcagggaagtagaccttttccataggcccttccccagggccttaaaacattctggttcagctgacaaaacaggaagagagggaatggagaaggcatagcacttcacaaacattttggcctggatgtccgctcactttccactgacacaaagtatattttatttattttatattttattttattttattttattttatttattttgacatggagtcttgctctgtcacccaggctagagtgcagtggtgcaatcttggctcactgcaacctccacctcctgggttcaagcgattctcctgcctcagcctcccaagtagctgggattacaggtgcccaccactgtgcccggctaatttttgtatttttagtagagctggagtttcaccatcttggccaggctggtctcaaactcctgacctcgtgatccacccatctcagcctccaaaagtgctgggattacaggcatgagccaccacgcccggccccaaaaagcatttttaaatccttacctatgggataataaatgttgtttcaagccactaagatacaaggggacagctaaaaaatgtagttcttagcagaacagacactttccagtgacaccccctactatgtaagtgggagtacaaattttggagctgttactgctatgttagtaaaatacttctctggcatttgatgattcgggctggcagaaactcagatccttatgatgtgaggtcatcactgggtgaggtggtacatacctgtagtcccagctactctggagactaaggtgggagaatcgcttgactccaggagttcaagtccatcctgagcaacataatgagaccctgtctctagaaaaaaagaaaaaaaatgaagctatgtagaattagacaagtgaaaagttccgtgataatcagtctattctttcttctctgtgtcagttatcccttgctgtgtgacaaaatcatcccaaaacttagtggcttaaacaacacttatttatatatatatacacatatatacacacacacgtacatatatgtgtgtgtatatatatgtatatatacacatatatagtatatgtatacatacacacactaggataataaatatatatataaatatatataaggaaactataggataacaaatgttgtttattatatacactatacatacagtatccttccatttatttatttttatttaagttgtggggtacatatgcaggtttgttacagaggtaaacttgtgtaatgggggtttgttgtacagaatatttcatcacctaggtattaagtctaggacccattagttatttttcctgatcctctccctcctcccactgtctacactctgataggccccagtgtgtatygtgcccctctatgtcttcatgtgttctcatcatttagctcccacttataagtgagaacatgtggtacttggttttctgtttctgcattagtttgctaaggataatggtctccagctccatccatgttcctgcgaagggcatgagatcattctttttcatggctgcatagtattccatggagtatatgtaccacattttctttatcaagtctaccattgatggacatttaggttgactccatgtcttcgctattgtgaatagtgtggcaatgaacatacatatgtgtatgtctttataacagaacaacttatattcctttgggtatatacccagtaatgtgattgctgggtcaaatggtatttctgcctctaggtctttgaggaatcgccacgctgtcttccacaatagttgaattcatttaaactcccaccagcactgtaaaatgttcctttttctccacaacctcaccagcacctgttattttttgactttttaataatagccattctgactggtatgagatagtatctcactgcggttttgatttgcatttttctgatgattggtggtgttgagctttttcattatgattgttggctgcaagtatgtcttctttcgaaaagcgttggccgggcgtggtggctcacacctgtaatcccggcactttgggaggccaaggaggacggatcacctgaggttgggagtttgagaccagcctgacctacatggagaaaccctgtctctactaaaaatacaaaaaattagccaggccagtctgtggcccaggggttggggacccctgttttaaggtattgcagaattgtcccctccacacacagcgaagtgtaaatccgtttaatctctgaactatctaaagatgaatatgctgctgctctcctgcaataaagggcaatgacttaaaagaggtgggggtggagaggcagaaatgtcctctgttttactgctgtgtaaaactggtcacgccccttagaagcaccaccacatgcctaactgttgttgataattaatttacctgatgcaagtgagtgaaaaatttaaatgatcataatttacgttgcctttaaacgacagaacaatttaagtcctctagttagctagttcctttaaaacacaccccacatccctaccagaatcactgcccatccccccccacccccccgcccaaacagcaatggttatttatttctaacataatccggggacccttgccccttaaaataattaaataatatatgccatattttctctagaaggcactagatttggcatcaaaagacttgctttggcattcaagaacagtgtgtttgaggaggaggcgtttatcttccctgagcctcaatttctttatctgtaaaacaacaaagaacatcaaagctctttgtaatttcttcctctttcctcaaataacactttgctcattactgcgtttttagaacttatatcctagcgttaagtggaagcttaactggaagctccatgaaggtaggccttcctttctgataacctagcgtaagatcaataaatgtttattaaatgaggcactttacttcacaaaggatatggcattttaacggttacaagcgttcccagtcaacgcatccacaaagcattaggccacctataaactaggaatttaaaaggcaccaaaatcctagaagtcctaggagggcgtggtgacgcaagcaggtgaacgctggccgatgctgacaacccactcctgacgcgcttccggtgcgacgctgtctctccatgccaggactgagttgtgggggagggaggcggttagcgggctttagcgccttttctggcggcggtagatttgaagcgcttcaaaggaccggacccagagaagaggaaaactctaccggtgcagrtaagtggtatgaggctcaagttgttctggcggcgtcatttcagcagtccctgcgtacgaaagcgggaagggcctgggaagaggggcggagccggcgcggctgaccgggttgggtttaccgtctttccctcgaggtatcggggctgcttgggcccagaggaagtccctgaggaccgcagcagtgcctttgccgctgttgcagaaggagaaggcttgcagtcgagccccggggcctggggacggtccttcctctgccagcccccgccctccccactcaggcgcacacctccctcactgacgcattttgccgcacaagctgtaacatggcggcagcgactgcggcctgaactctagggagccgggttgatttttaaagcttcaaaatcctaagactcagcactgttgcggggtaggtggcgggactggtggggaagggggagacagcctgacgtcctgtcaggctagggttggagagtgacgggcgaagagcctgaatcacagggattaaaattgaagactagctttcctcctctttcgaccttttcctctcacagcacagtggctgtcgtgcagttaagtggcagaggccactttgttaagcatttttctaaaactcaagtccagggtcttgagctctcgcgaagttcccccgtgtttcggaggagctgtgagctgcgcaggccttttaggaggagataattactctttaggaggaagatgatgatttcggggctcagtatgcctgaaggggaagtatgctaatttggttcttggttagtctttttttttttttttttttttgagacggagtctcgctctgtcgcctaggctggaatgcagtggcgcgatcttggctcactgcaacctccgcctcctgggttcaagtgattcttctgcctcagcctcccaagtagctgggactacaggcacgtgccaccatgcccggctaattttttgtgtttttagtagagacgggttttcaccgtgttagccaggatggtcgatctcctgacctcgtgatccgcccacctcggcctcccaaagtgctgggattacaggcgagagccaccgcgcacggccagctcatgtttagtcttaaggagcaaagtctagatgtgctggcaaggagtatgcacaatcgttttggaaatgctataaaagcaccattttgtgcattgattttaatttctttccacgatagccctttctgtgtgtaaccaacattttgcagtagtgaacacaaatacaaaagtatttgcttttatagtttggtactaacatagttgtccaaagaacaattagatgttttagaaattaggggggcctgatattaactttcagtagttaaaaccaggaaaaaagagtgagtgtgtgtgtgtgtcggtcacacacacgtttttgtctttgtgtattcccatttggtaacaggatggccggtaattgctactttgtaacaatgacgggtgggggggtgaacattttataaattttgaaatcgtgctataaaatccagaaaagatacatttagaatggctgcttctctcctgtttttaatatatcctgaaaatttacccgttttagcactccccttttttttaygttaacgagttgggacagaattatttctgtaacaaattacatggttctgtgtcttaaacaagagttcattgtacattgtttgactatttctttatgattcagaattattgatgctctgagatcctatagggtcttgtagtaggattctgcgcatttgaattgttggtttcctttttaaggcttttctmkgcagtcagttgtcaggagtgctcctgctgtcaggagtgtataagtatgtaaacttcttaggttagaaaaatttggactttctggcccaattatctttctgagcttcagtttcttcacctacctgcaaaatgacattttgatctccaccttccatcaactgtgggcttgaaaattaaatactcagctttgttaaaattgtgtgtgaagttggctttcattaactcagtggttcctttatgggtgaagagtgttcattacatttatttttaaccatatagtcgatttactgtggtgcttattattgtggtcttgcagtattggtgacttctacatatttttgatattttgccttaaattagattttctgtgaggcagcatcctcttctttatacaaagggaaagtggaagccattcataataaagtacttctgttaggacactatctggggttaattctttaaatagtagttgcccctttagttaggcttttttccttcctattagtttataaatagagtatttaaacataattataacatgttgtctatttttagaatcccagtgtactaagatgtcatgaaggaatacatagataattaatgcaagtgacctgaagagtttgttgcaagtctttctgttgcattgtggcattgcatgctttttgcttttatttatttatttttttcagacagagtcttgctctgtcgcccaggctggagtgcagtggcatgatctcagctcactgcaacctccacctcctgagctcaagggattctcacgcctcagcctccctagtagctgggagtacaggtgcctgccaccacaccgggtaatttttatatttttagtagagaaggggtttcaccatgttggctacgctggtctcaaattcctgacctcaagtaatccatccgcctccgcctcccaaagtgctgggattacaggcgtgagccactgtgcactgtgcccagcctgacttttgcttttttttttgagacagagtctcgctgtcttgcccatactggagtgcagtggcgtgatctcggctcactgcaacctccgcctcccgggttcaagcaattcttctgcctcagcttcctgagtagctgggattacaggcatgtgccaccacacccagctgatttttgtattttttatagagatggggtttcaccatgttggttaggctggtcccaaactcctgacctcatgatctgcccaccttggcctcccaaagtgctagtattacaggcgtgagccaccgtgcccagacctttttgcttttaatgttaggactaaacttcaattttcatgttgcttaagtgtcggtgattttccctggtttaatgcataaatggtcaccataagaactcggtatttttatttctgtagggaaaaacttgcatcctgaaatttactacagacagtattcagagaaaactgctgttattgggagtttgtacttctagcagcagacaagaaaacttttgaactttgttttagaataatggcttaaaatgatcacacgcttactgaaatttgattatataacacttataaacaccaatcttttatattaaaatgattattttaaaaacatgaatgatggccgggggtggtggctcacrcctgaaatcccagcactttgggaggccgaggcgggtggatcacctgaggtcgggagttccagaccagcctgaccaacatggagaaaccccgtctctccgtttctacttagaatacaaaaattagctgggcattggtggtgcatgcctgtaatcccaactactcgggaggctgaggcaggagaatcgcttgaacccgggaggtggaggttgcagtgatccgagatcacgccattgcactccagcctgggaaacgagcgaaactccatctcaaaaaattaaaaataaaaataaaaatatgaatgattccttaactcgttttaaaaatgaacgaagcatattcgtgtgtgtgtgtrtatatactaagctcttgttaattattgtatacattttagcttataattaaaccattgaatcatggttatatggtgaaaagtaatattaagccattatgtggaatatttgtgagtaaactagtttttaccgtgaaattgtagaaagtactaaatcagaacttttgcttttttccatttgtgagcttgagccactcatttcatctcttttgtcctcttgttcttgatctataaaatcagaagattggatcaggttatctcttagagttccttgaaactccaaatgttcttatttttttacgtaggaattactggattgaataatggggttagaactgtgtgtatatatgtatatatctttgaaaactgggggtaaatcttttttcttttttgtttttggttttggtaaatttattattataagaacttagatcaggcggagtgcrgtggctcacgcctgtaatcccgacactttgggaggccgaggtgggtggatcacctgaggtcggagcttgagaccagcctgaggaacatgaagaaaccctgtctctactaaaaatacaaatttagccgggcatggtggcgcatgcctgtaatcccagctactcggaggctgaggcaggagaatcgcttgaacccaggaggcggaggttgcagtgagccaagatcgcaccattgcacttcagcctgggcacaagaacgaaactccctctcaaaaaaaaaaaaaaaaaaaaaaaaccttagataattgcaagtacaacattaagagtattagccgtgagttcccagttagtatttgcttttgtagtttggtagtgacaaagatgtattatatttttatgtctctcagatcgtatatatagtaagtgcgtaatatccttatttaacactgaattaggcaacattatgggttatctctgtaagttttctagaggatttaagaatttcagaagtgtctatactctgctaatcatgttgctaccagtgcagtggtttgcatcagggtggtttgtgtccatcagaaacatcagtggaagggacactacatgaaatagcataattgtctgtcttgacacctcagaatgttagcttgtttctactttattcattagcaacttggcatttgtaaatatactcaaatgtttttgatgcggtgcattttcgtttctcatttgatctatatgaactacattaagagtaggctaaagaggctggtaggaatgttaaattactttccttgaaagtaatattaaagatctgctatagttttaattaatttaacttacatgatttcacttaagaggtggaaatcttatatataaattgtctcctgtttcatcaaatttagcagataagaataatcctttctttcttggttgtaaactgaagtggattctggttttggggtttttttggggggggttgtttttttgggaaacaaaacacttcctagtagatctagggaatgggttctgtttcagttgtggaggaggcagagaggatgattactggtggtaggttctgggagaatttactgactacagatatatgttagcagtatccccatttaagaagctagcagtccgggtgcagtggccccatgcctgtaatcccaacactttgggaggctgaggcaggcggatcacctgcgattgggagtttgagaccagtctgaccaacatggagaaaccccgtctctactaaaaatacaaaattagccgggtgtgctggcgcattccagtaatcccagctactcgggaggctgaggcaggagaatctcttgaacctgggaggcagaagttgtggtgagctgagattgcaccattgcactccagcctgggcaacaagaaagagcgaaactctgtctcaacaacgacaacaaccaaaaaaaaaaaagaaaagaaaagaaaaaggaagcaagcagtacatgtttaagaggataggcactggattataatagagtctagttctgttcatgcctcaattaacattctttttatttgataacgtcactgtgtttggtgttgaagatacaaaggtttcraattgttggagtttatgataaaagagtaacatttaacaagggaggatcatttaaaccttagaaagtcagggcctggagcrgtggctcaagcctgtaacgccagcactttgggaggccgaggcaggcggatcaccaggtcaggagatcgagaccatcctagctaacacggtgaaaccccatctctactaaaaaaatacaaaaaattagccgggcgtggtggcgggtgcctgtagtcccagctactcgggaggctgaggcagaagaatggcgtgaacccgggaggcggagcttgcagtgagccagaggtcacgccactgcactccagcctgggtgacagagggaggctccctctcagaaaaacaaacaaacaaacagaccttagagagtcagcgtgaagttcccagagagtgaactctggctaactaattatctggctaatttgcatcttaaaaggacacacgggaatcagtgaggagaatcctaagggtcagagacttgcttggcatcttaatcgttaaaaataatttactcagactaggcaatatatccacaaaaaaawttttaaaaattagctggaggtggtggctcacgcctttagtcccagctactcgggaggctgaggtaggaggattgcttgagccactgcgttccaggctgcggtgagctgtgatcttaccactgtgctccagcctgagcggcatagcgagaccctgtctctaaaaatagaaataatttactttgtattytttctagattagaaactcggtgctatgctgacttcctcataatgtgtgaaacttccaaataactttaaaatataataaagttaccatatgcctacttataaatgccatgtccgctactatatattttaataattagttgcctatatttttgtyctgtttttcatttagtcatgttattttaggattaatatggaaaatagtttatgtatgaaactacaaggataaatttttttacacatgaactggttacctcttactgatttttttatgaaatgtgtttgttgcagaagtttataaatgatagcactgtgatatttttaaattgtattaccttattattgaaatacaaaagtgactatattgttgataaatattaaaaataactttaatcacctgcataggaaaaacaagaatataataaaagtattaaaagctatagctaagttttagaattttgtgcattttgtatgattaatttttttcagtgagcttattagctttattgcttatcttattaaaaatgtgttttcattatgatgaaaaaagtagattcagtatattatacttaaatttctgaaggagtcaagcaggtgaggtaagtacatgaggtcaagtagacaataaattttaacagctaataagcaatagctagaattaggtcaaactagaacatatatatgtcatctgttgggagcagactatgctgattgctgtgtagaaatggggcacagtgccacatattgtgattttttttttttccaagaaaaatttgtctggattttagctgtagttcatactaaacaaatttgcagcaaacaaatcacccacagattactactacactgaaaattttgattatattctagtatttttaggcaattcatgatttttttttttttttttttttttgaacagagtctcactctgttggccaggctggagtgtagtggcatgatgactgctcgctgcarcctcaacttcctgggctcaaatgatcctcccaccgcagcctcccaagtagctgggaccacaggcctgggtcatcacacccagctaattgtcattttttttttaatagagatggggtcttgctgttgcccaggctggtcatggatattttatttaaaattgtaagggcttaattttcccctgaatcatgtttttggtatctcctagcattattttttctctttacttttacttgaaaaaaaatgaaaaattgaccagatgyttgtyttactgcatctggtttcagatgtcttttttctttttttttttttttttttgagatggagtctcgctctgtcacccaggctggagtgcagtggcgcgaactctgctcactgcaagctccgcctcccgggttcacgccattctcctgcctcagcctccagagtagctgggactacaggcgcccaccaccacgcccaactaattttttgtatttttaggggagacggggtttcaccatgttagccaggatggtctcaatctcctggccttgtgatccgcacgcctcggcctcccaragtgctgggattataggcgtgagccaccgtgcctggctcagatttcttttttctaatagagatgcgttctcattatgttgaccaggctggtcttgaactcctgggctcaagtgatcctcctcccttcgcccctcaaagtgctgggattacgggtgtgaaccaccgtgatttcaggtattatttaataatcgaggaaatcataattatagaggaaataggatatactgtttctgattagtaattagtaactttttataatgattagtaattagtagcatttcagtaatgttagcgacacagcatgtgagccatcttttgttgtcaccattgtttttcattagctgctaatattaaaacatttacatattcaagggatttgtgtagtaattttaatagtaatttgctgcctttcatctttcttgcatttgaggcatatgtgatttgtcatttcaggaaaactaatcaatttctatgaagagtgtatccttgagtgatagactctgaatacatcttatagccatttccacacatgtacattataatgttagaagactgtgtgtgtatatatatatatatatcttaggaattttttctttataatagcagtacatttattatttattttatttatttatttatttattttgagacagagtcttgctcttgtcgtccagggtggagtgcaatggcacaatctcagctcactgcaacctctgcctcctgggctcaagtgattctcctgcctcagcctcccaagtaactggaattacagrcacccaccaccatgcccggctatttttttgtatttttagtagagatggggtttcaccacattggtcaggctggtcatgaactcctgacctcaggtgatctacccgccttggcctcccaaagtagcagtacatttattaaagaaaactagaaagaagtagtgaggcaaaagccctctccagtcttacagacacacacaataatgatttatttcctttcactctttttttgtcttcttgtaagtctttgcctgagcttgaaggtcgggagtagtttacacaatcatcattatgttgcatatgctgctttatatctttttttttttttttttttgagacggagtctcattctgtcacccaggttggagtgcagtggcgtgatctcggctcactgcaagcttcacctcccaggttcacgccattctcctgcctcagcctccaggtgggactacaggcgcccgccaccatgcccggctaatttttttttttttttgtatttttagtagagacggggtttcaccatgttagccaggatgatctcgatctcctgaccttgtgatctgcctgcctcgggctcccaaagtgctgcgattacaggtgtgagccaccacgcccggcccactgttttatatcttgattatttttccaaattattaatcttcataagcattgctttaattattgttgaaccagagacaatttcacttttttgtgatattatgataggttgcttttgattatatgttgctaaaaagagcaccagsgtagccaactttatacctgaaggctttctgaatttagagtagttcctcataatagatttccaacagttgaattttactggttcaaagtataaacacttatgaatttctcatattcttaaatttcaaaggagttgtatatgatcactagtagtagtataaattcctgtttccatttgtacatgtgttgagagttattcttttaaaagatctttgctgttgataggcaaaaaaaaaaaaaacgcattttattagtacttttttaaaaataattgtttcctgattacgaaattgaagaaaaattggaaaacaaatacattaaaaattacccttaaacccatggcccacacatgatgattgctaacattatggtgtaaatcctgtctttttaatgtgcttactgatacgtgtgaaattgggattttatagtctgtattgtttactaacttgcttttttcacctggtatgactattttgtcattcatgaacaatctggtaatttttcttcttcagttttactctttcttttctttttttttttttttttttttgagacagagtctctgtcacccaggctggagtgcagtggcacaatctcggctcactgcaatctccacctcctgggtttaaragattctcctgtcccagcctcccaagtagctgggaktacaggtgcacatcactacgctcagctaatttttttgtattttttagtggagacggaatttcaccatgttgggctggctagtcttgaactcctgacctcaagtgatgccttggcctcccaaagtgctgggactacaggcgtgagacaccatgcctggcagttttattttattttattttattttgagatggagtctcactctgttgcccaagctggagtgcagtggcatgatctcagctcactacaacctccgcctcccgggttcaagcgattctcctgcctcagcctcctgagtaactgggattacaggtgcccaccacctcatgcagctcatttctgtatttttagtagagatggagtttgccatgttggccaggctgttctcgaactcttgacctcaggtggtccacccgcctcagagtgctgggattataggcgtgagccactgcgcctggcctattcatttttatagtaagttttttcagtgtcttaaaagttacccttttcttaatttttaatttttgtgggtacatagtaggtatatttatgggttacgtgagatattttgatacaggcatgcaatgcataatgatcacrttagactgaatgaagtatccgtcttctcaagcatttatcctttttgttacaaacaatccagttatactctttatttttaaatatacaattaaattttttttgagtatcgttagtcaccccattgtgctagcaaacactaggttttattgattcttaactatttttttgcacccattaaccatcctcacttccagtccccattaccctctcaagtgtctagtaacagtctctctactctcttatctccaagagttcaattgtttaaatttttakctcccacaaataagtgagaacatgtgaagtttgtccttctgtgcctggcttattttacttactataatgaccttccagttccatccatgttgttacaaataacaggatcttattctttttaatggttaaatagtactccgttgtgtatatgtatcacagttttttgttttgttttgttttttgcttttgagactgagtttcgctcttgttgcccaggctggagtgcagtggcgcgatcttggctcactgcaagctctgcctcccgggttcaagcgattctcctgcctcagccttcccgagtagctgggattacaggcgtgtgccactacgcccggctaattttgtatttttagtagagatggggtttctccatgttggtcaggctggtcttgaactcctgacctcagatgatccacccgcctcggcctcccaaagtgctgggattacaggcctgagccactgcgcccggcctttttgtttgtttttttgagacggagtctcactcttgcccaggctggagtgcagtggcgcgatcttggctcactgcaacctctgtctgccctctgggttccagaaattttcctgcctcagcctcccaggtagctgggattacaggcacacgccatcatgccctgtgaatttttgtatttttagtagagatggggtttcatcatgttggccaggctggtctggaactcctgacctcaagtgatccccctgcctcagcctcccaaagtgctgggattacaggcgtgagccttcgcacccggccgaaaattgtgttttgagtggcctaaacccctagatcccagggaaactttggccttagggaaaagcagatggtgccagaagtaatgccagcagaaagctcacctcacctcctttagactgctcagtgaggcaggaaagcggagaactttcttgtaacactcagcagcctgaagggcctcactccccatgaaacctaaagaaaattgaagacttgaaggctccaggagtcacctaatgcagcagtcccccaacagtgtctgcctttggagccacscaaccagcactaatatctctcctggtccatttttttttctgagacggagtcttactctgttgcctgggctggagtgttgtggcgcaatctcagctcactgcaacctctgcttcccgggtttaagcgattctcctgcctcagcctcctgagagtagctgggactacaggcatgcgccattacgctcagctcacttttgtgtttttagtagagacaggatttcaccatgttggccagggtggtcttgaactcctgacctcaggtaatctgcccaccttcgcctcccaaagtgctgagattacaggcgggagccaccacacccagcccacrtattctttatctggtaatctgttgatagatacttaagttacttccaaatcttggatattgtaaatagtgctgcaataaacataggagtgaagatatctccttgatatatgatttcctttcttttgagtgtatacctaggagtgggatatgttayaataatttttaatagataatatattcatgtggtataaaattgaaaatatgaggttataaagtgaaaaatcttagccctcttttccagttacccattttctctctccctagatgcctttttgttaagcaaatacatacttgtaaaatttaatttaattttgtttttggagatggtctgaggctggagtgcagtgatgctaccatagctcactgcagcctcaaaatcctcggctgaaagagtcctcccacctgatcctcctgagtagctaggactgcaggtgcacgtcaccatgcctggccccactttcgtttttctctcgtttttcttttttccttttcttttcttttttttttttttgagacagagtctcactctgtcacccaggctggagtgcactggtgcaattttggctcaccacaacctccgcatcctgagttcaagcaattctgtgcctcaacctcccgagtagctgggactacaggcgtgcgccaccacatccagctaattatttatatttttagtaaagacatggtttcgccatgttggccaggctgctctcaaactcctgatctcaggtgatccacttgccttgacctcccaaagtgctgggattacaagcatgagccaccacgcccagctctctcttcttttaaaaatatacaaagacagtatatcctacacacttctgtaccttgcttgtttgtttgtttgtttgtttgtttgtttgtttgaaatagaaacaaagttctccctatgtttcccagcctggtgtttcartccttctgcctcagccttcctaagtgctgggattataagcatgagccaccatgcctgggcaaccttttttttttttttgatacagggtcccactctgtcgcccaatctggagtgccatggcacaatctcagctcactgcaacctccgcatcctgggcccaaatgatcctcctgcctcagcctcccaggtagctgggactacaggcatgcatcactatgcccagctaatttttatattttctgtagagacggttttgccatgttgcccaggctggtctcaaactcctggactcaagcaatccacctgtctcagccttctaaagtgtaagccactgcatctagccttttattttctttttcttttttttggagaggtagtcttgctctgtcgcccaggctggagtgcagtggcgcgatcttggcccactgcaagctctgcctyccgggttcacacctttctcctgcctcagcctcctgagtagctgggactacaggcgcctgccaccacacccggctaatttttttgtatttttaggggagacggggtttcaccgtgttagccaggatggtctcgatctcctgaccttgtgatccacccaaagcggcctcccaaaatgttgggattacaggcatgagccaccgcgcctggcttattttctttttcatttaacaaaataagttaacatttacagattttaggaaatagttctccctatcttggagacagcagtaaatgaacagatttctcattctttctaatagctttgtactttctacaggtatacagtggtatacctgatttatatttattaaattattttgtattatatatcaaattatatatacatttatcaaagtattataaatatttatayktatataaatacaggtaaatatttatatgtatataaatacaggtaaatatatttatataaatacaggtaaatatatttatgtaaatataggtaaatatttatatttatataaatacaggtttatatttctataacctgttcctcctttatggacatttaggtttacagccttttactactacaaattatggtacattgaataaccttgcacatatcttattttgcgaatgtgtaaggatgtacataaagtaaattcctagaagtggaattactgagtcagagagtcttaaatgcatttgtaatatggatatttgttgtcaaattggcaatcaagtaattctatcagtttatccctttaccagcagcaacaataaatgaggtcattttttatttttgtcaatccaattggtgaaaaaatgttacgtttgtaattttaatatgtaagattatgatttctcatagatagtatttcatttcatgggggtattttttaagtaattcttactactgtacaattatcttttttcatgtggcatttaacacattttttcatgttattttaaaaagcttattttcttaggcagtccatcacaaactaatttacttaactattgtgttagacatttaagttgtttgtgcttactgttatttaaaaaaaaacccaaggactattttattttaaatggttgcctttacagatattccagtacatagaattagtaaaatgttaaaaggtacaatgaatatgaatatattcaagattcttggcctgtaatgccaagttgcttatcaaaactgctggtgccttttatgtttttttttgttatttcactttttgtgaattctctgctcatayacccttaggtgtcctttgagctttaatttgatagacrgacagtgaaaggttttggttgtcacagtgactgatatttaatagggcaagggttgcttaaggttctgcagtgagttggataaccctactcaatgaattgccctagtgcccccattcctaagcactgcttaagaaaattaatattctcagcaactatgacaatgtattttccccaatttttttctttttaatttcacatagacaaatagaaataatttttttcataagttcaaatctgtttatctccattatttacttcattagtgaatctaaaaagctgtttcatatccagggttcaggtaaatattcgcaagtacttttcttagtttctattttgtggggaggtacacattttgtgagaggaaaaaaaaattttttttttttttttgaaacggggtctcactgtcacccaggctggagtacagtggcttgatcttggctcactgcaacctccgcctccctggctcaagtgatctttccacctcagcgtctccagtagctggggctacaggcatgtgccaccatgcctgtctaatttttgtattttttgtggagacagggttttgccatgttgcccaggctggtctcgaacagctggacttaagcaatctgcctgcttcagcccccmaargggccgggattacaggtgtgagccactgctcccagcctcctaagctctttacatgttaaacagcagcactagttgagtacctcttacccaaaatgctttggaccatattattgcggatttctgactttttcagattttggaatgtttgcaatatacttaccagttaaaccttccaattctgaaaatccaaaatgctccaatgagcatttcctttgggtgtctttttggcactcagaaaatttcagatttggggttttcagatttaggatgctcaatcatgatgtagtaatcatgacagtgagacactttaaaaatgtcattgaaaaacaaaaacaaaaataagaaaaaagaaaaaaatatataattgaagatttaaattacatgcttacctgagtttctttcataagtctgctgtatacaacctaggaaatgcaaaaactaaaataaaaatyacctataactcatttacttagagatagactcaatattttcatttatttcctattttgttttactgtgcagatacaktttaaacttttatgaattttaagttgaaaaactaatacatgaacatattcttattgcaaaaattcaaaccttataygtaaagctgaaggcccccaatgacttccattcctagactcagtcccttttgcagagattctgtgaggagtttggtatatatagtattttcaagatctctctttgtagaaatagggtattgttttatggtgttaaaagaaatacttatgtacaatttacttttttgtttcttttgaactaaacagtaggtttcttggcttgtgttacaatgaaactgccatatagtattaaatagcattttataccgtaatttgttcagtttctccccattgtaagatattttgagtgtttccatttttttgttgttgttactgcaattttacattctcacttatgcctatcctctcacatttattcattcatttaataaacactgatttcttgtcatatgccaagcactgtttgagcagtaagaataagactgaaaattcaggtttatcacatcatggaacttatattctagtgagagaagatggatataaaaattgaatatcaattagcaataaatgsttggaagaaaaataaagcagaataagaggatgtaaagtgttaggaggatgagagctcctttcttgaatacagtagactaggaatgggcctctataagaaggtgatacttgagcracaaagggatgaaccatgtgaagatggtttgagagcattccaggtggagagaacagcaaatgtaaaggacctgatgaaagagtaggctgttgggtggcagggggaacaagcaggataccaatgtagctgaaataaagttgaggaaaatattagaagatgttaggaaatgaaagttgaggaaaatgcctagaggtgaacaggagctaaaatatttagagccgtataattgaaattacagtagccacaagccacatgtgctttttgagcacttgaaatgtggctagtctacattgagatatgyttcaaggataaaatatacactggatttccaaagacttgtacaaaaaaaaaaaactcagtaacatttttgtttagtatattttgaagtggtaatagtttggwygtacaagttgaacatcactaatctgaaaatctgaggtccaaaatgtaaactttctgagcatcacaattgaaaatttcacacataagtacttaatacaaactttgtttcatgcacaaaattattttttaagttgtataaaattacacatacaattcaggctgtatgcataaggtatgtttgaaatataaatgaattttgtgtttaaactgtgtcccatccccaggatatctcgtgtatgmtaatattccaaaattcaaaaaaaaaatctgaaacacttctggtcccaagcatttcctataaaggatattcaatctgtacatactgagttaaatagaatatattaaaattagcctggtttttgtttgattgtttgagtctcgctctgtcccccaggctggagtgcagtggtgcagtcttggctcactgcaacctctacctcccgggctcaagcaattctcctgcctcagcctcctgagtagctgggattacaggcacccgccaccacagccggctaatttttgcatttttaatagagatagggtttcactatgttggtcaggctggtctcgaactcctgaccctgatccgcccgcctcagccccccaaagtgctgggattacaggcgtgagccaccgcacccggcccaaaattagcctgtttttgtttgtcaaaatgtggctactgaaaaattttatacctgggtggctcatgtttttattgagcagtgctggtctagagccttaaaatccatgctaaaacttttcagatgaatagtaagacagttttaggcaggggaaggatatgataaggtttgtgttttaaaagaatcattccactctggctattttgtgcagaagaggcagtacagaattaagagtaaaataagagaaaccagttaggaggctattggaatagcctagataagaaatgataatggtaaaggtaatgagaacttttgggatagtttttgaagctagagccaaattaccttcctaatggtttggataatgaggtatgagggaaagtggaaccgaagatgacccccaggttttcagcctcagcagctggcttggacaatgataatgtttactgagtattcaagggaatggaggtagaagaataaagagttttgtcttagatatattaattatttttaataaagtaaatttttattgaaatataacatagcgtacatagcatatgaaactgtcatttttagagtccatcattttggatactatttacacttagtgcctttgtttcttctacgggtaagtatcatcttccaccaagtattacgattcagcattttaagtccttaaaataaaatgccttatcaaaataatgtctgttaaataatagctttctgttatggaaataaagctgttacacagagtatctctttggtattttttgtgtctataccagcatatcagtaaaggctgttgctcagaatcagcaagtaccctcatatgtaaaattgaatgtgcttttactcaaaatgtaaatctaccacatatactatttaacaatagttaaatagtatattaactatatactatttaacaatagttaaatagtatattaactatatactattctttttcttcttayatgatttttgcttcttaaaaatctcacattttaatcagaactctcatttttgttttctaggagcacagggatcagttgtccttgtttttttttggtcttttcttcatttgaaggtaatctgcttattgagttcactaatcatacagagtaaatacaattttctgtttgagctattaatctgtattccggttgataaatagaaagttgattacataataatggttaaggcttaactttcaagtcttttctaattgcttcacaaaatgcaatctaatctctaaaaagaargcactaataatccatgtgatttacctcatagaaataaatatcaaaataaattcaaactatatttctaatattgtttcacagaattttttttccagaaatttgtgaaagatctttgctattttagtctgcttgtctgaaactgtattttactcacagmttaagtattggagccatgggaataaaggttcaacgtcctcgatgtttttttgacattgccattaacaatcaacctggtaagaatattagttgacatttataaatgggtgtttaatattttaaattagtaaagaagtttaaccaactaccttctttttcagctggaagagttgtctttgaattattttctgatgtgtgccccaaaacatgcgagaactttcgttgtctttgtacaggtttgttcacattttcaactgccctaatagtagtctcagttgactatggcttgcttgcttgcttggttttttttttttttttttttttttttgagacaggatcttgcaacgttgtccaactggactagaactcctgggctcatcaatccttacacataagcrtcctcagctgggatacaggtgtgagctaccacacctggcatagcttgctttaattttttatttactctattttagatttctccatgcatattacttttctcttaacatgaagattacacagcagtgactagggcgtgaaagtaattcttagaaatattatggctgggcagccaggcgcagtggctcatgtctgtaatcccagcactctgggaggccgaggggggtggctcacgaggtcaggagttccagacgagcctggccaagatggtgaaaccccatctctactaaaaatacaaaaattagccaaatgtggtggcgcacrcctgtagtcccagctatttgggaggctgaggaaggagaatcacttgaacccgagaggcagaggttgcggtgagccgagatcgtgccattgcactccagcctgagctagaagagcgagactccatctaaaaaaaaaaaaagaaagaaatattatggctgggcacggtgtggctgggcatggtggctcacacctgtaatcccagcactttggggggccgaggtgggtggatcacttgaggtcagtagttcaagacaatcctgtccaacatggtgaaaccccatctctactaaaaatgcaaataatcggccaggcgtggtggctcacgcctgtaaccccagcactttggaaggccaaggcaggcagatcacctgatgtcaggagcttgagaccagcctggcaaacatagtgaaacctcatctctactgaaaaaataaaaattagccaggcgtggtagtgggtgcctgtaatcccagctactcgggaggctcagacaggagaatcacttgaaccctagatggaggttgcagtgagccaagatcgcaccattgctctccagcctgggcaacaagagtgaaactctgtctcaaaaaaataaataacaaaaaatcagctgggtatggtggtgtgtgcctgtagtcccagctactctggaggatgaggcgggagattcgcttgagcccaggaggcggaggtggcagtgagccaagatcactccactgcactccagcctgggcgacaagagtgagatcctgtctcaattaaaaaaatagaggccaagtgtggtggcccatgcctgtaatcccagcagtttgggaggccgaggtgggtggatcacttgaggtcaggaattttgagaccagcctggccaacatggtgaaattcagtctctacgaaaaaaaaaattagccgggtgtggtgacaggtgcctgtaatcccagccactcaggaggctgaggcaggagaatcacttgaacccaggaggcgsaggttgcagtgagccaagatcgtgccaccgcactgtagcctgggtgacagagctagactctgtctcaaaaaaaaacctaaaaccaaacattagttgtaaaggtatattatttgagagtgatttctacattctccagaaataacgtgggtgattttttaaatgaatttttaaaaaaaaattcctgaaaggaatgaaaatatgattttaagtctgcagggttcaagaggggcatattttacatttattttgctttcatactactttgatttcctttctattaaatgtcctatttttttatctctataggtgaaaaggggaccgggaaatcaacwcagaaaccattacattataagagttgtctctttcacagagttgtcaaggattttatggttcaaggtggtgacttcagtgaaggtgagacttggaaaaatcatgtattattttctgttaaatatcacagatctcaaagttagacaagtccctagaagttttagtccaatattcttgtcactctcactccatttaatctttggtcaattagaagtactcatagaaatatgtaaaagaaggaagctcataggctgggtgcggtggctcacgcctgtaatcccagcactttgggaggccgaggtgggcggatcacgaggtcagtagttcgagaccagcctggccaacatggtgaaaccctgcctctactaaaaatagaaaaatttgctgggcatgatggcacgtggctgtagtcccagctacttgagaggctgaggcaggagaatggcttgaacccgaaaggtggaagttgcggtgagctgagattgtgccactgcactccggcctgaatgacagagcaagactctgtctcaaaaaaaaaaaaaaaaagaaggaagctcatagaaaataattttgcctttgacacatgaatttcagaaataggcttctggatacaaaacaacactgcattcatctcagtaatctgtcaagtgtttctgtttgattttgtcacaagtggtaatccttactacaataaaaatttttacttttttattgtaaaaatatcaaaactatagttttaaaaaactttgaaaaaatgttaacctgttgcaagacctgcataatcataattagaatctgaaagttcttttttaaaatatattttaatagtcttcgtcacattcttgctatcatagcataggggaaagaaagtaatttgggaccttgtcgttattgacattaatatcttttatgatttgctgcaatcttcgaatattgttaattcaaaattattcaaaaatctactttacaagaagtattktgtttaggtatcacctttgaggagcttactgagagttataagagtatgtttttcatttttaggaaatggacgaggaggggaatctatctatggaggattttttgaaggtaaaaatgtttacatttatattatgttttaaatattttgtcttttattctattttattctctatggaatcaataacattattcattaaagggtatactaatgtctagctgccttcaactaatctgaaggttaattttctggtaaaaaaaattgctttttatacagatgggtattttttcttcttaggacatttttacaacatgatttgaaagggtttcaatgatctgtacttaattcttagaattttaatgatagaataggaacttccgtaggtcaatcttaacttttattaaaggagattcagcaatatttcttacaacatccaaattttaggtcattttttctatgaacatttttaaaaaatctttgatattctaaaatttgactataatattttccaaaaatttaagttttcttgctggaatttttttgttgatgtgaagaccatttggaaaatggtctataagcatatttaatgtggaaataatttaatatttttcatccttcacttttgacatttagtgaaatkttgtttaaaattctacatgatttgttcttaatattctaacccaagattggaaaacaaattcctccttttgcggtaagtgatgctatggcagaggttaagttaatgagtccagactaaataatactctgtgtgctcagaaatgaaacagatgaaatgtaaaagaatctaatctggactgtctcactcttttttttaagagatgggatctcactgtgttgcccgggctggaatgcagtggcttttcatgggtgtgatcatagtgcactttaggttcaagctcctgagctccagtgatcctcctgcttcaacctgctgagtagctaggactacagccacactactgtgctcagctgtttcttgctttttaaagatagtttcatttttttatttaaataaagtggtgttatcttttccaaaaattgtgaaggacaaatataaatggaaaggaaggggattgagataatatttgggttttataagcaaataatagaaaattaataatatttgaatcttaaaaagatgagaggggaggctgggcacggtggctcatgcctgtaatcccagcactttgggaggccgaggcgggcggatcacgatgtcaggaaattgagaccatcctggctaacacggtgaaatgccgtctctactaaaaatacaaaaattagctgggcgtggtgatgggcgcctgtagtcccagctactcaggaggctgaggcaggagaatggcgtgaacccaggaggtggagcttaacagtgagccgagattgggccactgcactccagcctgggcaacagagcgagactccatctcaaaaaaaaagatgagaggggaaattgattcatatttgattctcttctttcataacctaactttattatctaagtaagttgtgtgtggcactaaataatacatcagatatgaatagaagtgaagatgaaatttttttggaggttatatctataatgtaactgaaaactttacttctctatagacgagagtttcgctgttaaacacaacaaagaatttctcttgtcaatggccaacagagggaaggatacaaatggttcacagttcttcatgtaagtatttattatctgatgatttaaaacatcccatttttgggccgggcacggtggctcatgcctgtaatcccaggactttgggaggctgaggcgggcggatcacgaggtcaggagatcgagaccatcctggctaacacggtgaaaccccgtctctactaaaaaatacaaaaaaattagctgggcatggtgtcggacgcctgtagtcccagctacttgggaggctgaagcaggagaatggcgtgaacccgggagggggagcttacagtgagctgagattgcgccactgcactccagcctgggtgacagagcaagactgtctcaaaaaaaaaaaaaaaaaatcccgtttttggtctgtcatttctctgtgtgcctgccattgattactaataaataggagaggaatctatgagggacggaattgttgaaggaaggggaacaaataattgatttttttgttgttgtttttgagacaaggtcttgctctgtcacccaggcgagtgcagtkktgcaatcatggctcaccacagcctcgacctccctggctcaagcaatcctctacacctcagcctttcaagtagatgggactacaggtgtgtgccaccacacctggctaattttttaatttttttgtagagacggggtctccctgtgttgcccaggctggactccaggctgggattacacatgtgagctatggcacctggccaaaattgttgaagagggaaaattgttatagaggggaagttaaattgttctgctaatgttttgaaataatggagacttgtcaagagaacacaggagccaggttaaaggtttcccactagccaaattaggataatttcagcatcaaaataagtaacagtaatatcagtttatggtcaaataggaaccagcagtctacactgatataaataaatgattaaataatgagagagaagggaagctgttcccttattagaatgtcaactaataaatttaaacggaatggtggagttagaaaagtcaccattttgtaatcatcacagtaatgactgacccaggcaagaatcttctattgatgctaaatttagaggggtgatttcagtgagaaactagatgtttacagagtatttctccgtaaattacttaattacaaagaataaaatgcagtcagttctcactattcatagattctgtmtttgtgaattcaccttctcactaaaatttatttgtaacctccaaatgctaaggatttccaattccaactacaaaaaaaattatgaccaggcctgttgtcagtaatgcctgtttttaaaatcctrtcttatgggtataggtttgttctgttcggtagccttgaaatctcttgttctgtgaggaatttaatctgtcagtaccatgtggattattctgtcatttccctattctgtatttgttaactgttcaacagtgagaaatctggcgcctgattatcttcaacatttctgttctttattgattcctagaatgaacagttgccatcccatactgctgtaaagaaagaccaactaactagagttcactatttctttatccttattttcgtttttagactgagtgtaggtagttaaacaccaagtttaaaagtgacttaaattagttcttttttggtttggctttgtgattcactcaaaatgtgttaggtttattcctttctggttatatttcattttgttctccttcctacctagttttgatattttttttttgcatttttttaagtttatgaaatagtaacatttccaaagtcaaaacaaaaagaatactgtgaagtgtctctcccacccaacccttccactccattcccatttccttttttttttcaccccagttccatctatacatgttaataaccaacctaatttccagtttatcttcctgtatttctgtttgtaaacataagcaaatacatgtatacattttctcactttccctttcttacaccgtagatggcataccatgtatactgtttcactcttcacttaacagtatatccttaaaatactccataacagtttatagagatcattcttattcttttttgcagctgcatagtactctattgtttgtgtataccatagtttattcaaccaattgcacataatgtggatctctgattttctttttaaacaaaacaacttatggctgggtgcagtggctcatgcctgtaatcccaacactttgggaagccgaggtggcgggtggatcacttgaggttaggtgttcgagaccagcctggccaacatggtgaaacccagtctctactaaaatacaaaaattagctgggtgtgcttgcgggcgcatgtaatcccagccactcrggaggctgaggcaggaaggtggaggttgcagtgagccagggtcgtgccactacactccagcctgggctacagagcaagaytccatctcagaaacaaacaaataaaacaacttataattacctcttcattgtaaaaaaagaaaaagaaaaaaagaaagaaracacagataagacacacacacaaaaatcccattcccagagcatctttctgtgcattaaaaatgtttgtagagtgtcgttctrtagtcaacttttggctataatataaatctctgcacatcactaaatattagctttttaatggctacatgttaatctcttgcttgaaagtactgtgcattattaatcttattttgggacatttggtttgcttcctgtttttcaaactgctccaatgaacattgttgtgcctatcatttgatgcagttttaatatttaagaagtttacttaatgaactatttacacatttttaagccttttcatatatattgttatgttgattttcaaaaggaaaggatagtttactgtagcaccagtagtatgtaaatgctaatttcaccacattctcaacagagtattataatttattttcctcttttaaataaaatctttcctgcactaaccaaaactcctatgttaagttcatataatccttcatatatatattctcagaatcttccctctaaatgtttgttactccttatatcttcctatttcgtaggtaacccttcttctgtgttctgttttttaaaggaaataacttcaatttttagagagcttcagtcttaaaaaaaatttttttgtactataacatatagaagatttgccattttaaccatttgtaagtgtacaattcagtcttgtttatagctatttatttatttatttatttgagacagagtcttgctctgttgcccaagctagagtgcagtggcacaatcatagctcactgcggcctcaaactcctaggctcaagtgatcctaccgcctcagcctcccaaagtgctggggttataggtgtgagccactgggcctagtgagtcatgtgtattcacagtgttgtacaaccatcaccactatttccagaattgtttcattgttgcagagactctgtaccatttcccctttcccccaatccctggtaacctctatgaatttgcctgttccgcatattttatttaagtggaattccacaatttttgtccttttgtatctggcttgtttcacttaaaaatgtttccaaggtttatttatattgtaacatgtatcagaactccattttttttttttttttttttttgagacagaatcttgctctgttgcccagcctggagtgcagtggcagaatctcggctcactgcaagctccacctcccgggttcacgccattctcctgcctcagcctccccagtagctgggactacaggcgcctgtcaccacgcctggctaatttttgtatttttagtagagacggggtttcaccgtgttagccaggatggtctcgatctcctgaccccatgatccacccgccttggcctcccaaactgctgggattacagacgtgagccactgcacctggcatgaagtccattttttatggctgtgtaatattccactatatgtatataccacattttttgattcatctgttagtggacatttgacttgttttcacattttggctattgtgaatactgctgcagtgagcattggcatttgagtttctttttttagttcttttgaatatatacctaggagtgaattggtgggttatatgctaatactctgtttagctttgtgaggaacttccatactgttttccatagtggttgcaccattctacattcccgttagcaatgtacaggagttatttatttttccacatccttgcccagcacacttatttgccacactrtgtgtatctgtaaattaccatgaaagcaccacaagctgtaattttttaattttgggattacaaataagttttagtgagcaggcagacttgcaaataaagttatcagtgaagtgaggatcaactatatctaaatgcaaatcatatatatgcattgtgactataacatgttatatgaatacacatagtgtacacctaggtttttacatttctaggtgattttagtgagttgaagtgagcatagtgtcacaatgaggaaacaatagcaggtcattaattttataattaggtaaacctaaaaattcagctatatgttataattttttcagtggtattgtacatgctttcaccaaagattagcataaattatgctccttttttcgaatttctaatagctttttgataaggttttttaaaaataaaaaatcttataaaatgctaatctttaattttcataccagtgtttttagtacgtattcaagtagcaacctttttacctacatagctttaaggttgatggtggggagtgggattttttaaaaataatttcgtttgccaaaaaatgcttattttaattttttttcccaactcctaatccagatctcttgcagctaattaaaaaacttgtaaactctcagcggggcaatgactcatacttgtaatcccagcactttgaaaggtcaaagtgggaggatcgcttgaacccaggtttgagaccagcctgggcaacatagtgagacctgtctctacaaaaaatacaaaaattagccaggcatgctggcatgcacctatagtcccagctacttgggatgctgaggcaggaggatagcttgagcccagaatgttcaggatgcagtgaaccaaggttgtgccagtgcactgcagcctggacaacagcatgagaccctgtctccaaatcaaaaaaataaaaacaaaaaaaacttgtaaacacgatatgaaccatttctgttcaagtccaacagtatatgtctgaggatcataagaatatagcccgtgcttaactgtttaaaatgttaagattgaaaagcattattgttaaactcaaacactggtggaattgtttcataaattttgatatgtctacatgtagaacattatacaattatgactattcagtaagaactcaagtgcaagaaacatgaatggttagaaataacactgaaatgtctattttagttacataaaagttttcagcagtaartrgatattgcttttataattagaacaagtttgataaatacattatgtggaaagcattttgccttctgttctacttaagattgaggtaatatgattatattaagatagcagttgatgtctttgttttcaactttgtttccaatacagttattttctttttctttttagagatgctaactttgtttttctctgactttgtttttattcttctatctgatgatttccaaaagaacaacgaaaccaactcctcatttagatgggtaaatattattttatttattttacaacctgttttaaattaaccttgaaataaaaagcttttatttaataattttttacttgacactttaggcatcatgttgtttttggacaagtaatctctggtcaagaagttgtaagagagattgaaaaccagaaaacagatgcagctagcaaaccgtttgcggaggtacggatactcagttgtggagagctgattcccaaatctaaaggtaaaaaggaagtacatatttctgagaatacttacacatacaaaataagcagagatactctaaatagttgacatgaaattcatactcaagctgaaagaaaaatgaggtttttgttttaaaatgtatttctgtgcttttattttttacttttttaagttgacaaaacttgtgtatacttactgtgaacaatatgatgttttgaagtatgtatatgttgtggaatggctaaattgagctaattaacatttattgcctcacataattacccctttttgtggtgagaagaacacttaaaatcttagtggttttgggttttttttttgttgtttgtttgtttgttttgaracagagtctcactctgtcacccaggctggagtgcagtggcatgatcttggctcactgcaacctccgtctcccgggttgaagcaattctcctgccttagcctcccaagtagctgggactacaagcgcccaccaccacacccagctaacttytgtatttttagtggagatggggtttcaccatattggccaggctggtctcgaactcctgactttgtgatccgcctgccttggccccccaaagtgctgggattacaggtgtgagccactgcacctggccagtgattttcaagaatacagtacattgttattagctatagtcatcatgttatacagtagaattcttgaactcattcctctgagctaactgaaattttatatcctttaccaacatttgtccaacacatttccttctctaatcccatgggaaccaccattcttctctgtacttctgtgacttcaacgtttttagattccacatgtaagtgagttcacatggtattcgtccttttgtgcctggcctatttcatataacataacttcctctgggttcattcatgttgctccagatgacaggctgaatagtattccattgtgtatataaaccacatttttaaaaaatccgttcatctgttggtggaaacaggttgattcagtatcttagctattgtgaataatgcagcagtgaacatgagagtgagatatctcttcaacacactgatctcatttcctttggatatatacccagtagtgggatttctggatcatatagaagttctatttttaattttattattatactttaagttctgggatacatgtgcagaacatgccrgtttattacataggtatacacatgccatggtgatttgctgaacccatcagcccgtcatctacattaggtatttctgctaatgctatccctcccctagaccccctacctgcagacagaccctggtgtgtggtgttcctctccgtgtgtacatgtgttctcattgttcaacttccacttttgagtgagaacatgcagtgtttggttttctgttcctgtgttagtttgctgagaatgatggtttccagcttaatccatgtccctgaaaaggacatgaactcatccttttttatggctgcatagtattccatggtgtatatgtgccacattttctttatcctgtctatcattgatgggcatatgggttggttccaggtctttgtattttgaatagtgctgcagtaaacatatgtgtgcatgtgtctttatagaagaatgatttataatcttttgggtatatacctagtaatgggattgctgtgccaaatggtatttctggttctagatccttgaggaatcgccacactgtcttctacaatggttgaactaatttatactcccaccaacagtataacagtgttcctatttctccacatcctctccagcatctgttgtttcctgactttttaatcaccattctaactggmgtgagatggtatctcattgtggttttgatttgcttttctctaatgaccagtgatgatgagcttttttcttttcatgtttgttggccacataaatgtcttcttttgagaagtgtctgttcgtatcctttgcccgctttttgatggggtggkttgtttttttcttgtaaatttgtttaagttctttatagattctggatattagccctttgtcagatggatagatagcaaaaatgttctcccattctataggttgcctgttcactctgatgatagtttcttttgctgtgcagaagctctttagtttaattaaatcccatttgtcaattttggcttttgttgccattgtttttggtgttttagtcatgaattctttgcccatgcctgtgtcctgaatggtattgcctaggttttattctagggtttttatggttttaggtcttatgtttaagtctttaatctatctcttgagttaatttttgtgttaatttttgtataaggtgtaaggaaggggtccagtttcagttttctgcatatggctagccagtttcctaacaccatttactaaataggaatcctttccctatttcttgtttttgtcaggtttgtcaaagatcagatggttgtagatgtgtggcgttatttctgaggcctctgttctgttccattggtctatatatccattttggtaccagtaccatgctgttttggttactgtagccttgcagtatagtttgaagtcaggtagtatgatgcctccaactttgttccttttccttaggattgtcttggctatacaggctcttttttggttccatatgaaatttaaagcagtttttttctgattctgtgaagaaagtcagttgtagcttgatggagatagcattgaatctataaattactttgggcagtatggccatttttacgatattgattctccctatccatgagcatggaatgtttttccatttgtgtcctctcttatttccttgagcagtggtttgtagttctccttgaagaggtccttcacatcccgtgtaagttgtgttcctaggttttttattctctttgtagcarttgagaatgggagttcactcatgatttgactctctgtctgttattggtgtataggaatgcttgtgatttttgcacattgattttgtatccggagactttgctgaagttgcttatcagcttaaggagatatggggctgagacgatggggttttctaaatatacaatcatgtcatctgcaaacagagacaatttgacttcctctcttcctatgtgaataccctttatttctttctcttgcctgattgccctggccagaactttcaatactatgttgaatagaagaggtgagagtgggcatccttgtcttgtgccagttttcaaagggaacgcttccagcttttgtccattcagtatgtattagctgtgggtttgtcataaatagttcttattattttgagatgtgttccctcaatacctagtttattgagagtttttagcatgaagagctgttgaattttatcaaaggccttttccacatctattgagataattgtgtggtttttgtcactggttctgtttatgtgatagattacgtttattgatttatgtatgttgaaccattcttgcatcccagaggtgaagctgacttaatcgtggtggataagctttctgatgtgctgctggatttgatttgccagtattttattgaggattttcccatcaatgttcatcagggatattggcctgaaattttctttttttgttgtgtctctgccaggctttggtatcaggatgatgctggcctcataaaatgagttagggaggagtccccctttttctattgtttggaatagtttcagaaggaatggtaccagctcctctttgtacctctggtagaatttagctgtgaatccatctggtcctgggctttttttggttggtagtctgttaattactgcctcaatttcagcacttgttattggtctattcagggattcgacttcttcctggtttagtcttggaagggtgtatgtgtctaggaatttatccatttcttctagattttctagtgtatttgtgtagaggtgttcatagtattctctgatggtagtctgtatttctatgggatcagtggtgatctcccctttatcattttttattgtgtctatttgattcttctctcttttcttctttgtctggctagcagacatctggccagaatctattttgttaaacttttcaaaagaccagcttctggattcattgattttttttttttttaaagggttttttgtttctcttatttccttcggttctgctctgatcttaggtatttctcatcttctgctagcttctgctagcttttgaaatttgtttgctcttgcttctctagttcttttaattgtgatgttagggtgtccattttagatctttcctgctttctcttgtgggcatttagtgctataaatttccctcgaaacactactttagctgtgtcccagagattctggtacgttgtgtctttgttctcattggtttcaaagaacttaaaataatttcgttatttacccagtagtcatttaggagcaggttgttcggtttccatgtaattgtgcggttttgagtgagtttcttaatcttgagttccaatttgattgcactgtggtctgagagacttgactgttaggatttccattcttttgcacttgatgaggagtgttttacttccaattatgtggtcaattttagaataagtgcaatgtggtgctgagaagaatgtatattctgttgatttggggtggagagttctgtagatgtctattaggtccacttggaccagagctgagttgaaatcctgaatatccttgttaattttctgtctcattgatctgtctaatattgacagtggggtgttaaagtctcccattattattgtgtgggagtctaagtctctttgtaggtctctaagaacttgctttatgaatctgggtgctcctgtattggtgcatatatattgaggatagttagctcttcttattgcattaatccctttaccattatgtaatgccctctttctgtttttgattttttgaggagacttcattcggttttctaataatggctgtaccgatttacattcccaccaacagtttacaagagtgtccttttcttcacatcctctcccttgttttcttttttttttataatagccattgtaacaggtgtgaagtgctatctcagtgtagttttaatttgcattcctttgatgtttagtgacattgagcatttttgccatatacctgttggccatttgtatgtcttcgtttgagaaatatctcttcagattcttttcccatttttaaatcaggttgttttcttgctgatgagttgtttgcattccttatatattttggatattaacccattgtcagatgtatggtttgcaaatattttctcccattccagaggttgtatcttcactctgttgattgtttctttggctgtgcagaaccctgttagtttgatgttatcccatttgtcttatttttgctttttgttgcctgtggttttggggtcatatccagaaaaatcactgcccaaaccaatgtcatggagctttttccgtgtgttttcttttagtggttttacagttgcaagtcttatgtttaagtcattaaaccatttttagttgatttttatatgcattataagggtctgattttatttttttacatgtggatatctagttgttccaacaccgtttattgaagagactgtcctttccccattgtgtgttcttggcaattttgtttttttaactgttttatcctacttctcattttcttcatttaccatgaagtcagttaactttttctgattattaatttgcaataatttgcccttttgcttccactgagtttttgttgttgttgttttttgtttgttttttaactgtagttgtctaaataacctagtaaataaatactctggaggaagagactctggggctagatggcaattcaagagaggaagatagattaggaaactttaagggaataaattattttttctttaagcactacttagattcagaagcatccaacatgtttgagaaacttcttttatttagacgagaccatttgatgctgacatgactaatttgatatattgtctgaaatggtaagaactttaaatattttaagtctttatatttgaaatatgtggctgatactattttattacagataatgggcttgacattctaaaagtaatggagtgagattaccttcaaacctgtatagaaagtagtaaaaccttaaactgactctgttcttactaatctagggaataataatatcagtaattagtttcttagagttagcacatgtgagagtcatctgtaatgctttctgattctcacagtaactctatagtattacatatccctattttacagacaaagatagtcaagaagattaagttctttactgtgtcaggaaaagagacctcaaacccaagttcgagaattagaactttttctgttatatgttactgactcattaaagtttaaatgtccttaaaatttcttaagaattgccctaagtagatgattctcatctcaccttctaggtacactgatttcctctataatatttagaaacaggtacattttgttttgttttaattttaaaacatccgagatgggcatggagaaggcaaaatgattatttaaaaaaattttttttgtctgcattccattttgagtctgctaattttattttcttccatgtgatgtcaaataaatattcacaggtaagttattgcaataaattattgcagatgtatgcttcagctcatgggatttcttgatgtacatgagactggctatccttatttacaaacaacaggtgtaatgtatgccttttttcttgaagattcagtaaaaaacaagatgttgagaatctttgagtaatattctacaaatscaattatttacattaaaaaatactaaaaataaaaaaaatctgtaatgatgtttgttactctaaaccctgaacctactgatgtttaaactttagagtgtttttagtacagtaggaatattttaggttaaggcattattcttcccaagtcatctagaaaatcttcatcatttattctctacttgacaactaattttttttttttttaatattttagtctttaaggacacttgtrttaggatctgttgcctccttataaaagttaagtggccaggcacggtggctgacacctgtaatcccagcactttgtgagactgaagcaggaggatcgcttgagcccaggagtttcagaccagcctgggcaacattgtgggactcttctctaccaaaaaaaaaaaaaatttttttttaattaaccatgtgtagtccctgctacttgggaggctgaggcaggaggatcacttgagcccaggagttgaaggctatagcctgggtgacacaacaaggccccatctctaaaaaatatataaataaataaagttaaggatgctgcgtggtttatatgttcagaaagagattgaggtaataaaagagtttttggccaggctctggcttacgcctgtaatcccaacaccttgggaggccgaggtggacggatcacttgaggtcaggaggtcgagaccagcctggccaacatggtgaaaccctgtctctactaaaaataaaaaaaaagaagtttgcattttaaaccataaacagtagtcatagactctctaataaatttgttgtaaagattcttttggtactaaaagggcagtacttgaatatttgcctaaaggaggaagtaaatgaatgtagctctttatatattacttacatctttataatgcattgtcatctgaagaaataaatgatggttttgcccatgccattggggccaggaagttgtgctaaaagttgatgtaacatccaactgtatgtccctcaaactcatgctaacctagcataccttgcccttatcagtttcagcaatctgagatttggccctttattaatatgtatctgcccaggagtttctaaaaggtcagatttgttttgagccagacttccaatggctactctgttctgaatcacactgtgaaaagaggaaaagatctttagtttgaaaacacacacttgggcccctgttattccataatccttcagttaccattcagaacattggtcagagtagattttgtcatgcatcttayatataagcagagctatatcttacatccacttagtaagtttgatggccttcttaattaattgggaacagtcaaaaagcattgtaacactgtggtatttatcatcattatatttaaaaccttgtatgagagatttacacctgttttttttaacttcytgaaagaaaacaaaaagacttctgaagaaatctgacagtcttggtccatctatatgtgttcttggkgagtctgggcaatcaatcttcctgggcctttctctctttgcaattttgagattggagatccttctttttgtgactatttgagtgtgccagagaaaattcaaagtcaaggagaaaaaccttccagcagatgcagagatggaacactggaagctaataaaagctgcatcccctgtagaggctcagcaaagggctgtcaaaagtcagagtggaggatagaacacagaccagtaccttgattaagatatttcctagtttttcaggagctgacgtgacctcagatcatgctgttcaattcagagttcactgcagttgttaacccatttatgccggaggttgcaagttttttgtgtgaaaaatcagatcttggcaatgaccttgagaagtaggatatacataactcccacaagcttagcrtaccaataatgaaactaagagatgagaggattgctatgttacatagtacacagaaacacaagaacagagttgtggcaacatggcggtaagtagttgtatgagaagaaatgggaggaggcagattgcctgacaatacagaacaaatagcacaatagaggaagcagctggtgaatcttgtactcaggagacaagtgaagaggaacactagagattcatttctatggtgacagggtcccatttcagtgtccttattctgaaagtaattttggcacttttattggaaaatagtgagatgttaaacttagaaacggtttaggagatgcaacccataatgtgaaatgaaattgtctaaagaccattttaggaatacttttgttctttatttcaaatcttattttgatggtgatttcagaatttccttcattttcaagatttcaagtgaaatttattggtgtaaaatctgtgggtctcaaataaaaaacaaagcagcattttgttaccttaggtttttacaaataaaatattctggagttatttctggttttgttttgtttttttgagactgtcttgctctgttgccaggctggagtgcagtggtgcagtcatagttcactgcaacctcgaactcctgggttcagtcaattctcccacctcagccttccaaatagctgggactacaggtgtgcattgccacacctggctaatttttgtatttttggtggagacaaggtctcgctatgttgcccaggcaggtctcaaattcctggttcaagcgatccttctaacttgacctmccaaagtgctgggattacagrtatgagctatggaatttggtttttaaccttaatattatactagtaagttaaatgactaattgataaggttacatcacaccatacccccaagtaaaggtcagtgaagaagtttgggaaatcattatacttaataataagcaaactgcgtaatctaaactaattaaccagaaatggcccaagttgaaagtgttattactctttgtaattctttttcatccaytatgattcttaacttgcattgtggtttttgcttttagtgctatttcattttaccttaacgatacttacatgccattaaaagaaacgctgaaatcaattttgtgtaagtagttaggaagtagggttttgtttgtttgtttttgagatggagtctcgctctgtcacccaggctggagtgcagtggtgcgttctcggctcactgcaagctccacctccctggttcacgcgattctcctgcctcagcctcctgagtagctaggactacaggcgcccaccaccacgcccggctaatttctttttgtatttttagtagagatggggtttcaccatgttagccaggatggtcttgatcttctgacttcgtgatccgcccacctcggcctcccagagtgctgggattacaggcatgagccaccgcgcccagccggaagtaggttttttgaagagtcagctgaaaacaactgttgccgtattcggaatttaaaattttaatttgaaaatattataactgagaaattattgtatatatttatggtatacagcgtgatgttatgatacatgtatacaatgcagaatgattaaatcaagctatttaacatagctgtcacctcaaatactatttttgtggtcagaaatttgaaatttattatctcaggaattttgaaatgtacaatacattattattaactgttctcaccatgctatgaaaatagatctcaacaaacttattcttcctgtcttaactgaaactttgtaccctagttttaaaaatttaatacatttatttggttcgaarttcagaaagtataaaatgataatctgtgaaaatctctttccatgagtttccattctcacattttgtacattattccacgtgtgtgtgaatgttgatcttgtagaatgaatttcctagaaatggaattgccagtttgcagaggtcatgcatttgtaatttggtagacactgctaccagaatataagaggataagttgccctacaccctgtataaaactacgtattattgtaaactctttcacctttgccagcctaatggattttttttttaacaaatgctagtttcaattagcatttctctgaggagtgtgatgttagtgtctccttaagagctatttatgtttctttttatatgaaccgattgttgattcctttaccgcctattatttaccattcttttattcttcctttctgaagttcaagcctcctcctgctatttcctttctctttggagaacttcctttaaccaatttttttttttaaggttaggtctactggtgacaaaattattctagttttctgaaaatgtctttatttcatcagggtttaggggatggtttcaggatgaaactgttccacctcagatcatcaggcataagcgtttaataaggagtgctcagcctagatccctcgtatgcacagttcacaatagggtttgtgctcctctgaaaatctaatgctgtcactgatctgacaggaggtggagctccagtggtaaggcttgcttgcctgccactcaccttctgctgtgtgacctggttcctaacaggccacggatcagtaccagggaccatggctcttcatctccatgttctgacattatgttgactatgtatattggtatactgttcagttaaataatacttgtgactttgagaaggatacagtttcaatcatattctcaatatgccttaatcatattttaaaatttaggttaacacacattctgaaactcaagccacagtcttacagaatcaatattgatattgtgatatctcccaattttttgcctttttacccttctgtcctttaatgccatctctttctcaattattttctctcattttttttctgagcagacttatacaaaaaggaacataaattaaatttgccaaatatcaaaagagaggaactttttattttttatttttttggaacggagtctcaatctgtctcccaggctggagtgcagtgacgcaatctcagctcactgcaacctccgcctcccagttcaagagattctctgcctcagcctcccgagtagctgggattacagrtaccctctaccatactcagctaatttttgtatttttagtagagackggttcaccatgtgggccaggctggtctcgaactcctgacttcaggtgttctgcctgctttggccttccaaagtgctgggattataggcgtgagccaccactctccactgaactttttaatcttagagcttttttatttgttaaatcaggacggagtctcactctgttgcccaggctggagtgcagtggtgcaatctcggctcactgcaacctctgcctcctaggttcaagtgattctcatgccttagccttctgagtagctggaactacaggcgcccatcaccatgcctggttaatttttgtatctctagtggaggcggggtttcaccatgttggccaggctggtctcgaacccctggcttcaagtgatctgcctgctttggtgtcccaaagtgctaggattacaggtgtgagccaccaccatgcctggcctattttcctcttatagttaatgttttctgattctcgggcagattatattcctataaaaacagttataaatctctttctggccttccatttcatttatttactttgaggaggagtcttgctttgtctcccaggctggattgcagtggtgcaatcttggcttactgcaatctccacctttggggttcaagcgattctcgtacctcagcctccctagtagctgggattaygcgtgtgcaccaccacacttggctaatttttgtatttttagtagagacagttttgccatgttggccaggctggtctcgaactcctgacctcaaccgatccactagccttggcctcccaaagtggtgggattacaggcatgagccactgcacccagacttttcattttatcatgttatcttgcttcactagaatgttttcttcaaaagtgatatgtaaattaaataattgtttatgaaatgtatttaatacacttggtaagtgggcttgctgttgtgtggtatggtgttttgttgttgttgttttggagacaggttctcactctgttccccaggctagaatgcagtggtgcgatcatggctcactgcagcctcgacctcccaggcttaagtgattctccctgctcagcctcccaaagtgctggaattacaggcgtgagaagccatgcccctagccagtgggcttgctttttttttttttttttttttaatttcaaacactaaatgggcttgcttttaaagtaaatcaactgtgatgtatttctcataggaaagaatctcagtgcaaaataaatagaaatcagactggtgattaaagcttttttaattgtggggtaaagagttaccatattttaacaagtatattttatgtttaagtgtagtatttttattttgcttgcacaattttatgtttttatttcattgtgaatttattttctgtgttagatttccttaaaatttgattttttccccctgcatatccctcaggtttattagtttagcatatataagtagatttttcaggttatatgttttttcatacccactctgtctcaccagcagcataggtattggattcaggttaacagttgggctcgtgagacaaaattagcttcaccaggcactaaggttacttacccttaagaaaggatatagggcaggaaacggcatggctggtacatcaacagcatagaggcrctgtcatgatttccaggcacagcttgcgtatatcccaaacatctcacacttgataatrtacctgttccttagaaacataactgggtaaggaaggattatcttagttcagtgaagccattacatctacggtctcttcagcttttataccttgttcccattctcaagtgcagcaacatctcatcagtactggaaaagcagtctgcacagtgaaccagaagtccttggtcaagtacaagtaacttcagccagattttcatgtatcttgggtttagtatattcctgtaaattatcagttacaaatttcaaggatgattcaggcrcagcagcacatgtgcctgtagtcctagctactcaggagactgagagaaagaggattactagagcccaggagtttgaggccagcctgtgcaacatagcaagaccccatcttcataaataaacaaggttaggcatggtagcccacacctgtaatcccaacacttacggaggttgagacaggaagatcccttgagcccaggagttcgagactagcctaggcaacatggggagaacttgtctctacaaaaataaaaattaaaaaaattagcagggcatggtggcatacacctgtgtttccagttactcaggaggccgagacagaagtatcacttgagcccggaaggtcaagactgcagtgagctatggtctgcactctagcctgggcaacagagcaagaccctgtctccaaaaaaaaaaaaaaaaaaggcaaggataaattttccaaataccaaatcttcagatgttcctgaggctaaggtggggctaaaggaaaggtcgcaaatcagctgttaaccctttcaactaaggttctgtaaccaaacaaccaacagataatccaaagatatattttctttgttttccttgactttttattgtggaacatactaatttatacacaagtgaataaaataatataacactttttctttagctagcttcaggagtttatttatggccaatcttgttttacccatcactagccacttttccctttcctattattttgaaacaaattccaggcataatattttatcaataaatgttatttctaaaagatgattcttaaaaacagtaccataatgatacacacatacacattcctaaatactaaaaatcctgacagtgttcagattgtaattgtttcattaatgttaattaattttttgctgtgtgaatcaatccaaatgaagttcagacattgaaattggtcttgtaagttgtgttttgtttcttaataaattccctcaccatcttgttttatgtttccttgaaatgtatttctcagaaaaggtaggtcatttgtcatgtagcattttctataattgaacatactggattttactaattgagtccttactgtgttatgtaatgttgatcagatgcagttgtgacttgaaattccttttaatgaaaacaggagtcacacaggacaagttgtctctgtgttttgcagcagccatgggttatcagtgcctcacaagaagttgtaaaacgatattttaacactataatttctttttcatttattcctggaatgcttctgacaaagagctatttcccttcatccatttcattagccagtggtgcagtttgtaccacaaaggcaagataaatgctttatactttatgagtatcactgtgaactaatgtatttctaatataatctgatatatctcaatttattgtagttctcatgtatatatcaatattgtcccatctttggccccagttagcctcttcaaatccaccatgatttgaatgagtatacctttagatgggtcaagctcctcccaatttgtagtatcttcttctaattcttgttatgttacaccttctagcttcacttatttatattaattgatcctttaaactctgagttttttttttttaccctttttaaagttactgcttccttaactgaaataaaatttcaatttaaaatgactttttgtagagtccccaaaacattctattcatcatgggcaattgacttccctctgttatgagtctcctcttgagctaaatttcttaattattagaagactgcttgggcactgaaatataagcccatgccagtgaaatccatttcttatctctccatgttgctgtaaagcagtttttctgttatttccctgcactagttctgccaatcttgataataagagggaaagtggaaaactacaagattagaacatgggactcttcattgttattctgtgcttttaaaaaaawttcttattcagatgtttgttaacattagtttagcattttagactcacctattttttaaagttctttggattaatagataaaactttgaccagtgaattctggagatctggactctaatcctgagtcttgactcctttcctgtacttsccagttcacatagctkgatgatctaagtgctaaatactgaacttagtgagaatctgcagaaaatttaaatctccttccacaaagtttgtctaaaaattgttgatcaaaacctttttgtttttattaaagttaagaaagaagaaaagaaaaggcataaatcatcatcatcttcctcctcctcatctaktgactcagatagctcaagtgattctcagtcctcttctgattcctctgattccgaaagtgctactgaagaraaatcaaagaaaagaaaaaagaaacatcggaaaaattcccgaaaacacaagaaagaaaagaaaaagcgaaagaaaagcaagaagaggtcttaattttacttttctaatgctagctttatattctgatttcctttctgtaaatctgttagrattttgggtcaattatatgaaactgttaaaatagtgagaaatatagcatggagcgtaggacttttgatattccacagtctatagattaaattttgggtacgttcattttcttttgaaasaaaacctatcagttcatttttttgtgtactcaatgaaataatacagctttggtgttacagatttgtgtgttttataggaggattatgggatttatgaaaattgcagaaaaccaccagttgtttttcctattttcagtagcagtcccctttgctcttacratagcataaggatagaaagcagataatgtcagtgtattttactttcttttccattttgcttgaaataatctgtgtttgtactaaaacttgtcttcatctgcctatggctcaaatgcagttaatttctttacccatgttttaaagtattttaaatttatcagagtgcattgctcacatagtttcatattttttatccattttgtaggaaaatattttttgagagtgtgataatcgaaacgttttgttttgtttgttttttgattggttagttggtttgtcagaggaatagaagatttttcccatgcgatcacatctttggtaaggacaggatgtttatattatagtgatataaaggaaagaaataccaacaattggatacttccgtaaggacataataaccaactgtaacttgttttgtgtgtttctgtctgttaagtgcatctagtgagagtgaagctgaaaatcttgaagcacaaccccagtctactgtccgtccagaagagatccctcctatacctgaaaatagattcctaatgagaaaaagtcctcctaaagctgatgagaaggaaaggaaaaacagagagagagaaagggaaagagagtggtatgtgaatrtgtatattttgccttacatggtttaccatagaacttttctttttaaaaagttatttattttaaacaagatttaattggtgaccttgtcccaagattgaaatcttttttataaamtgttcttccgcaaagttcttttttgccaaccacataactagaaagggaaattgacttamattacaagtaggttctgaagtaaagttacacataataaacactaatacaaaaaagagatgttaagcagcattccaagccaataacaagatactctttaaccagtaaaacaagatagtgttttatagtgttatttgtgtacagtaaactcttaagcaagtaagaatcttggtttttcagtttgtctaataggaaaaactgctgttttccttacttggtttacaacattgtaataaaaatggatgtcatgttcaaatcctgaaaaaagtttactacataaatctacattattaatatctgtaatgctaatggttctttatcagtcattttaataactatgtccaggctgggcgcagtggctcacgcctgtaatcccagcactttgggaggctgaggcgggcagatcacgaggtcaggagatggagaccatcctggctaacatggtgaaaccccatctctactaaaaatacaaaaaattagccgggtgtggtggcgggtgcctgtagtcccagctactcaggaggctgaggcaggagaatggcataagtaaacctgggaggcggagcttgcagtgagccgagatcacggcactgcactccagcctgggtgacagagtgagactccgtctcaaaaataataataataataataactatgtccaaaagtagaaaaaggaatattgaaatatttttcttagttatgatcagaaatacattgtcataatacaagtaataaaattcttggccaggcatagtggctcacacctataatcccagcactttgggaggccaaggtgggcagatcacttgagccaccatgcccagctaattttttgtatttttagtagagactgggttttactgtgttagccaggatggtctccatctcctgacctcatgatccgcccacctcggcctcccaaagtgctgggattacaggcatgagccaccgcacccggcccagattcatttttattaaagtaacatgtctggccaacaaaagtttttaaaaaaatgtgttaactttctgtttgcttccttctagtaatccacctaactcccagcctgcttcataccagagacgacttttagttactagatctggcaggaaaattaaaggaagaggaccaagggtaggtgattctttccccagagatcttcacaatattgcatttgtcttccttaaataattttagggtgtttcttaaatattattttaatgtgcaagtaactaaaatttaggggagatgcaggcattgaattatatattctctttcttaagcagcttctgtatgttggtacttcccaacagaaaatccatgagatatgaatagattttacatttrcatggtataaaatgggatcgaggtctttcttgtctcccgtgtttcttggcaatcactgtatctctattcttgttaaaaataaataaaaattaaccctattcttgtattttattctttttttatttactagagtgtcctcatcagaatttaaatatcttgtgctttcaaaactttatagaaacttggctatactttcctgtcttatgtcttcacttcctacttattcctcaagcattttagttgtcttccactaccgttgttctgctgaaaacagcacttgatacataatcagctccatgtcacaaattccagtggattcttttcagtcttcatcttacttaatcttgctccttgtaatattctttccaccccccctttttttttttgagatggagtctcagtttgttgcccagactggagtgcagtggcatgatctcggctcactttaacctctgcctcccaggttcaagcagtcctgcctcagctccccctagtagctgggattacaggcacatgccaccatgcccggctaatttttgtatttttagtagatacaaggtttcaccatgttggccaggctggtctcaaaactcctgacctcaggtgatccacctgcctgagacagggtctcattttcacccaggctggagtgcagtggtacaatcaaggatcactgcagcytcaaccttccagtctcaagcaatcctcccacctcaccctcccaagtagctgggactacaggtgtgcatcaccacatctggctaatttttgtatttttttgtaaaaatggggtttcgtcatgttgcccagactggtcttgaactcctgagctcaagcgatctgcctgcctcagcctcccaaagtcctagaattacaggcgtgagccaccgtgtccacccatttacctaacctttaaatactgtagtacctcagggttcccattcaaatcttctcacactgcatatactccttgagcaatctcatgactcccatggctggtaactgtcaaatttttatcggcatttttcagctccaaagactcatttgactaatgagtacctcaaacttggcttttacaaagttgagcacaagctcttcctcttcaaatctgaaccttctttaggttactgattttagtgacgggcaccaccacctgtgcagttccttcccaagaataatctgattctcccctttcagtttataccttaactatgcaagtaacttaactatggtaagatacatgaatatatcttacccatcaccgaatactgtcatttctgcctcctaaatattcagaaattcatgtgtttcaagctttacccctgccatgttaattcaactccatcatattgtctgagctgtaaattttgatagttctcaatttttttaaatctcagtacctctttcatgttaaaaattactgaggacccaaaagaacttctgttggtgtgggttatatctatcaatatttactctttcaggaattagtactgagaaatacttgaaacataagaatatataagcacacattccattagctgtgaaagtaatgatatcaaaacatgtaaactgaataacactattgtatgataataatgaaaatggaacaggcaaatattgtgatattattatgaaaatagttttgaccccgagtctttagatcctagatcccactttgagattcactgtctgatcttttttttaaaatagtagccagaattgtcatttaaaaatgaaagtctgatttttgtgccactcctttaccattgatcttagggtaaatccaaaataactacaatgacctatgacactacacaaaacctagtccttgcttacctcatcaatgttatgtagtactactttcccttgcagtttttagatttggccatgtttggtctgtcttctcatcatttctaaagcatgctatgtttcttcttaactcagaaccttcctgtcagcatcttttcccttttccttttatacccattctattatagctgcatatatgtttaacatatgtgattatatgttcattcacatgctctccaagtcctgtagaatatgagttccaggaaagcacactcatatatcttggctcactratgttctctcagtatgtaataagagtgtttggtcatcctaagggttgaataagtgaacatctacacatttactctgttttccccataatatgagaaatatttgctttgaaacattaagtatatataacatttagattggaacttggcaacttatgagttgctctagcattacttggttaggactcttccatggagaagacgtatggctagcagctaaagtttttgtgattaatgtttcttggaatttgcaacatgacaacttaagtttctctgcctcattgatttcctatatgaaaattgggaaattttagtaattttcagggtatagaaatatcagacgttttattttaacctggaaacatatacttttaagctactgtttcaatgctttttatattttttttattttgtaccccttactacctcctgaccctcaccccagtacttccctccctcccagcacccatgcgagtccctctatacttctrtacattaatttttcccyattttaattttctttagcgttatcgaactccttccagatccagatcaagggatcgtttcagacgtagtgagactcctccacattggaggcaagagatgcagagagctcaaagaatgagggtatcaagtggtgaaagatggatcaagggggataagtaagatttaactattattatttcaaatgtaatgataagtgtttgcttttactattatacataaagttattgtcattttagttattgctgaataccttaagaaaagtagaatatcattttagctaataatatctacagttcttttcctaataacatttccccaattctttttcttattttttaggagtgagttgaatgaaataaaagaaaatcagagaagtccagttagagtaaaagagagaaaaataacagatcacaggaatgtatctgagagtccaaacagaaaaaatgaaaaggagaagaaagttaaagaccataaatctaacagcaaagagagagacatcagaagaaattcagaaaaagawgacaagtataaaaacaaagtgaagaaaagggccaaatctaaaagtaggagtaagagcaaagagaaatcaaagagtaaagaaagagattcaaaacataatagaaatgaagaaaagaggatgaggtcaaggagtaaaggaagggatcatgaaaatgttaaagaaaaagaaaagcagtctgattctaaaggaaaagatcaggaaaggagtagaagtaaagagaagtctaaacagttagaatcaaagagtaatgagcatgatcacagtaaaagtaaggaaaaggatagacgcgcacaatccaggagtagagaatgtgatataactaaaggtaaacacagttataatagcagaacaagagaacgaagcagaagtagggacagaagcagaagagtgcgatcaagaacccatgacagagatcgcagcagaagcaaggagtaccatagatacagagaacaggaatacaggagaagaggacggtcacgaagccgagagagaagaacaccaccaggaagatcaagaagtaaagataggaggagaaggaggagagactcacggagctcagagagagaagaaagtsaaagcagaaacaaagacaaatacagaaaccaagagagtaagagctcacacagaaaagaaaattctgagagtgagaaaagaatgtactctaaaagtcgtgatcataatagctcaaataacagcagggaaaaaaaggctgatagagatcaaagtcccttctcaaaaataaaacaaagcagtcaggacratgaattaaagtcctccatgttgaaaaataaggaggatgagaagatcagatcctcagtggaaaaagaaaaccaaaaatcaaaaggtcaagaaaatgaccatgtacatgaaaaaaataaaaaatttgatcatgaatcaagccctggaacagatgaagacaaaagcggatgagtgagttatataaacttacttccattctgtttcggattttaagtttgagagacttgctaatgaatctcctttatgttgttttccttttcattgtttttggattgttttatgtttgtccttttttttcttaatgtggatttcattgagttgattttttgataatctgcaatctggataatttgtactgctaaagttttaataaactcgacatgagaaaaacactttggtgtagtactgtgtgctgtgtttaactattttatgtatgcattactgtgttgcaacaattagccaatagcatcctaatttgtttagtcagccatttggaatggttgcaatgcattgttgcaaaagcttgtgtttctcatgattaaagtaactttagaagccactagaagacatcttgtatagattttctgattgcgttataaatagaggtttgcagcggtttcttttaattacacagaagcagggtcctaataacctgagatcttaaatcatcacttttgattttatagtaatttgtgctttaaaatagatgtatttatattgcacttcatactctattctttatagttcgagccatagcttgtttcctattaatgcttttcctgtctagttgtgttttacttaactgcctataaaaatcgtaagagtaatttttttcagttgatgtactgattgagcttgagttgctgttatacagcatttgacaggaactataccttggaaaatcagattgtgattctcagttctgtgttgcttttggtttgaagagttttgggaacgttttaattattaattacccttctctaaactttaaaaaaaaaaaagcttttctcattaaaacataccatttgtgcaggtccttaagctatacagattctaaaaattgttagtattgagacattaacttctaagatttctcttttttggcctccaacctatatagaattgagtgttaactctgcatggattttgtttgttttaattgaactgacttctctaactctcatagctgtgagttccaaatggcaagaaaatgcatcttttctatatatgtatcacgataggctatagcatgtttatgactctggtttctttctcttcaggtggttttataccattactgttaatgttattttaacttggcatgtataacattgccatatagagtagagtagaaagttgcaaattttgatagtttacagagttaaacactaaacatatccaaagtccatttagagttttgggtgttgtattttgccatttttgtgatgtgtggccttttattctgtaatctcttctaaataaaacattgaacatccagcaaacataaaacctgcctcatttgaaaaggaatttcaaaattccaattaataggattctctagagagttttgtactttaatatttgtcagtgtagtgtcaactctgttaccaaggtagcttcttggtaaatccagtagctactcaatgctatttgtactgaataaagcaattattaacatgatacttcccactattgattaatgcaatattgatatatttggcgttgtggtagctgttgcagaatgaatagtgtaatgaccataagattgcttggaaaattgtaatacagatatccacaatgaattctttccaaaatttttttttccgatgataaaagtagtagatgtttattataaaatccaaggtgattgattccttagagactgaccacaaacccacattagggataattgagtctgagtgcccaagctatataacgttatgtagtttaagcaagttattgtttgtcttaatttcagttaactgcattttaaaattgttgttataaactatttgagctttaagaaaggtgctatttaagaaaggatttctaataacagttaaatatttttttaagtccatgctaagtaaaaattcttacatgttgtctgatcccagagctttatctactaaaaattatacataaggatttccaaatcttagagtttcaaaaagtaaccatagggaaaaaaattgtagtaatttctataggcaatattctgtttgggttatcaaaagagcaactccatgctccgcattatttatagtccttattttaaagttttattagctctctttacagaacagatgtgaaggagttgagaggacaatcaactagattttatttttagaatataaagaacatttttaaaatgattaaacagcattaactgtacctcaggatctgcgcatgcatctgaatagcacacggctcaaatggtcctttccttttgttacatttagtagttgtgccatctttagtttttgctttgaacattgttttcctaaaagtcaactattactttcccatcaagttggttttatagttatgtctaaatttatggttcatgtcaaagtatttttgacttaatatccttttaaaaatatttaaactgatttattgctcaattggtgatagctgagaaaattttttcaatatgtagaattttcatggttattttgtatgaattatttttctgggtaagccatctgccacagaaattgacactatggtgagattaatgttaatgaaatgagcagtagagaagctactggattgctttaaaacattctttgattaaattactacatagttggtaagttcatagttttaagttacttaattgaagccctcagaagttgcaaagaatttatctgataaatctgcctttgcacaaatgtgatactgatgcatggacggctttgcggaatgacctttgatatttgtgcctagtggaaggtatggagctaaacaattaaagaactcttcattatggataggcacatattggatctctggtattttgggtagtggtattaacttgacaattctaatttattttagttagtatatgtagcaagttagtatgtttgttagtagtttattgtacttcattccagttggtaatatagttttcatcacactaaactttttatactaaatttctgtagaagcttgttgggtttgccttcaccagaaggtactttaaatacctaccatagctgatttgttataaagaaacaaaatgggtgttcttctgtttccttttgattatgtttactgtaattatttcattttggatttatacatttacaaytgaataaggattataggttgataagctgtttattgtgaaaagatgtgttttgttacaaatacttgttttaaaaattaataagcccccaggaagtacagcattgactggcacaactgcccatagtgagcttcccaactaactgccttcagtggattcgggcaagtgcaaagtctttggcctattgtgtgacaaagaggtatatattaaaggaaaagaaaaatgacatgaataagaaaattccatcaacaaggttggagtagggagttgttgaggggtttagtttgttttaaaaggtatgtgagggagtggtggggtggatttgtgtttctgactttttttctttaagcaaattccatatgttaccaaaagcacatgctgtatattttcttccccttttgtgtgtatatagtattttgaaagataaatgaattgggtatttgtatgtgggatgtacaaaattgtggccgctctttgtggaaggaaaaaacataaatgaagttaatgcacttcttttcctagcccaaaagtcactgtgattatatttttttaatgaagtttagaaaaaaagctgttgtcttctcaattgtaaaattagtttcaaaatgctgcttctcttatcattagtctagtaattgttgaacttttctgcaaactgcattttacaaaattgaaacttggaagctgtattaacttttatagttaaacattgtattaaataaactatactataataaacagtttggttttgtattttttaaattgtattatccagccttttaaaaattaaaagctaaataatgaaaataaaccaattaaaacatacttttactctcagatatacagatatttacattatgaaaaaactgaacaaagttttaacaatactgagctttaagaatttagccagcagggaaaatttccaggtttgagaatgttctaatgtaaatatttaatcataatacttcagattgtagtgtgtcttttgcccagcaaactttcaaggttaagctcggaatttgtattactgtctactagatcactaccatttgcttcttaagtcctccgcatttttttcagcattaggatcactgtaatagatcctgtgcctataacagagtggtgaagtcatgtaaacataaatgttaattgaattctgtaaaacattacctagtttgggggctgttttttcttacattagacatgtagggaaaatgcacttagttgagagtgcgtcattgaaaatatatgcctagttatactgaatattgacaatgaaaggtatatacctaggtaaaaaccttctgaacattcagtagtttgtatgtgttaacacgtgaatattattaaactcccaaaatctggagtgttcttaaaagctttatccaagaaaatgtataaaatgcaagtgcaacaaatgaactgcaaactgtgcattaaaataacttcaggcatcaattcgctttttctatttacttcctaggtttctttcctaaacatatttccttacctgataactttgttatcataattttgtttcataatttttacatttccccactcccatcaaagtcctctcagtaatcagaatgccttgttccaatttatgtctttgccacagattttatctatgagtttctcttatcaaattagcagattagagtagttgcgtttccactgctgtgccattcagttcttttcattgaattattttgtgattaacattgtgtagccttacctttcttctcagtatactctagtagaaagcccagcccaatttaaagtaaaataaattgtatatataaggcagaaaaactagtaatgtctggtgttttatgttatccttcactcaaactaagttggttgtataacacttttatgtaattaaccgttacgtagaaacttatttcctgttttataatatgggggaagatagctgtctaaaattactaattaccactatatattgtatttatgtaatttaaaggaaaggatatatggcagaagttcccagactttcttggttcactttacctgtgtctcagtaattttaacatggtgttatccctgcgccagaataaatacctaacagatcggtttattaaaaggccaggagcacacctataatcccataactgggaggctgaggcaggaggattgcttgagtccaagagcttgaggctgcagtgagttgtgattgtgccactgcactccaacctgggccacagagtgagacccagtctctaataaaaaataaataaaaagttcacatagctaaagtatatctaacaacttagccatttgaaattttaaaaaatatttttacagttccattcttaaccacaattagttactaatggaatgtgtgcaaatgttggtcacagcacaacttctcaaacctcaaaatcagatcacacaccatcctctactataatacattgattttgtgcaatatatgagttttatcccatcagctgctgaaaattcagctttacaaacaggatatcatcaaaaggcacagtgcatttaatatgttgaactacctcaagctagtcttacagatgtcaggtaatttgtttcaaaaatttgtgagttcactgtggttcctcagtatgccttggcacacaatttggcaatcagtagatagtgttgttttaaataaccagctattttactcctttaaaacagttcattttttaaaacccgaggtccataaacccacaaacagtaactcagaatgatggttgcctacagaatctgccattttaaaaaagtacaacccaggtatactaagccacaatcttagatgtatgttagtcactgtgctgtgcagtctattagagggcattgtggaagtccttaaaactgtatgcacaattgtagagtatatgtgtatgtgtaccttactgctgaaaaagccactaagttttatcagattccaagaggctcatgacataagtaatgtttgctctaagatttggtctcttatagaatgatacactgaacaatttacacctttacccagcattcccctgtgtaggaatctatctcaaaggttaactgacaaaaatatgaaaaaaaaa

SEQ ID NO: 93199 - DNA, 25900 bp, Homo sapiens
tactatgcctacttggtatctactggtgtcaggtgttttgggtttgttttagagagaaggtctctctccgtcgcccaatccaggctgcagtacggtggcacaatcatagctaactgaagccttggattgctgggctcaagcaatcctcccacctcagcctccctagaattacagccacaagccactacacctgaatttttttttttttttttttttgagatggagtctggctacgttgcccaagcttgcctggaactcctggccttgagccatcctccatcctcctacctcagcttcccaaggcactgggattacagacataagccactgtgcctggccgtgatagttcttattagaaggctaagatgtttcaaatgctaacaaatatgtaagtaatttctgctgactttcctcctttcatcactggctacaaagtacatcccagaatattaagctcagataatgctagtgaaactttgataaaagaatggcttctgaatacaaagccatgcagaacttcataaaaaccctgaacaaaaaagcataaaaacaccccaattaaagaccacttttgttaataaatgtaaagctcaaatagtcatacctcataatttagccaaggataactgaacctatgaaatgtcagagttttattatattgtattgttttctttttatttttttattactgatcagattagtttctcttctgccagtgaaaaatccaaaagaaatctgaataatcaatgcaatattcagttccaaaacctgtttatggaaatctattagggcaattcattaatgtccagaaatacatttttccccaccatctagctataatggtttgcagaacaaattctgaagatcaaggttcctggtcaatgaaaagcagttgtctagagaaaataagacaggtttctagaccccgaaaagatgaaagactgacagcttggcattctgaagattggttatatcagcctgcaaacatcctctcattattttaatctcatactctataaaatacttttggatcctctgccagcaagataaaaacaaattaaaccaaagggccagcatgcacaaaatatcttattctggaagcaccactgctgacagcttccgaaaaaataaaataaagtggatccttcaaaaaaattttccaaatagcagacagtattaccaagaaagagtcaaaaactaaaaatggcataacagcaaatataggagtgtggttctcctcatggctcttataattcttttctcacaacattcttacaatttctatcacattctgtaagtatatagttatttgtctgttacactgcaagcttttctagggtaccatgtcttcttcatgtatacattcccctaattggtaaactggaccatgcatgtaatcagtggtcaaacttttcttaaaatgaatgaacagcatgttctctgaatatctgagaaattcccatactattcaaaattcctgaagggtgaaacaaaccttatctccagccaatctgaaattactctttcctatccacatctttctttttattactttgcttctcctgttccttccacctggaatgcctaaatcctatccatcattcatgatctcccctgctaaaagtaatctttaccagttctaaagatccatagcactttacctaaaccttcttatgtttcttaattatactataagcagctaattgtatcatatacatgactatctcttcttttaaggaaggataggtacacaactatatctgataaaatatttactaggcagctaccttaaaatctatagcttctgagaggcaaggcttctaattcaggattcccccacaccctattaatgggatatattctccttgcatttgagccaccctctgggagaacaaacagctcccaggcagctctgtgacctgctgtgtggactgcaagcactattcccacagaaggggtacaccygaggcctctctgctggtaggctttggctcttgtcctataatctcaagtgaagctaatgccaagtgtggccagtgacagtcctgtgaacccgaatgtttagttgaacctgaaatgaccctgtggtagatgtttcaagtaccatattatgggtattaatgaatttatacatatcaaatgtttaaacaatatctgggccagatgtsgtcgcttatgcctgtaatctcagcactttgggaggtggagatgggtggatcacttgaggtcaggagtttgagaccagtatggtcaattcggtgaaaccccagctctactaaaaatacaaaaaagtagctgggtgtggtggcacacacctgtaatcccagctcctcaagaggctgaggcaggaagactgcttgaacccaagaggtggaggttgcagtgagccaggatggcgccactgcactccagcctgggtgacagagtgagactccacctcaaaaaataaaaaataaaaaaacagtatctggtacataataagtcaataaatgttagctattatttcccatggtcagaaatttgcagagtaggaatataaatttagtcatggctgatttcagatactgtgcccctaactcttacattttgattcttttctacatagaatcaattccctattgatataatttggatatttgtcctcatccaagcctcatgttgaaatctaatccccagtgttggaggtggggcatagtaggagaagactggatcatgggggcgggtttctcattaaacccatgggtgctaaagcaccatcccctcggtgctgtcatcacaacagtgagttaattctcacaagatccggtcatttaaaagtgtgtgtggcacctgccccaacccccactctctctcactgctcctgctttgaccatgtgagatgcctgcttcctcttcaccttctactatgactcaaagcttcctgaggcctgcccaggaaccgaacaaatgccagcaccatactacctgtacagcctgcagagccatgagccaattaaacctcttttctttataaattacctagcctcaagtatttctttacagcaacacaagaaagtttttatatcagatgtgtactcaaaaaagtttttatatcagatgtgtactgcagtgcaaaattatgtgattttatacatgctcatgaatagcacatttataaggctgatctttaatttctgttctcaaacctattaatgccaggtataactgttattataattttatgaaaaaaggatgatgaactatgagtgcaaagagtttctcccttctgggataactaagtagaacattctgtaaagacttggagaaaaaaaagcaagtcactaaaaaatgttttgcccttgaagtgggtgtgagtgagaaaagtataaaagactagggaaagaaaacagatcatgatatcccattgcttcactatcctttagttcccaccccactttaaagacaccaaaactggaactcagagtaagcttgacctggagctctaatcagtagaaaacaaacatacagagacacacacacacacacactctagctctccttctcttttggccctacatcaaaagactagcatataaatgtaccaaaatcatttaagttaaaacaaaatgtttctctatctatctatctccccaccctccaccaatatatatatataatttttatgagttcaataagatggttttgcctgtgcttacattaaatagttgcagggaacataagaaatggcttataaagtaggagaactaatgtaaagagggtaaccaatgctaagggaaacagggtaaagaaagatacagagaagggactacttgagctgagcagacagacagtcctgggtaaaggcactggagatacaagaacaatgtggacaaaggcccagaggcccaagtagaatggctttttgagggaatgtcaacagaacaaggggttccaacagagaacagcagcaaaagagaccaaggaaataggtaaagtctgggtcctcaaaggctcataagacagaatatagaaggtaaactttgagagaaaatggagcaaataagaatctaagcagcaaaatataataactggacaaggatcttcaaaggtcattgtagcagcggcagtaagggtgatttggggatatggagaatgacagacttaaagcaaagaacttccaaagtccaagcaagaaatgagagagcctaggactaagtgagaagaggcaaaaatgagaacatgaaggcagaatcaacaagacttacccaccacgtccttagctatatgagtctagtgaagtgaaggaatacagagtaactggtttgttgctttagtggctctgtagatcacaaattattttcccagttaactttaaagaagaaaaagcaagactggcagaagaagtcaattcagattattttgagtttgaggagcctgtaggacagaaaacagaaatgctcaatcattagctgaatatgcgtaactggatttgaggagaaacgtctgatctgggttggagactggtgacctaatcctttatatttgaagccatgggagtggatgttattaatgagaaagttcagggaaggggagcaaagaaaaaggtcaagggcagaaccctgaatcacacccacttttcagaaacagtcaggcaggaaaacaacaagaggatactaacaaggaaaggtctgcaagatggaaacacatttaggccaatgggacctcagaagctgcaaggtcagaagggtttgtgaacccaaaattatctgagacaggtctcaatttagaaagtttattttcccaagcttaagaatgcgcccccaacatagcctcaggcagtcctgatgacatgtgcccaaggtggttgggatacagcttactctcacacattttagggagacataatacatcaatcaatacatgtaagattggttggatctggaaaggcagacaacgagaagcgggtgaggggtggcttccaggtcataggtagatttaaagattttctgattggcaactggttattatctaaagacctaaaatcaatagaaacgaatgtctgggttgcaataagaggttgtggataccaaatttgatcgtggagatgaagcctccaagaggtaaatttcagagaacagattgtaaatgtttcttatcagacttaaggtgtgtgttgatgttgatgctggctggcttttcctgaattccaaaaggaagaagggcataatgaggcatgttggaccccccttcccatcatggcctgaaccactttctcaggttaaccttggcagagaggaggggtcccttcagatggtttggaggattggaattttatttttggtttacagtttcaaggagaagcaggacaatcatgtcagagagcttcagtgaggttgaaaatgctccaccggattcagcagtcttgaggctatcagaatcctttggcagggcaggggtttggaggggtgagggtagagggatggagaggagggaaaaggacaggcaaaggggcacggatacctccatcagggagtgagcatgcccccacacaaattccttaaggcaccctgtgaggctatcgccttggcacaaaccctatcacatgtcagtcaacttcccggcaagccgcagacctttagaaaccttggtgtgcgtttccccgctcggtttagaacgcacccctgcctccactccacaaacgtgcagtgagccctcaaaaacctggacaaatgacctcacctcgaaagccccctctctgatgctcccaggaaaaactaaagcacctcactttgtttcgtccgtaccttacatggttttgtaattatctgtggtgcctctggctgaaatcaaaacgggagccagacccaaaaagtcaaggaagggaagcgccttccaggccackcctgagaagaaacgaactacaattcccatgaggcggtggggccacgggaccacaagtcccagcatccaccgcgcggcccaggactgtcagggtagtrggcgttgcgtgaggcgggtaaatgttcgcggaagcggcaaagacgacacggccttgtgggatggcggagtttaaggagaagcctgaggccccgactgagcagctggatgtcgcgtgcggccaggaaaacttgccggtgggcgcgtggcccccgggggccgcgccggcgcccttccaggtaggggcggggccaggcggcgcgggaggcgggcgcgcggctcccccacgtggtctcctcaagccgcctcgctgggacggcctcccagtcgcgaccttttgtcttctcttacagcgcacccgttggtgcgcgggaataggtgtgcatgccccggcctgggcctttttctgttgacccacggcatcaccttagcaagggtgttgtccttttcagtccattccctgaagcgcagaaccggaggccttgtgagaacctggctttttgtccagtcctgtcctcagaactcaaggaggcatcacggggggagtcatttacctccctggtctcaggtgtctctcacaggtaggataagccgtggggcctattaatggatcgcagccggtgtcgtgcataaaaacagcccctcgagtcagccttagctgtggtctccctcacgctgtgggctcttgggcgagtgtaaattagctgtggctcagccttagagtcttccagcgtacagtggaacagtacctctcttccggagtgctttgaaaatggcaaggaaaatacactttccggtttgctgtaagaactcagtaaatgtttgcttctattaactacctcaaagccctttctactctcctttttctttttgagactgagtctcgctctgtcgcccaggctggagtgcactggcgcgatctcggcccaccgcaacctccacctcccgggttcaagcgattctcctgcctcagcctcccgagtagctgggattacaggcatgggccaccacgcccggctaatttttgtatttttagtagagacagggtttctccatgttggtcaggctggtctcgaactcccaacctcaggtgatccgcccgcctcggcctcccaaaatgctgggattacaggcatgagccacgctcccagcctctactgactttcttatccctccgaccttggcctgagcgttacccaaggaataaggaatgaccaaagattttgaagtggaaagagcgctggacgtggaagttggagagtatggttcggagcttagacatcttagctacttcccagagcctgagtttcttcatctgcaaaatgaaaataataatttaaaaatgcatagcccctttaacatccattatcaacaatgaaccctatctgccctttctttttcctaggggtttttgtgaggatcagataagataagagattcaatagcagctttcaaagatgtcaaggaaaagaatcaaactctaaaatatttgaagagatttattctgagccaaatatgagtgaccatggcctgtgacacagccctcaggagatgctgagaacatgtgtcccaggtggttagggcacagcctggttttatacatgtttgggagagaggagacgtcaatcaaatacatttaacatgtacatgggtttggttcagaaggcggggcaactcaaagtggtggggggggcttccagactataggtagattttaatttttctggttaacaatttttctggttaacaattggttgagtttgtctgaagacctgggatcaatagaaatgtttaggttaagataaagggkttttttttgagacggagcttgactccatcacccaggctagagtgtggtggtgcgatcagctcactgcaacctccgcctcccaggttcaagcgattcttccacctcagcttcccgagtagctggaattacaggcgcctacaaccaygcccagctgatttttgtatttttagtagagacagggttttaccatgttgcccaggctggtctcaaactcctgacctcaagtgatccacccacctgggcctcccaaagtgctgggattacagacgtgagccaccgcacccggccatgtagagacccaagttttaattgtggggaggagactcccagctgacttcagagggagcaggttgtaaaatgtttcttatctaacttaaaaaggtgcctcggtcttagttgattatctccttgttgtggaaagaaagaaaaagagggggaaaggggattctctatagaatgtggatttttcccacaagagacaaccctccagggcaatttcaagatatggcaaggaaatatatttggggttaaaatattttgatttcttcccttatttgttatttgatgttatgccagagtcaggtagaaagcagaccatgctatatagggttaaaattaaaactcctctgatgagactttatggtttgtaaggcatgactccccaggtgccttgggtaggaatttgggcaagataagaaaaaatcagagtttagtcctcaaagagtagaataagatattaatgtcagaaattattattgttccccagactacctttggcaatttatagttaataatacagttagctggcccaatattaaacagtggtccctgaaaacttaggactaagcattgctgagttcctggtcaaaaacactgatttaaaaaaccactgttctagtccattcttaattcaacaaatatttattgagagctaaatatatgcaaggtggtgggttgggctgcaaagaatacaacaaacagaaaaacgcactctaccctcaaggtgtttacaactgtcacgattagcttcaatattcctgccgtgcgtgtgtgtgtgcgtttgagactattctataaatctgtttccaatcttgagtcatatttttctttgccatatccaagaacaatctgtaaaactatgtgcccgacgtatttttttaattaactcactttaagcgttaaattatttaaaaataaattatataagtatctcccttagaatcattgtaatcattaatgtccataaaatcatgaggttttctatttctcaaagtgtatattaaaataaatacgtctatttttaaaaggggagaaaggagtgacaagaggaagctttgtgattgattgttacatctacagttggtgggcataaatgaaaattgggagattaaaacccagtcccacagtgttctaactatctctgtatatgcacagctcccaataaagttagagttacaaaaataagacaggatgccttcctaagagagcttattgtctttcttaccaagaagatcaaacatgcttgaaacatttaagtgacaagcctaaaagtgcattcaactcgttttcttccatgtattcatggaacacaaaaccagtcttataaaaggtcaaaacagcttgcttgctccaaaccctgccttcacaggcatatgcacacataagaattaaggcatgaaaaactttcaagataaaaataactttgtgtctgttttgcctttggctactgtgtgaaaaggcaaaaagaaattcaaatgttcatattggaaacaagcatatcataatgtcatcagtgttgaaagccaagtmgaaaataaactaattgattttattgagctaacagttggatctaaccatttttcaggtctctgaaaccagcttcaaacattatttttagatctcaacaggccttgacaagaattatctggctcacagtcttctaatagctgcttggaggaaaaacaaacttatgaggctagaggccaagtacaaagattcttgtagctggggtttcaacacaaccaaaaaaggaatgaagattttcacaacacttctttataattcagaggcccaggttttaagcctagaatgttacagtatcatacttcagtttctgggtcttcagtacggaatgtgattcagaaaagtcaaacttctcgttaacaagtatcaagagctgcaatctggcaatcgaaaaatgcttcttgagcacctgctgtgtgccttgtcctatggataggaaccccacccccatcaccatgccacactcgaaacctcataaccatgcttttccctgagacacgtatctgttagaaaggtaagacctacacatttaacacaattagagagccctacaatctgtgtcatttagaccctgaagttcatgctattaacagtaaatgtaagtctagttcagagaagaaagaaattgttgcagacaggaatagccaagacaagagtgtattttctcttaagttttctgtcaaaaaacttgaaatcttcacccagtgcttcaaggatctgatttccagtatatcattttgccgtgattgttttgcatttattcctagctcttgcatgagtaattctgtgctttgatacatacgaagaaaaagtaaaacttacattgtaacaatgcaggaaatttaaaaaatcccagccaggcatggtggctcactcccataatcccaacccttttggaggccaaggcgggagaatcacttgaagtcaggagtttaagaccacccttaacaaagggcaacaaagtgagaccccatctctacaaaaacattttattttaaattaaccagacatggtggtgcatgcctgtagtcccacctacttgggaggctgaccttgagcccagcagttggagcctgcagtgagctatgatcatgccattgcactccagactgggcagcaacgtcttaaaaaaaaaaaatcccattctccgtgtcctttatacttttctgactgtttctaaatcccagtatgtgcatattgcagacagtaaggtaatacttgataactgaaagaagtctagtctggatcagctcttagcttttctccactcaaatggagaagtaatggaggaaaggtatacagtccgatggcttcstagacacaattttggtttgaatatgtttgaacctggaaagtttaactccagaacttattttcttcactaccctactatgcactacctgcaaaatttttattgaacacgtacatgctaatccctagagtaagctttttaagccagttctgtcatgttttctttcacagaaacctatgaaataaataagatgtttagtaatgtaaagtaatttgccagaaacatatgttgttttaaatataacatctaaaagtaatatctagaagaattgaaagaagccaatatttttataaagtgcctgacatggagtacagcattatttcattaaaatttcatgatagccaccccaaatgtgggtattatccttgtcttatagctactaatctgaagcctagccagtcacttgtccagaatcacaatgctaataagagcctggctgtggtttgtgtctcctttagagcattccatgttctgcactaggaagctctccactgcttcctcacagttcaagaccatagtcacagagttttcctgcctggtctgcacactttgctctagtctaacctcctaattgaagacatctttgttcattgaccatttacgcctttgacttgtctatgaaaagagtcaaactctgcaaaatatttgaagagatttattctgagccaaatatgagtgagcatggaccatgacacagccatcaggagatcctgagaacatgtatccgaagtggttgggatatggcttagttttatacattttagggagacatgagacaacagtcaaatacatgtaaaacgtacattggttcagtccagaaagacaggacagttggaagcrgaggcttccagtttctgattaacagtttgcttgaaggaattgttattgtctaaaaacttaggaatgccttgggtaagataaagggttgtggagaccaggggtttattatcatgcaggtgaagcctccaggtagcaggcttcagagagaatagattgtaaatgttttttatcagacttaaagagtctgttctatcagtaattccaaaagggaagagggtataatgaggcatgtctgacccctgcccccttcccatcatgacctgaactagtttttcaggttagctttggaatgcccttgctgagaggaggggtcccttcagatgatcaggggatttagaattttatttttggttaacagagtacattttctagccatttcctgaaaccattctcagcttctacccagggtgtatcagtcaggactcatttgtttgcaagaaacataacacaaastggctccaacaaaaaagggaaggaattgcctcaaatcagaaaagtccaagtggtaactataggcatgtctggacccagtaattctaaaagtattgtcagatacttcttcccaccaccttcccccttcacacccctgcttcccatttctgtggtaggctacacactcagtaggcctcatctacgtggcagaacttggaaatgccaggcaaacactacagttgaataattctagtagaaagagaatgcttcttccctaattgtttcagcagaagtctggcttaggtcatatcagctgactcccagtttgtaacccactttacattagctttcagatacaattatacttcagatacagttattatttaactatggggaaacagtctgagaaatgcatcattagacaatttcgtcattatgcaaaagtcatagagtgcacagtacttacagaaacctagatggtatagcctactacacacttaggcaatatgataatgccctatcactcctaggctacaaacctgcacagaatgttgctacactgaatactgtagatacttgtaaygcagtggtgtttgtgtatctaaacatagaaaacatacagcaaaaatactgtattctaatcttacaggactaccattgtatatgcatatatgtggtctgaccaaaaagtcattatgcagcacatgactactcgaagtttaaccgcgtggcatgtaaatatttgaatagaatgttaggacaatgacctcacattatttctgaaaataataaatagcttttcaatatgtaaatacctgaaaagatgggtaattacataatcagatgttaaattagactaaaagttttcaaaagattattcttgagtgtagtcattttttaagtcattatcatctgaaatgatattttattgaccttttatggaggagaaatggaaacatgaagacaaaatgactcaaagcaattattggtatcaggatcagtgattatatccatcacggggaaaaaatttatttaaacaggaaattttcccagaagtctctgttttcttttggaagatatctgcagttcattcggaattagctactgtctataagtccctgaaggattatagcttgtgcagcaagtttaattgcagaattttaaaaaatatatcatgagattcttcaaaatctttttaaatttgtaagtaaaaataacgaaataaaactgtttttcacctgctttcctgattagaaaactgcagttgattttaaaagaagttatccatgtcaaaaaaaaaactttagcgtttagtgatttatatagtaccttaaaaatatgtgcacctttaatgacaaatcaacttaaaagtttaacatgaaaagtttaacaaagagatcttcattttacaagtactttttaaaatgtctcagtaaccatttacatttgaacactgaacctttaaaaagctgaaagtagattctctataaaacagcagtcgttgagtttgactgatagagcatcattttctaacctatcctttatccatttaggatattcctgctaagctaaagctgtaagaaacaacacaaacaaaagctatttcctctctccacccccaaatgactttttaagcagaatgttagcctwctcccacaggtcctcccactggttgtcctcctcatctttcacaagaggatgtcaatcctccccagctcagagttttttttagtgtagggttttgcacttaactacatagctccacccgaggcctccacagggagtataactatctgctgttcaatacctttcyaaagcctggcctggagacaaaataataatggaggattgactggaagacgtggtgcaaacattccttcaggtgctttaaaatctatccccaatgaaaggccgtgcaactggttccttgcagaactgctcttacccgactgtgctgttgtgggatcccagcagcctttactggggaccagaataaaaaacagcccatgaaactgcttcctggaaaagaatggtttagaagaacacattggtggaattccttcctggtatcagtactgaaaaaagtcaatgccacttctgaacaatgagattattccttacaggcagggcaagctatgtatctaatcatatatccttctctgaattggcagctctcaggcagagccaaatatccagtctacttctaccacatactgtgtgtctaagctcactagacctgtttgttctatttccctttcaccttactctccttacttgttcatttatcttacctgtttataagtctcattaaatccttttaggaataaagcaggtataaaatggtttgagttctatgtaagcaagaattactatatacataaaaaaatctgctgggttcatgagagatactttaatctgaaatcagtttgaaaatatgcttcacgatgctaatgaggatctaaccagagatcaggcttcacatagagtttagattgaggattgtcttctttttatataacattttacaaatgtaatgttttgaaaatacaggtacatttaaatgacagatttttttcatattcctttcttatttaattagaatttctttacaagtgtatatctttaataaatttaaatatctagtaatatctatttaagaaatagcatttttggaattctgtgtgcaattgacttgtcatctatgactttcttatccccaaccagtatctgaggtaacccacaattaaaatacatatatgcatgtatattatcaggtaaaggtaaaagagatcaaaagctaaggataaaatgcttaactgtactcagacactaaattcagcactgagttttctgacatccaaagataagagggaaacaaaagaagttacaaagctttctatttctgataagagaaaaaaatagtatttttcttattgtccttatacatacataataatacatatatatgtccttatgtgtacctatatataacatactattatatacattaagtattataatgcccaactcatccttatacatacctaaaataaaaccacaaattctaaaaattaatcttagctggacatggtgkttcccacttgtagctgtagcagctaaggaagctgaggcaggagaatcgcttgagcccaggttacagtgaactgtgatcacagcactgcactccagcctgtgcaacagagcaagaccctgtctcttaaaaaaaaaaaaaaaaaacttgttttattgaagagagatgtttttggacaatatcttagtatgctgtgttttgacagttttgtcctgtttttatatatgttagaattagaatgggtcccagtcagaagctacttggaatatataggaaatatatgacatgccgtgctgacttacagtgtgtatattttttrcagtacactcctgatcatgtagttggacctggagcagacattgatcccactcaaataacctttcccggatgcatttgtgtcaaaactccctgcctccctggcacttgctcctgtctccrccatggagagaactatgatgataactcatgccttagagatataggatctggaggaaagtatgcagagcctgtttttgaatgcaatgtcctgtgccgatgcagtgaccactgcagaaacagagtggtccagaaaggtctacagttccacttccaagtgttcaagacgcataaaaaaggctggggacttcgtaccttggaatttataccgaaaggaaggtttgtctgtgaatatgctggtgaggttttaggattctctgaagttcagagaagaattcacttacaaacaaaatccgactccaattacattatagccatcagggaacatgtttataatgggcaggtaatggaaacatttgttgaccctacttatataggaaatattggaagattccttaatcattcttgtgagccaaaccttttgatgattcctgtccgaattgmctcaatggtacctaagttggcactttttgcagccaaagatattgtgccagaagaagaactctcttatgattattcaggaagatatcttaatctaacagtcagtgaagacaaagaaaggctagatcatgggaaactaaggaaaccttgttactgtggtgccaaatcatgtactgctttcctgccttttgacagttctctgtactgccccgtagaaaagtcgaacatcagttgtggaaatgagaaggaacccagcatgtgtggctcagccccttctgtgttcccctcctgcaagcgattgacccttgaggtgagtctgttcagtgataagcagcttgcccctccctrtagtggaagacagtggttggctagctttacctctgsctagttacataagtttaactcrggaatgtggcagagactgcaagttgtccatcagtatcctttcccctttctgtaatagaattctccatttaacaaaagtacatgactacccagaatactcactttcctagttagatttgtcttagtgactgttctagttaataggatataagcaaaaatgacaagtccttaaatggagatatcctgcccttcacctcctctttcttcctgctggctggaatgtatacatgatgactggaactggagcagtcatcctagaccccaggatgaccctgggaaaggaagccattgcatagaaaaatcaacaaggttaaaaggagtctaggtgtctggtactgtagaacatcctgtcagtcgtgatctgacacctttgtactttcaggtgagaaatagtctctcccttgcttaagtcactgttattgtaagttttctagcactaacatcgaacctaataatgatccaagaaacccttgtggctgcatacctaaaccctgcttgccaaccaattttaacagtaataaagctgactttttgatttctgtctgactcctgcgtcctacttaattgtttctaagcatggatcaaggaaaaaggcattattaactatcacctgctaaaaccctaataagtactaccagtagtgaaaaatataactatgaaaatgacttacatgttgtaaccaaaagtcagaaaaagagacacattgtaaatttttcattttcattatatacttggctgtactccaaatcttgtgaagttatgcttcaaaacttcaaacagcctcacttcatgtataaataacagaaaaataaccctgtccacaccacagaaggagacgggagttttatgatcccgtttaaacttctagagcagcaaacatctctaactaccttccttaaagcagggatgttgcaaaaatacagttactgtggaggtttatcagacattttgaaagctaaaataattactagagcccctatgatattattaagtaatttaatttcttctctagtacatttaaaccctaccactaggaggccctgcactttcaacattataggaatccatgttatatataacactattcctctgtaatataagtacattgtacactttaaatgagtgaaatatacagcgtgtgaattatatctcaataaagctaggtcgtttttaagtatcttagggtttataatgttcatataacattacatggaatggttccctgtgaacaaatggtactagagtacacataaaatgccccaaattacaaatacatagtatcaaaaattttcctccaaattaatcatttctccatgccaactgtcctctattacttcaatgcctctgaagcagtcctgcttttaataaggcagcttgtatccctcactccaaaatgtgctttttcttgctcacaagctcacctaataactgagctgcttcagacgcaatatggaagtggttagaaggaaaatgattggctcaccatttgattctgcagatacccttttctatgtccttttgcctttctatattgaacagcagagatattcccagaggacartcttccattcagagacaaggacacaaacagccccctccaactcagtgcctctgccagagacaactgactgaatatggacccctggaaattttttgtcctcaggcactagtttattatatagcacttaatcctagaaaccagattcctaaggtaagagtcaaagagtctttattccaagtcttttctaagcagcaagttaactgcatttgtttgcttcattgccatatttttgagaatgttgacacttcttttgagagaaaacatttaaaaatatacttccacttgactattatcccatgataaaataacatttttataaattataagattcaaattttaaaagatggggctgggtgcagtggctcacacctgtaatcccagcactttgggaggctgaggcaggcagaacacttgagcttgggagtttgagaccaccctggccaacatggtgaaaccccatctctactaaaaatacaaaaattagttagatgtggtggcacatgtctgtagtcccagctactcaggaggctgaggtacgagaatcacttgagcccaggaggcagaggttgcagtgagccaagactgtaccactgcactccagcttgggtgacagagcgagactctgtctcaaaaaaaaaaaaaaaaaaaaaagtaacagtttttgcattgttggaatttggtatttgatattggaatacattcttaaatgtggtcatgttatacaccattttaatgagcatttctttatgtttttttgctaatgacatcttacttgctgtttatgtttattttagactatgaaaatgatgttagacaaaaagcaaattcgagcaattttcttattcgagttcaaaatgggtcgtaaagcagcagaaacaactcgcaacatcaacaatgcatttggcccaggaactgctaacgaacgtacagtgcagtggtggttcaagaagttttgcaaaggagatgagagccttgaagatgaggagcgtagtggccggccatcagaagttgacaacgaccagttgagagcaatcatcgaagctgatccccttacaactacacgagaagttgctgaagaactcaatgtcaaccattctacggtcgttcgrcatttgaagcaaattggaaaggtgaaaaagctcgataagtgggtgcctcatgagctgactgaaaatcaaaaaaatcgtcgttttgaagtgtcatcttctcttattctacgcaaccacaacgaaccatttctcgatcggattgtgacgtgtgatgaaaagtggattttatatgacaaccggcgacgatcagctcagtggttggatcaagaagaagctccaaagcacttcccaaagccaatcttgcacccaaaaaaggtcatggtcactatttggtggtctgctgctggtctgatccactacagctttctgaatcccggtgaaaccattacatctgagaagtatgctcaggaaatcgatgagatgaaccaaaaactgcaacgcctgcagctggcattggtcaacagaaagggcccaattcttctccacgacaatgcccgaccgcatgttgcacaacccacacttcaaaagttgaatgaattgggctatgaagttttgcctcatccaccgtattcacctgacctcttgccaaccaactaccacgtctttaagcatctcaacaactttttgcagggaaaacgcttccacaaccagcaggatgcaraaaatgctttccaagagttcgtcgaatcccaaagcacggatttttacgctacaggaataaaccaacttatttctcgttggcaaaaatgtgttgattgtaatggttcctattttgattaataaaaatgcgttgagcctagttataatgatttaaaattcacagtccaaaaccgcagttagttttgcaccaacccaatatcttcatagattgaaatataaattaaaattgcatttgaagtagattccacggactttattaagaatgtagaaatgtggcctggcatggtggcttacaactgtaatcccagcactttgggaggcccaggcgggcagatcacttgagtccaattgttcaggaccagcctgggcaacatagtgagaccctgactctaataaaataattttttaaaaaaagattaaaacatgtaccttgaaaagcattttggcccaagaataataacgatcacacttgaagaacaaagcttttctttaaaaaaattttcctttaattttcaaattactattcacaaaatagcagtggctgttagattttgttcttggccaaatggaaaattttgccctaattaaaatgtagtcactctccagtgtgttaccattgaacaaatcactgaacctttccaagtcaaagtttccttagttgggaagattgagttaacacatgcaaaggggttagagcaatgcctgagtatatagaaagtattcaataaatgtaaattattagtcttgagaactgtctgtaggatgtgacccaaagttctcccttctattcaggtgtaattaggatataatgtccttcaaatggcagacttaaagggggaaaaagtcactaagaggtgaccagaagggttagagctgagcaagagaggttcctgccctgagccctgcattttagagtgcctaaggttacatacatacacacacacacgagttaaagaagacatggataccataaccagacacatgagttaaagaagacatggataccataaccaaagacattactaggaaagaaaactaataccaatatcccttttgaatacagaggcaaaaaaaaaaagtactagcaaatgaaatccagcaagatatcaaaagaattatacactgtgatcaattgggatttatcccaggaaagcaagattggtttaacatacgaaaatcagtaaatccagtatattaatgggataattcacaaaagataaatacataatcatttccatagacacaaagcatttgacaacctccagtagcctttcatgataaaagcagtgaacagactagaagtaaacaggaacttcttcaacctgagaaaggatatctatgaagacccacagctaacatcatacataatgatgaaagactgaaagctcttatcctaagatatggaacaagaaaatgatctccaagctcaccacttctattcagcattgtactggaggttctagccaggacaattaggcaggtaagaacttaaaactcagggccgggttcagtggctcatgcctgtaatcccagcactttgggaggccaaagcagacagatcacctgaggtcaggagttcaagaccagcctggccaatatggcaaaaccctgtccatactaaaactacaaaaataagctgggcatagtggcacacacctgtaatcccagctactcctgaggctgaggcaggagaatcatttgaacctggggtggaggttacagcgagctgagattacaccactgcactccagtccaggtgacagagtgagactgcctctcaaaaaaacacaaaaaaagccgtaaaaataataagacaaatgacccaatttaaacatgggcaaaaggtctgaatagacatcaaaaataaacatgaatgtgaaaatgtgctcaacatcatttgtcatcagggaattgcaatttaaaactataagttatcccttagcacccactaggatggtagaaagcgaaaacactaaaaatgccaaaagatggcaaggatgtggagcaacaggaactcttcattgttcattgaaatgtgacatggtacagcctctttagaagacagtttggtgggctcttaaaagagctaggcatagccttagcattgatccagcaatcatgctcctgttaccaaaatgacagggggttcagtcctgctgctcaccacacagaatgtcaatcactgagacaatgaatgttgccatgaaagaagtatttcactgggtgctgcagccaaggagaatgggagataaagtctcaaatccctgaccaactacaactggggaggcttacatagtgagggaaggaattaaggggggtaaagaagcaattatgatgaatgagggggtctggcatcttatttcgatgtggtgatctggtgagtttaagtcccttgcctgaggatcagttccctgagggaggaactcagatgagacaaatgtaaatttcaagttttaagacctgaagggtcaatttccatgtgtgttccaaaacttttaaatgtcatttctatgggacagttggaacagtttcacttytaggtatttactgatttgaaaacttgtccacataaaaacagcacacacgtgttcataacaaggttataattggttaaaacttgaagcaacacacatttcttcaataagtgaatggataaacaaactggtacatccatatgatggaatactattcaacaataaagaaatgagctatcgagccacagaaagtcctgtatgaaccttaaatgcatactgttaagtgagagaagtcattctgaacaggctgcatactatatgagtccaactatatgacactctggaaaagacaaaacaatagagaataaaaatgtcagtggttgccagagtttgaggagagggaggaatgaataggtgaagcacaggagttttttagggcaatgaaacaattctgtatgatactgtgatggtgtatacatgacattgtgtatttgtgaaaacatatagaactttactgcacaaagggtcaaaattttatgtaaacaattttaatcatttaagaagtcagggaatcacaggaatgcagactgtgacaagagaacataactattagtacaaatgtaggaaacaaactcaaaagagtaggggtgaaaggtgctgatctaagtaactttggaaattactgaagtttgtaagactaaaggcaaaaggaactgcaagtaagcagttcctagttgatacaagttgtttcccatgggggttatagggaagcttaaacattccctctggaggtttgataattaagtctgctgaaatgaactgacaataaacagattaagaagagaaagaccattttaattacatacatgcaaatggaagcctcagaaaaatatgagactcaaaggaggaggcagatggttgaaggtttcatagcataaaatgaataggggcttgaaggggaggtgatgacagttatgagaggaaaaggagaggaactgcatggtgaacaaagattgtcttatgtaaataaagtctctcaggtcataaaagttgtttaggagttttttattgctgctgaagaataggcaatagcctgttttggtgtggtgacaacttttaatctcctctggtgataaatctttcctggttgtttgatgaaattcctagggaggagtctcaacacaaatgtattccttttggaagaacttccctcagtcagagaagggaacttcaggagagcccctccctgcacttatgggagtagggtgagaaacaagagaaagccagacaggcctccatgggggcagcttctaaggcctttcaatttcctttaattctaagtgctcagcatgttaaaggaccatacgttggggtatcattttctgagccttaacaggatataattctgatattaacaactctgctattgccttacatgtatactggaattaaacaaattgatggcagatcgtgggagccaggtttctcactgttggattgggaatttacatttaagcaaaggaaggatgatccatgtggtaatggatcaattggagacatcagcatgaactcacatttagcttagtatagatacagaaggttacatatagaaatatttctagattacagttagtatattacagttagtatgcacacatatatttcctttctttgtcagctcagacagcctagaagcaatgatgctccagtagcaaggagcacatttagcacccagatcttgatttttataccattctccaacaacaaaaaaacagggttctttggagaaatggctaattctgctactaaagaaggaaatcaacaagctgagactggagcatcttgtagtgccagaaagtaaggaaatgctaaaaaaaaaaaaaaaaaaaaaaagaaaaagaaagaaacctacattgatgggggtgtcaaaggagtatagaaacaaattgtaaaagctcccagtgaccaaatctggaataatttgagcaagataataaataaagtagtactggattataaaacaaaatataaaaatctgagtccatactgatataaataaatgattgaatcaataaataaatggggtaaagacaaatctaactttgcataagaattctaaataacttatgtagctatttctgcccacgaaaagggggaccataaattcctactcctttagtgtaagctatacatagtgacttcctcccaaagagtgtagaatggaaagttgagggtggaggaaagggaggggagcagagtaactttactctggggaaacttgacaaatgacctcagctaggtgatcaaggtcaatatgaacagtcataaatcatgttggtagtatatgccattgacaggatgtgataaagatggtacattaactctgtggtcttgctccccaaacccataacccaagactaatcatgaggaaaagaatcagataaatttaaatacagggtcatctacaaaatacttgaacattattcctcaaggtcttggaaaacaagaaaagtctaagaaattgtcacaaccaagaggagtcaaagaagacatgatatgtaactgtaatgtggtgtcctggatgagatactagaaccaaaacagacaggtaaaactaaaaatctgaatcaactatggtctttagttaatgatgtatcaatattggttcttaattgtaacaaatgtatcataatgtaatgatatgtataatatcataggtatgtatcaatacataataatatatattgatatgtataataatgtaatataaatgtaccataactaatgttagtaataggggaaactggctatgggatatataggacctttctgtattatcttctcaatttttatgaaaatctaaaactattccatgaaagtctacggtaaatgaaaatgtgccaatgccagaaatggtggtgcatgcctgcatgccttcagtccaagctacttaggggtctgaagcaggaggatcccttgaccctaggagctcaaggctgcagtgagctatgatcctaccactgcacttcagcctgggtgaaagagggagacctgcctataaaaaaaaaaaaagaaagaaaaaagacagacaattataagcattgacaaggatgtggagaaagtggaagcctcatatattggttggttggttgcaaaattgtgcaactactctaaagcagtttggcagtttctcaaagctcacatacaattaccacatgtcccagtaactcccctggcatggatccaatagaattgaaaacatgtctacaaaaagtgtatgcacatccagcctggatgacacagcaagatgctgtcttaaaaaaaagtatgcacaaatgttcatatagcattattcataacaacaaaaaagtggacacaacccaaatattcattagccgatgaatgaataaacaaaatatagtatccatacagtgaaatattatttagccataaaagtatgcacaaatattcatataacgttattcataatagcaaaaaaaagtaggcacaacccaaatatccattagctgatggatgaataaacaacatgtagtatccatgcaatggaatattgtttggtcataatattatttggccattccataaaaaggaatgaaataccaaaaaatgcccttgatatggatgacccttgaaaacattatgttaagtga

SEQ ID NO: 93200 - DNA, 59410 bp, Homo sapiens
gtccttcttcccccacacctcattttcaaataggagcaagataaatcgtgtcatgcgataaggggataagggaggagagcatggaagagagcacatccaggtagggaaataacacgtgaccctcttcagaagtgggaggaagtggtacggtccttcttgtcccaaagattctccagatctactctccctggatcaggccacaaacaggggagactcctgaaaacgctgctgctctccataagtcccaggaagccacaagaccccaaattgaacccatcaatatgtaagctggggtggaaaattgctacccgggagtatcaaaccacagccatgaccaggatgaatttggacccacagccacatcctgagaaccagctatagttggaggctcagagcaatcttctcactaacctcacaattacacaaccccacatcttaccatttgtgttttggaacacgacattatggaagggtcttactacaccaaactcagcagaactgacaaaacctaaaaattaaagacatatcattaagagagcaataacttctagactatattacattcattaaacatcagctcaagatactggaaagtaaaacatgtaatggctaaaatttgttaatctaatgaaagatggacacagcagaagcttttgtcagtgacccaagaaattaagctgagacagcttctcattaactcgccaaaagttaaagagataaacagaacattatgaaattgggagggtatttctaaaaatgaagcaaagcaagtagtcaaatcaatgatagaaaaaaaaaagtgtccccacatctgaagatctgattttttggattgcagggccatttagtcctgaggaagaagaataatgtaagatacaactgtggcagacactgctagttgtccacggaaatctgtccctgccttcttcccagacataggctagcctgcactcccatctcccttgtctctaggtgtgaaatgggagcccagctcctctgtgcaacttctgcctcacctgcttaacaggaaatccctggtgtggggctttagacatcccccccaccccaccaccacacacacatacaccagcagtcagaattgtgtgtctctcttctttcttttttttctttttgagacagtcttggtctgtcgaccaggctagagtgcagtggtgcaatctcggctcactgcaacctctgcctcccaagatcaagggattctcctgcctcagcctcctgagtagctgggattataggcatgcaccaccatgcccagctaattgttttgtatttttagtagagacagggtttcaccgtgttagtcaggctggtctcaaactcctgaccttgtgatccgcctgccttggcctcccaaagtgctgggattacaggcacgagccaccatctcttctttccactcctgatcaatcttgacaaaatataaaaccaaaccaagacaaatcaactttgtaaaataaagataaagttggaggtctcacactttctgatttcaaaacttactatgatgtggcgttggaataaagacaaacatatagaccaatggaacagaatagagagcccaaaaataaaccctcaacatatatggttaaatgatttcaacaagggtgccaagatcattcagtgggaaaaggacagtctcttccacagatggtggatctccacatgcagaagaatgtagctggacccataccttacaccaaatgtttgttgtgagtttatttacttttttgtgtgtgtggagacagggtcgtgctatgttgtccaggctgatctagaactccttacctagagacactgccaaggtaagtgagggccaagtggacactgagtgattctgtgcctcactgagcaaaaataactaaacatgggcgaaggagagcccaatgatcccagggacaaaatgtcatcacgggcattctgcgcacgcttgccaggatacaggagaagcaaccagacacttcattcatcttctcagaatgttcattaacatgttcagaaaggtggaaaaccttacttgctaaagagaaggaaattggaggcatggccaaaagtattcaaggccctttatgaaaaagaaatgaaaactgatatccctcctaaaagagaagtaaaacagaaattcagagattctaatgcacccgaaaggcctcctttgggctttcactttgtgttctgagtactgccctcaaatcaaaggagatcccggtctgtccactggcagtgatgccaagaacctgggagggacatgagtgaccatgctgcagatggcaagcagcccaaaaagaaggcttctcaactgaaggaaaagtaccaagagcagaatgctgcatatccagccaaaggaaagctgatgtggcaaaaatgatgctgtcaaggccgaaaaaggcaagaaaaaaaaacaaagcggagaaagacagagaaggtaaggaaaataaaaaatgaagtcgatgataatgacaaataaggtggttctatggcagcttttttttttttctcttgtctataaagcatttaacctacctggacacagctcattccttttaaagaaaaaaattgaaatgtaaagccacctaagatttatttgtaaactgcatgatggcgttctttttctgtttttgtattattaacaagaattatcaagtaattcttcagacaaccctgtcctggtggtattttgtatagccaccaactttgcctggtatactataggggttataaatcagcatgggaatttcaaatttaaggcacagtataagttagttatatacaaatgtgaagtaacattattaattaaactgttggcctgtgcgaagggagggccaactgtgggattcagtcattcattcaacaaatattggtgagtgcctgacactgttccaggcactgaggctattgcaacaaaacagacacaagctcctgccctcatggagcttacattctggtgagggatacagagccaccaaaaaggatggcagctgggccatgagaaaggatcaaagtcaggaagttagaattcggggatggattgaacatgggacaaaagagaagagtcaagttgactacaaagcatttggcctaagtaatgcaaagaatggtgggccatttcctgagatgggaagcactagggtagttttggacataaatggagatgcatataagccatccaaactgaaatattgagaaggcagtaggtgatagttggctttccttaggttctagggcaggaattcttaaccttttgtgtgtgtgcctaggacccctttggtggtccatgaagccctttccagaataaatattgtggaggaacctaccttaatgcaatagtagcttctaggtacattatcaggcaaactatcccacaagttacaaaacagaaagcctcacagaccaaattatgatgcttgaattgcagggtttattgaatcagtttaaaaccacttacagcaagaactcgatggggtgcataacatacacaggatagggtacaggcgaggcagatggaccacaccaccagaacctagaattagggaatcctcccctccccgcccctcccaaacctcccccttccccctcccctcccctcccctcctcccctcctctcccatcctcccctcccctcccatcctcccctcccctccccttttctcttcttttctttttttgagactgtctcactatgttgcccaggctggagtgcaatggcgtgatctcggctcactgcaacttccacctcctgggttcaagcgattctcatgcctcagcctcccgagtagctgggattacaggcacgcaccacaatgcccagctaatttttgtattcttagtagagacggggtttcaccatgttgaccaggctggttttgaactcctgaccttaggtgatccacccgcctcagattcccaaagcgctgggattacaggcatgagccactgcacctggctaatattgatatgttttccctctctctgccgcatcagcctgtcccactgacagagttgaggatgctcaaggcggctcaacagagggtacctggagcaactcacactgcactatcagagagacacaagtgcaagcacactcagccacagctgcagctcaccaatcagcctgctgaacagacctgaactttagctgcatttttggggcagagcatatgggtgccaggatgggaccataatcttatcaccaatgagtggccatttagggatgatatagttgtcaacccagagatggcatgatcatgccttttgacttggtcattctctaagtaaaacttttatttgttccatcatattttccacttattctgtttaccttcaaaatatcttttttttttttttttgagacagggtcacactgtcacccaggctagagtccagtggcactatcatggctcaccacagcctcaaccttcagggctcaggtgatcctcccacttcagcctcccgagtagatgggactacaggcacctgccaccacccccagctaatttttgtagagacaaggttttgccatgttgtccaggctggtcttgaactcctgggctcaagggatccggccacctcagcctcccaaagtgctaggattataggcatgagccactgtgcccagcctaccttcaacgtatctaactggttactaacttttaggattcggcctatgtctcacaaccttcttgcttactcaacatccttgtctcttaagccactagcttcttctctatggttaacactttttatgagttttattcatctgcttatttttcttatcctctataccagaattgaatattttcaaataaagcacactcatgttacaatctttgaaatgaaaaaaaaaaatgcataggattagaaaagaaaccaattttaataaactatattttgaagtatagttctatattaaacaacaagatctaggccaggtgcagtggctcatgcctgtaatcccagcaatttgggaagtcgaggtgggaggattgcttgaggccaggggttcaagaccagcctgggcaacatggagagattccccatctctttctttacacacacacacacacacacacacaaaatatctgatagcaacaggtgcagtcattaccacaatttcgagtagtgatgagcttaataatatttcgagttatcaccaacaactgtaaagtaacatgaaaacgtctgtgatgactattgcccacaaagtcacaggtactgctaatactcctggtatttgtagtcaaattcataataaaggaaatgctaggtttcagttggtattttgtcccgacggtctgtggacggcaggttagaacgcccgtccaagccaggagggtggacctagcactgcagggtccacctcgggccaatcaactatattcccgaggcgggggccygcgcttcccggacccagctgccctcaggggagagaggacacacttaagagtttggggccggcgtggtagctcatgcccctgatcccagcacttcgggaggctgaggcgtgaagatcacttgtagcaggagtttgagaccagtctagccaacttggcgagaccctgtccctaaaaaaaatttttttttaattagccagttgtggtgagcgcctgtagtcccagctactcgggaggctgaggtgggaggatcgctgggctcaggagttccagactgcagtgagccatgatggcggcactgcactccagcgcggtgagactcagtctcaaaaataaaagggggaggggttgggggtaaaattagttgtgaaatcaagtaagacttcctgggacagaacaatcaaaggggtggcgccgggtcctccaaagagctactagctcagcccaagccccgcctcggcccccagggcagcggcccgcagagctccacccggcaggcgcccgggaaactccgccccccggccggcagggggcgcgcgcgccgccggccccgccccgtggacgcgggttccgtgggcgttcccgcggccaggcatcagcaatctatcagggaacggcggtggccggtgcggcgtgttcggtggcggctctggccgctcaggcgcctgcggctgggtgagcgcacgcgaggcggcgaggcggcagcgtgtttctaggtcgtggcgtcgggcttccggagctttgscggcagctaggggaggatggcggagtcttcggataagctctatcgagtcgagtacgccaagagcgggcgcgcctcttgcaagaaatgcagcgagagcatccccaaggactcgctccggatggccatcatggtgcaggtgcgggccgctgtgcgggcggcggggcggggacgcggcgccccgggttaactgtgtccgggaaggctgggggagggcgggcccagggagcgagcgggcccgggccctcggagcggcacttsgggcctatgggsccgcggccgcccctcctcccgagcggcccggccgacccttccggaaggttttgctgatgttgcaggaaaagcccgggaaataaagtctgcagctggtgttgcctttcgctttgtgaaaacgaggagcctcttctcttctcctttctgggtggcggtgttttattactgccgttcgcctcaggggttgggggggaattgtacatggtctctttaagctaatctgattttgacctatcttgttctggagggtttttgttctacatggatggtggcgactgacatgtgggttttttttttttttgttaaacctatttttggcagtcatttcaacacgtcatttaaacgctcactctcattttttattttaattaggcagaactatgcagaaaggtgtcatttctgtacagtacattcactttgagcctaatttgtgctttaaagtaacattttccccaaattttccagattcacagacgcgttctcttggtgcatttgcagctgtctggtttgagtaagagtggctccaggggggtttctcatgtgggctttttgatagattgaatccccttctgaggtttcctgagccttctgtgaggtggtgggcttgaaggcccctgtcatttcccaggggctcctgcctccagcttccagtttgccgatgtctacctttgtattaataattctggttctcatctgccctgttcctcctcgcttccaacatattacccaagcttagtgctcatggtcaaggtagcttgattttyctcccttccatgagctgtaatgtgttttaggaatgaccagatatccctcagtggattttcagtacttagtacaagggagggcgacatttaccgagtggatacccaagtgccaggtgtacttccgttatcttatttcacaatatgcctgtcatcttggtgtcctcggggcatacctaagtcagtacgtggcacacagtgcttatttggtaggcattttttaagttctaagcactctgttaggttttaaggacacagaatccacctttgggaatttccagtttggttaaacgggaaatgactggywaacaaacrttaccgtaagagaggatggatgccacctgatggagctgtgctctaggcaktgtgtgcctaggagtccgagatgacccagctaagggtggaagcttgattaggagtsgttaattcacagaagtggagcagaaagatgagaatagggaagtagacagggcctacaatttgaagagccttgttgcccastaaggaacstagaacttactttgaatatacaaggcagcctgttatgaagttctcactcstggtgcaggagctcttamcccagggtctgtgggatggtaggtagaaggcaagaggtccatgagtttagataagmaaaaattgatatctccatctccactaacctctagataaaattatttcctctaatcataaatgtaagcagcaaagcaaaggcatattagcagtccctatttttttttcaccagtgataattacagatattttcatatcactttacagttggaagtttttcaaaatataatttactctcattgctacaaaaatcacagttattagaggctgtactagatcttgttatttaatgcttaaaagctcacgggttactgtacccaaattacctttcaaatgttttgataattatctcagtgtttccttttcgagcctttttgtttgttttgttttttgagatggggtctcactatgttgcccaggctggtctcaaactcctgagctcaagcgatccatgcacctcggccccacaaagtgctagggttacaggcatgagccaccgtgactggccatttgcgagcctttttattacgcatttttaaatgttattctgagaaagggacatccaggcgccttaacaggtgggcagagtaccgtgttctggtggaaagacamacaaaacccaagtccagactgtgttgaggctagaacaacaccgctgtggaggaagttagaggaggcttagctgtgggggaggccggatggaggaaactgaacctgatcaagtttagcattctggggccgggcttggtggcgcatgcttgtaatctcagcactttgggaggctggggtgggcagattacttaagctcagcagtttgagaccagcctggccaacatggtgaaacctgtctctacaaaaaaatgcaatgattagcgggtcgtggtggtgcgtgcctgttaagkcccagctactccggaggctgaagctggaagattgcttgagcctgggaggtggaggttgcagkgagctgagatagtgccactgcactccagcctgggcgacagacccagacccagacccagaccctgtctgaaaaaaaaaatagtaataacaacattctgggctttcctttggtatacttgatagtgaaagaaactctttattattaaaagtaactgtgatttttatgtaatggtgattaagggtggattcagagttttaattcagaatttaaagttggtctggtagrctgagctggtgaaggccaaaaagaaagaagccttttcacttgcttgaatttaaataccttcttttacatttacatgggagtattgttctctgagtatctgatacctgayactttagccctcatgcctggggcatcttgggagggatgagctgggccctccagcattttggtgggaggaggatggcggtagacctttgagttgctctgtcctgggagggtttgagcacccggaggcatgcagtgaggtcagttcattctctctgtggcctaggtggacaggtagcatggcctgttctgcacagaagggaacccagttcaccagctgctggttsggtgaggaccctggtatgttaggtgctcagtttttgcttgggtgcacagccaaagattctgtgccttgcctcagctgtgcagctaacaaatggagtcgatagtcttgtgaccttggtttggtgcctttctgccacatcattctcagtcctgagtttagggcaaagcattgctttggtcaggggtgcttctgctgaggctcttgtcctctaagcttgtgctgtgattgcaccattgggcagcacytccagggtgtccagcactgtgccggtggttgggggagacagcacccagaccaaagggcagcaggtctggggcccctggcagagccaggaagaagtgccatagccattacctgtgctctttatacaagggtaactggaacattgcacaggaagggtagacaaggggtagacaagcaggcagagccaggtcgaggccattgcaaatattccatgatagccagatgcttagggatctgtatcagcagcctaattgagatctggtggaacgtttgagagttggaacatgagtatgctctcagaaatgccatttgttgtctcttctacagcaggaatttccccatccttccttttttgttccatctgacttggagccctaagcaaacactgcgtgccctctgtgacagatgttgctagagaatagcaagataggcccttatgaaataatcaccaaatgcatagttcttagtgaggggagctgtggaaggagcattgggagatctgagggagtgctctgaacagggctggagagcattccagacccaggggaaagctgatgttgaggagtccttgtgctgccatagtcttagctgtgcattttaatacatcacatccagaaagaggccactcacagtggagagagatagtggggtaccttatcattgcttttccagagtattttccctgtccccgcaactccatcctaaaaattcagcacatttacttttaatgctgttttaatagtcttattgcatctgtgtgacatttagctttatgttctataaaagcagatgtttgggacttcccttactttagtcagatcacagttggtgtatttttaagtagctcttcctgccgggcagtggagtgtggtgggaggaatcatagtgtcaaatcattcatttgctgcctctgtgactcccaaccccccaggcaaggatttccagccccactgtctccatctgtgaatgaaagggctggttcccacccagaggcagattgtgggattacacaggatggcttatgaaaggagcagggacmcacactacatactgtgtcttccccttcttcccaatcgctgtcaccgtccactctgtaaagccaggactgggtgcagtggttcatgcctgtaatcccagcacttcgggaagccgaggcgggcrggtcacgaggtcagaagttcgagaccagcctggccaacatggtgaagccccattgctactaacartacaaaaattagccaggcatgggtggcacgtgcctgtagtcccagctactcaggaggccgaggcaggagaatcgcttgaacccrggagacagaggttgcagtgagctgagatcgcaccactgcactcagtgcaagactcggtctcaaaaacaaagccagacagtgctcgaggcctgggagcagaacctgaccctgtcacaatgaaaggcctagtgggaagcaaaccacctggagaggggaactgtgttccctgtggccagacttctcaggtcctacgcctgggaaactgcgccccagaaggccagtgagcagctgactccagctctaggcatgctgccccgaaccatccgctgtcacagttgcctcaaagacctccattcattccactcccatctgtgtggctgctgcaagcttgacacttttttctgacacactttctctgctttgctcattatctgggacttgttccttgttattcttaactgcagaggcacttaaagagcccttttctggggcacacaggccctttgagtccaggcaagcctggagcagttgtctggccattcccagcagatgctgcaggattgtgactctgcacaagtgtcttctgtgcatttcactaggccatgaggcagctcaccaytaaatgtagcagtgtgtggtcaaaagggacgtggggcagagctcagtggtaaaaggccacctttctcgtggctgtgtttggtgtcctaagagaatgagctcaagaacagtgggctacagtcttctgacccttggggaagatcgtgagaaggatgctgcagctcttcatgtgagagcggaggctgtcctcctttcacagataggagaacaaaagtttcatgtgctatcccactgctggggctgggactggggtcgaggtcaaggtcaaggtctagtgggtctaagtcaaaagttaactgcttacttacttccctctgtttctcttccttctagtcgcccatgtttgatggaaaagtcccacactggtaccacttstcctgcttctggaaggtgggccactccatccggcaccctgacgttgaggtggatgggttctctgagcttcggtgggatgaycagcagaaagtcaagaagacagcggaagctggaggagtgacaggtgtgtacatactggggcagcatgggcattcagcccccaccctgaagctcccaggagggcctcgtctcagagagcaaagcaracctcccccagcttgccctctcccacatgtgcagatcaagcgtatggtgcccatgttatttcagcaacacctcctggactcagcatcatctgttgcatgatatttggtattttgtttttccagrtgcttggaatgtagcctttaaagttgttttgtttttaatatactttatttttgttcatggcaaaagtaagcaaagaacaaagagtttccagtaccccctccccctcccaccacacaggctcttccttgtcaacacctcccaccagagtagtacatttgttataattgaggaacctacactgacacatcattattgcccagagtccagaaactcctgatgctctacattctatgggtttggacaaatgtatgatgacatgcatctgccattatagtatcatacagagtagtttcagacctgcacccttctgcagcccccttaagattaaggaagaatagctcatctctgagaggggaatgaggtaggaggtggggctcagacaccaaaccaaaccgaggactaactaaagcagggacagggacgaagcagctttccataaaacacccaccagtgtgccatatcagtttaccattgccatggcaatacccggaagttaccacccctttctgtgacaacaatctgatgacctaaaagttaccaccccgtttcttaacatgtctgcatagtctgccccttaatttgcatataattaaaagtgggtgtaaatatgacttcagaactgcctttgagctgctgctctcagcacagtgcctgtggggtagccctgctctgcaggagcagtcacagagccataacactgctgcctcaataaagctgctttcttctaccacsagctcgctcttaaatgctttccagagcgaagccaaggacccgcccaggccaatccccaatttagggctggcctgccctgcatcagtttcactgctctaaaaatcccctgtttatccctcctaattcctgacaaccactgctctttttactgtctccacagttttctccttttatgtcttctcccatgtcttagtacaggtcacgtcaggtgacatagcagagcagaaagcaaagctattaaaagctttattaggagaggtaatcctagggcagcaagagagagggaggaaggggaggcaggagggcaagcacagtgccatacgctgtcaagctggccatggcttcatgagaaacagccartggcttggtcatgcaggatgccctcacgcaagtcctttgccactaagcttcagaaaagcccctcggagcaggaggaagggagcagcattatccattggttctttctgcctcttgtttctcattggttttagctcgctggaggtgctgtggttctctgcacttccagactgtgttcctggcctctgcacagtcacgccctgcagccagagctgcctctagatctggaagtggcgggaggactctcagtccctggttttgaaagagttggcctgttggtgacagtgctgtgtttgttactgtggtggtcactacagggtgggtatgccagggtgtggcccttaccctgaggcagtgacagtgctagggaacaaggctgtggcaccagcagccactgtcaggtagcccaccctggggatacagatgaactacatccagtacgtgtaattttatggttccttatttcttttaacatctaaatgtttactctatttgagagttatcccggtgtgtgctgatgtgtggtgtgaggcgtgactccagttttatttttttccagatgatgatctagtttccctrctttgtttttttgttgttgtttttgtttttgttttgttttcgagatggagtctcactctgttgcccaggctggagtgctgtggcatggtcttggctcactgccacctccgcctcccgggttcaggcgattctcctgcctcagcctccsgagtagcgtggtgcctgccaccatgcccagctaattttttgtactttgtttattggcttattcatctcccccattgagaggtgtcttgtatcatgcacaaaatctctgtattttggggtccttttaaaaatttctgttccattgtctgtttaacctttttttatatgtaaacttttttcgttgttgttggagacggattctcgctctgtcacccaagctggggtgcagtggtgtgatctcggctcaccgtaagctccgcctcccaggttcatgacattcttctgtatgtagactttttttcttatagcagttttaggttcacagcaaaattgagtaaagtacagagtttccatatacccgctagccctacccaccccacacatacacagacttttgtccacaatcaacatcgccaccagagtggtccatggttatagctgatgagctacaytgacacatcgttatcggagtggtccatggttataactgatgagccacattgacacatcgttatccctcgaggtctgtagtttacatgagggctcactctttgcattgtacattctgtcagttttaacaaacatacattgacatgcatgtacctttatggtagcctccagagtcctttcactgcctgggaaatctctgtgctttgcctagtcattcctccctcccctctaacctccagtaaccactgatctttttgctttctccatagtttttccttttccagaatataatatagttggaatcatacagaaggtagccttttcagattggcttctctcactagcaatgtgctcttaagattcctccatgtcgagccgggcacggtggctcacatctgtaatcccagcactttgggaggccgagcccagcagattacgaggtcaggagttcgagaccagcctggccaatatggtgaaaccctgtctctattaaaaatacaaaaattagccggtgtggtggtgtacacctgtagtcccagctactcgggaggccgagacaggagaattggttgtactgggaggcggaggttgcagtgagccgagatcatgccactgcactccagcctggcaacagagcgaaactccatctcaaaaaaaaaaaaaaaaaaaagattcctccatgtcttgtcgtattgatagctcatttctttttattactgaataatattccattgtctggattaccacagtttgtttattcattgacctgctgaaggacatcttgattgcttccaagttttggtgattatgaacaaagctgctagaaacacccaccatgtgcaggtttttatggggacataagttttcaactcctttgggtaatcaaggagtacaattgctggatcatgtggtaagagtatatttagttttgtaagaaactgccaagctgtctttcaaaaagctgaatcattttccattcccaccagcaatagatgagagttcgtatcattatacatctttgccagcatttggtgttatcattgttttggattttggccattccaatagatatatagtattttattattgttttaatttgcatttccctaatactgtaattatcttgaacatcttctcatacgtttatttaccatctgtatatctttggtgaaatgtcttttgcctgcccctacccccactttttttttttttttaagactgtcttgctccgtcgcccaggctagagtgcagtggtgtgatcacagttcgctgcagccttgacctctgtctcccacctcagcctcttgagtagctgggactacaggtgcgcaccaccatgcctggctaatttttttaaattttttgtagagacagggccccaccttgttgcccagactggtctcaaactcctggttttgctctttttaaaatcacattgtttgttttcttactgttgagtcctaagagttcttggtatattttggataacagccctttgtcatatgtcttttgaaaatattttttctcagtgtgtggctggtcttccgcagagcagaagttcttaattttgtgaagtctagttaatcagttacttctttagtggattgggcttttggtgttgtttgtaaaaagtcatcaccagacccaaggtcatatagattttcttctagaagtttaacagttttgtgtcttacatttaggtctgttatccattttggttactttttgtgaagggtgtaaggtctgtgtctagattcctttattttttttcttttttttttttcgcatgtggatgtccagttgttacagctccgtttgttgaaaagactatcttttctccatttttgcctttacttttttgtcaaagatcagtggactgtgcttgtgtggctctgtttctgggctccctgttctgtcccactgatctacgtatccttttgccagtaccacactgtgttgactgctgtggcttcatagtaagtctttaggttgggtagtgtcagtcctccaaccttgttactgtcatggcagaaggcagaggagaagccggcagttgacatggccggagcaggaggaagagagtgaaaggggaggtgctacacatttttcaacaaccagatctcaggagaactcacaagtatcatgacacagcaccaagggagaaatctgtcccggtgatccagtgacctcccaccaggccccacctccaacattcgggattataatttgataggagatttagtggggacacagatccaaaccatatcactgtctgcccttgcagcagctggtccttgcagctgttggtatgtctgactagctgcttactgcaaacaggttagtaacggctcagaattgggaattttaaaaagtaaataaatttgccaagaaagggttcagagggtgagtatgtcagatttaacagaggacagctctcattctgttgcctaggctggaatgtaccggcatgatcttagctcactgcagtttctaactcctgggctcaagcaatcctcccacgtcagcctctggagaagctaggactacagttgcccaactaattttttaactttttttttttttttttttttaagatagagacagagtctcactgtgttgcccaagggatcttgcttggcaagaccccaggctggtctcaaactcttggcttcaaacaatctcacctctgcctcccaaagcacagggtttataggcatgagcaaatacacctggctgacatttttgttgttctgtggctgttttctcttttgtattcaggataggggaagttgtaggtttaggggcatagatatgttatatctagttataatttaaatatacctgagtacatagataatctctgtcacccaggctggagtgcagtggtgccatctcagctcactgcaacctctgcctcccgggttgctgggattacaggtgtgtgccaccacacctggctgggtatttttagtagagatagagttttgccatattggccaggctgacctaagtgtaattttataatatgaaaaggcataatgattttactgaaaatgtgtctttttgtgaaaccatcataaccatacagttaggatactacctactaattgtccagggatttttcatccagagagcctaacttactatttttagatatatgaaaagtttaattcatcccaaatcctctaattcagaaatgacttattaacatgtgggatatctccatagaaaatactaatttgcttgtgagtgtgcttgattttctttctttcctgcagaattgagatcctactctaagtatcacttttcttacttgatttttttttttttttggtggcaaaataggcataacataaaatttaccttaacccttttctttttttaaaaaaaaatttttttgagacagggtcttgctctgtcgcccaggttggagtacagtggcgcaatcatggctcactgcatcctctgtctcccgggttcaggcgattcttctgcctcagcctcccaagtagctgggattacaggtgtgcgccaccacgtctggctaatttttgtatttttagtagagatggggtttcactgtgttggccaggctggtcttgaactcctgacctcaggtgatctacctgcctcggcctcccaaagtgctgggattataggcgtgagccactgcgcctggcctgtcttaaccatttttaagtgtagagttcagtggcatgaagtagattcacattgttaggcaaacattaccatcatccagctccagaactttttcatcttcccaaactgaaactcccaatccattaagcaataactgcctgttctccctgcccctcatgaccgctgttgcttctgtctctgtgaagttgacaactctagcacctcatgtaagtggagttagacagtatttgtccttttgtgtctggcttacttcactcagcatagttcttctgggttcgtccgtgttgcagcatgtgtctgaatttccttctttttaaagacataataaacattaattgcacgaatatrccatatttcatttgcccatttgtatgtctgtggaaatttaggtggtttctgcactttgttttttgttttttttgagacagagtctcactcttgcccaggctggagtgcagtggtgcaatctcagctcactgcaacctccacctcctgggttcaggtaattctcctgcctcagcctcccgagtagctgggattataggcatgcaccaccacatccacctaaattttttgtatttttagtggagacaaggtttcaccacatgggccaggctgggatyacaggcgtgagccactgcacacggccaggtttctgcattttggctattatgaatggtattcataatattcataataatgataatgaatattattaataatgctataatgaacatcggtatacagatatatgttasagaccttgctttcacttgtctgctgtgtatacccagaagtgaaatcactgaatcatggtaattccatgcttaattttttgagtagcctccatcctgttttctataacagctcttccatttccaccagcaagacaagggggttccaatttgtcctcattcgtatgaacactttttttttttttaaataatagccatcctaatgtgtgtgaagtagtatctcactgtggtttttgattttcatttccctaacgactagtgatgttgacctgttagtacttttacaacttgatatttactcttctcatgttaaaagttacagattcaagtgcacagtagtcatttagtgaggttttgctaaatttcatccagtattccaagtacttgacatattaatttaatcgtgtcatttgtcagtttttacaggtgaggaagttcaggcacagagaagttaggtaactgacccaaggttatactggtagtaaattcctgagccaggattcaaatccagtctgtctttttttcttttttttcaagacaacatcttgctctgtcacccaggctggagtgcagtggaacgatcacagcctacactccagccttggcctcctgggcttaagcaatcctccagtctgctgagcagctgggactacaagcgtgagctaccgcacccagccctgtcttyctttgagactagaattttaaccttttagttatattacacgtagagctgctgcaaacttcttgtacatcccacgcacctgtacagttatttctttaattctaagatgtgcagttactgttcaaagagatgaacaattttaaggctttctatgtatgtgccaaattgccttccagaaaaggttgcttcaattgcacatactataccagcagtatataatatacccatttctctactaacataccattcctaagtgtttcctttttttggagtcagggtctcactctgtcacccaaggctagagtggagttgcacgatcctagctcactgtagccttgaactcctagacttaagcaatcttcttaccttagcttcctaagtagctaggagtacaggcgtgcgccaccatgctggggtttggttgttttgtttgtttcttccttaaatggaggaggtctctatgttgcccaggctggtcttgaactcctgggctcaagtgatcctcctgcctcatcctcgcagagtgctgggattacaggtgtgaggtgggattaccatgcctggccttgtgtttttcttaaggaaatgtaaaagatactgattctttgtcataacatgtttttacaaatatttttccaagtttgacattttcttttagttttgtctattgtatttttttgcctcattaaagtttcatctttcactaacgtttgtgtagtcatgtctgtcttctcatttgtggtgtgtctttggtattatatctggaatattaaaaatgatttacatagttacatgcacagatcttacgtatacagttcagtgagttttgacaaatgcttatacatatctagcatagaccccgttgagttatagacatttctgtcaccctgtgaagttcccttgtagtttttctagtcttttttccctgactcaggtaaccactgttctgatttctatccccatagattaattttgcctgatttagaatttcaggaagaaaaggaattgtataccctcttacacgctttcttcactcagagcaatgcctgtgagattcatccaggtcatcttgtgtgtcattagttctttttatttctggggagtagtgctttgtttggatatatccatttgtttatccatttttctgtaggtgactttggggttgttgccagtttggggctattacaaatacagctgctaggaatttgattggcatctcactggatccatggatcaaattgcagataattgacrtcttaacagtccatgaacatgatgcatctcttcatttatttaggtcttctttgatttcagcaaagtcttacagcttttagtgtagagatcttgcacatcttttgttaaatttatctaagtsttttatgtatcttaacgctgtttaaataccagtgtccttgccttttccagtatgtttattgctagtattagacatttttgtatgtttgtatattgacagtgtgccctgcgtatttgctaaattcacttaatttagtaggttttaaaatagatttcttaagatatctcttaggaatatcaaatagaatcatctacaagtagagatggctttacttactattttccaaacttacaccttgtgtttctttttctttccttaatgcacttactagaacctccaataccatgtggaatagaagtgatgggaagatagcttcgtcttattcctaatcttaggcaagaaacattcaacctgggaatttatttttataataagagaagaatccagtttttgtcccaaatggctagccagtgatccccagaactctttattgaataattcaaccttttcccactaatttgaaatgatacctttagtacatatttaattcttacatatacttgtgtctgacttatatcaaaatatttcctttaattcaacactttggtaaatagaagtataatggmaattagaagccttagtgagacgtcagtatgcttccaggcttttaaggtaagcacctaataagtgctttctaaagtgtgggaggggcctccagagaaaggggaggagatggaatgtcagacagctgaccaccccctgatatgctgctctttcaaggagctcagtctgagaagggtcatttatctccagaaaagargctctrttagstgaccacggttgttacaaacagacagatgagatggaccaatcgtagtctcccaaggcataaggtgtcctagtggaaggatcctggggargtagaagaggacggggctcctctgagctgcattttggggmtgttgagatgagcattgctgtctgtttgattmtccaggcaaaggccaggatggaattggtagcaaggcagagaagactctgggtgactttgcagcagagtatgccaagtccaacagaagtacgtgcaaggggtgtatggagaagatagaaaaggtaagatcttgggggcccagatccctgaactttatggattgcttgcaatgatgttattggctatctcaagagaaaagaagaaatgggggctttaggrtgctagctcaacgtaagtgattaaaaataaagtgaagacattagtattgaccagatacgtcagtgacttccagacaggtctggtcctccttatcacggtccagttctcatgtatgtatgcatctgctcttggaaaatgttaacaaaaggagtctcttttggacccagcagtggctggggagagactgtttgtctgtgttttatggtagaattaggtataaggagtgtgtttaccctgttatgagcctccagccttctgtttaatcaaaggaacttcattaaccaggctttcccaccagttctagcccttgaaggctgacagccagtcagagaaaatggatggacacacaggtagaagggaaggcttgtgccccgcagccttctcacccttctctaatgtgacatgcacatattaattgattcatttaaggcattaattgaaagtctctgcctcccggaggtattgtacagaaaactgaggtgagccaatgggtatttagaaaagaaaaacatggaattgctgtatcttctccagctaccttcaaccaccaaaaatttaaggcaaacattaagatcctctttacctcaaggggaatgccggatggtatgtgctgctgggttactggttttatgtaatgccaggaacccctcctgctgcattctctggattgagcctcccaggcctggaactctcctgggaatatcaggcctggggactggggacctgggcaggctggcaggactggattcttgcctgtgggtttattactccttagggggtgtcatctgtaaagagactaaggaggccataggagggtgggagtggacagaaagtccctgctagtacaaaagtgctgcattgggggctgggcacggtggggtggtaggctgaggcaggagtattgcttgagtccaggagttctggaccagcccgggcaacatagtgagacctcatctctgcaaaaaaattagccaggcaaggccgaggtaggagggtcacttaagcctgggaggcagaagttgcagtgagctcagatcaagtcactgcactccagcctaggcaacaaagcaagaccctgtctcaaaaaaaaaaaaaaaaaagtgctgcattggaagcccacgcaggtgtgcaaggctctagctctgcccagcacaccataccatgtgtttttatgcctgccccaggtcagcagaaacatcttaaggggaatgttagcaattcttcacatgtccaggcaggtaggtaggttgccagccatttggaatttaaggaaccctgagtcttgagggtgggtaacacacaatccttgatgacctgagagagctaaacctctcaaaagctcatgagtcttcaagttggcgggcaggccttggcttggaccctcagctcctcactggctggagcacaggctgcccgtatcatgttcactatccttgcttgtcgctcccttggtaccacatatggtttttcctgcagggccaggtgcgcctgtccaagaagatggtggacccggagaagccacagctaggcatgattgaccgctggtaccatccaggctgctttgtcaagaacagggaggagctgggtttccggcccgagtacagtgcgagtcagctcaagggcttcagcctccttrctacagaggataaagaagccctgaagaagcagctcccaggagtcaagagtgaagggtgggtggagcrctgcggggttgccctgggggttcagtgaggggttcaagggaggcccaaaggmcctacaggttccataccactcctctgtttcccttcgctgactgtcagtaagccagggagatgcaaactgaggaatggtgacagcagagatgtgggggcaaaggacagggtagggaaagacagccaggggttcccatggcctctgctgagagccctctcccctgtgagacctgcttcctggtggtctattccccttccaacatctgagctccatggacaggctaactacactttcccaccacaaccctttagatacttaaaagaccaccttccttccctgggtatttgttgtgcctgggttgatcactattcggaacaatgctgggagaatggtgaccatttttagttaggggatgggcagtggataattttcctggcttagagttgagaatgataagggttttgcatggtgttaaaatttagaatgggaaggaccatcagtgactgtcttgartccatggacacctcttggtctctccagtttaccctctgctggtccctcagcctcagtctggagaactgcttgttaacaagcacaccaggggtggtgtggcagagcctggtatgcaccctgctccttgaacggtgactgggcaaccatcaagcagccatcacacattatctcagttcataacgcctgttcattgcagcagcacatggggctctagaatgtggaagaaaactgaaaaatcaggccatgggtcaaaaaggccacagggcattgcagcatgtgatataggtrttggagttcatcagctcccacttatgccatgataactgccagaatgtgttgagcacatttcgtatgccagacactatatgaagccctgtatttggactgtttcatttgcccatcaccagagttctgtgaggcagatggtattcttttccctattttatggatgaggaaagtgcaagggtttgtgctcaggtctatgtgatagctgagactgacagaccactgcggctgtcctgcgcctgtattttgggggcaggtgatagcctcagagctgtgtttgctgagccagctggggcaggctggttagcactgctttgactgtcacttcttgtcagggctttatatggcagtacagccccacctctgtgagcagcctctttcccttgctctgtgttttagctcaaaaggcctagctccctggacttgtgctttgtctttctgcaatccctaccccctagccatgggcttacctctagcctagtcccggctagaaccttccaggccaggagatacatgggtttcttttttttttttaacctcagacggggtctgagccctggattcttgtaatgggttgttctgagtccctggaacaaccctagcccctctccctggctgggagagtatgttctgaattggatggtgtcttctgccatcttggctgcaagtactccctgagtagacagtgatcgcctaagggcactgagtggggcaggggttagggagtgacaagtgtgagtaggccctacagggagttgatagaatgacattaagatactgcatcaccgcaagtcattgggtgtcagacttttaatggctctggctgtctctcatatcctgtgtctccttcagaaagagaaaaggcgatgaggtggatggagtggatgaagtggcgaagaagaaatctaaaaaagaaaaagacaaggatagtaagcttgaaaaagccctaaaggtgagttctcagctctgtgtctcctttcgacattctgctgtctggattctctttctcattytgggaagacaattcaaggagttgtgycccacttattaagacctttagcaaattgatggcagttattaaatagcatggcttttccccagattctttttcctcctccaaaagaaaccatttttatttggaagagaatccacattaggctgtaggtgtctgacctgcagccrggcttgagcaagggctgagtgctctgtttccgctcaccagcctcatactgggatgacagagattcatgctttggccaaattatgcacaactgtacaccctgcacctttgtggtcacttgcaaactttggaaactgaatacttagaggatgccaaagattcttagcatagacaaatggcttgaagagatcaagtgtctccacattttttaaatgaagatcttcatttttaaaaaaggaatagactgataatgacagaagaaaactatccattaaatcagtggtccttgaccagaaagattcatccctgtgttgattatgtacatgttgaagcaaagcaaaaattattaatcagaaaatgctggatgtctgggaaattgrgggagaacagttggtctctcttgagaacatgatttctatgaaccatctgcttgtgtctcttctatgagtattcagtttttactagtggtactaaaattaaaagcagtttctgatatggttctagttgctaaataagaatcacacattttgttcaattgtcttatggtaaaaaagtgtctgtcatgcaccaaaactggctgcaggagaactgtggtgccacttcacattggccatttggtgagattagtgtccttctmtcttccctagtggtatcagagatgtatagagagtcagaaaattaaaatgcccctcagcgttcccactgtggcacatctgtgtctgttggctctccccccttggtcacccaggtgacattgttgtacttcttccatttaaccctgtatcactagaccttttcytcatcctytcatgtctccattcctggygtcccagtgtatgctgtgtgtgatggagaggagatgtckagagacccyttaaaaatgaagctgggaaacaggtgcagacgtgtgtgcctgtacctttgccagtggagttaaaatcctcttttgatactaatagcaaccctataggatatgatagggctggcatttttgtctccattttgcagaggtggaatctgagcagagatggcgaataacttgcccattttcctggggaaggaggagacttacctcagcctttaaaatggagaggctgatagcttcctcagcaagcttgattgttatgagaataaatgagatgaggccgggtgcagtggcttgagcacctgtaatcccagcactttggaaggccgaggcaggcggatcacttgaggccaggagtttgagactagcctggccaacatggtgaaacaccgtttctattaaaaatacaaaaattagctgggcgtggtggtgcacacctgtaatcccagctactcaggagactgaggcaggagaattgcttgaacccagaaggtggaggttgcagtgagctgagaccgcatcattgcactccagtctgggcaacagagtgagactccatctcaaagaaaaaataagttagaagacacgtaaaagcatccaaccaagagtaggcacttaataaagattaaaacttccattttcagaagagcttaaatacattcctgcatgatactgaatataatataccatcaaggaaattggtgtttgcgaatcattcctactctaagattggtggagaatggccataccctgcctcctctagttgctgataaacgtgggccgtgggctcagcctagcacctccaggctcttacctggtgtttctggggattgatttctgagggttggttccaggagccttggtgcagtctcccccacacccttagggcttcctcatcaccttccacagtattctctgagagaccacacagcaggtttaatttggtgtccacaggagcatgactgggagtcaaatcctgtgctaatcacccagatttgcaggggcagctcgctggtgcacaagggtataactggaggctcagcatgaccagggctcctcctccagttggattcttcctttgaaaagagctagcctctcagccactgggtcttgtccataggctcagaacgacctgatctggaacatcaaggacgagctaaagaaagtgtgttcaactaatgacctgaaggagctactcatcttcaacaagcagcaagtgccttctggggagtcggcggtgagctgcctttgtgttaagtgggacacgcatgtgaggccgaccccgtcgttgtggagtgactgtcccaatggagtgtgggaggccctccgtgtgaacacctgctggtattaattgcaaggagtataaatcgtggttgtgttgcacggtcatcaccaccatcgtggtcaccatttttccggggtggatggggccggcattcacacgccccaccagacatcttccacatgttagtgcttgctctagagtgccaggcctgtgaagagaggagagccccctcctgaggggtggcatgatggtttcccatcagtgtccccagctggcccttctctgctgtcattcttgggagttggcttggcactgtactttctgcaatgccagtggttgctttcccttcatttctaaatcactgagggttgggggcgctgcaggaacacttggaaataaggtctcctacaagaatccaagctccattgtaaaccaagggtgggtggggtgttaagagccccatagcaagcccacagcaagaagcctctcttctttgtagtgagtggaatctgtgcaagttcctccatcccacattagtaagtgtccttttttgtagtcccgcatttgccctctgacrtgtttctccactggctgcagatcttggaccgagtagcygatggcatggtgttcggtgccctccttccctgcgaggaatgctcgggtcagctggtcttcaagagcgatgcctattactgcactggggacgtcactgcctggaccaagtgtatggtcaagacacagacacccaaccggaaggagtgggtaaccccaaaggtaaggggtaggggaagatcctgggatctgttgggagaaaaacctggccccactttctgcgcttgtttatacttcaggtccctgagattgcagggccatgttcctcagacttctttacagctgcgtcatcctgtttaccagaatataaaattacatgtttgcaaactacgcaaatgtagaaccgaagctcctctaagtatggagtagaggtccatttggtgtaaaatgttgcttgcaaagaccatgaatagtttttatctattgaatgcctcctatgtgccaggcacagttctaggcttgagggacatatggtgaagaaatggatagtaattcctgctttctgatacaaggttttttcaaggacatttccttgccttagtgctagcaggagaattggatccagggttcacgtatctcctagtatcgcacgttctctctttttttaatggaactgcttatggaattctcaacgcaaaatacctccatggggagcctcctttggagccggctggtggggttctagcagtatctttgtggggctggctgctccgaggcctttgcctgtgctccctcagactcagcaggacccaggcccagcagcctgggtaggtgcagagctctgccactcaccaagctgcttccctcgctgttgcacttggaacagcggcacacagtacacactcaggaatcgttacctgagtaactatcgacattactcgctctacacctacaactgaactccatttccactggcccctggctcacttsttcactgccatgattgcatgatccctcctaattktctctctgtgcgtttgagtggttcctctaaaataaatctgaccttgtcacttcccccacccttaaaatcttagactgattccccgatttttctgggtatgcaaatcttacagacccttacgtggtatttgtatttcttttactatctttgatggggaaatagtaagatggcaataagcaatgtgccattccttgtattttatatatcaattgtagagcatctatatacatttttaaaggttatgtgcatgtgcgagacaagtttttggtctggcagtgcttgctgcccaggcagtgacactgttgcccccaggcacttgtcccacagaatcaaggccagctctgtagcttgtcctcagagccctctgtgatgcggctttgctggccttctgcagcctttttctgccacccttttcttccttctcacatacccctctccccaccccaccgccagtcttgctcattctttttaggagtacctagcaatagggcgcctagccagggcaccccacatgccaccgtgtgctactcagatggctgtgcttaggcagtcccctgtgttttcagctcccagtgggcttagcagatcactgcctccaagtgcatgctagcattccctgtctcacatcaccttggcacacctctggcatagcttagctcctttgttaaagttcaccttcctatagctgatgctcagtcacgaatgagatactttctgaagagcagaaactgtctttttaaccagactatggttggtagcacatattaggtggtctgtgtgtgtyggaagcaatctgtgacctcttgtatctaactgacatcctgaacacaggcatagctggaaagggcagtttcttgattggatgaagacctgggagcacagtatctttccctgagcttcatgtatttgatacttattgagtgaccatttagagcaaggccccttgtaaatcagtcagagtgaagagtgaattgtgctgatggaagaatttatagtgaataccatagggctccctgcattcatttttccttcttctaaaaaggaaagcaaatactgtgatttccttttgggtaataatctcccartgtgtatatagtattcggggtcttggagttctggagtaggcatgtgatcccacagaggcctattaactctcgaagggagcaactcaggaatgaggccagggaggttgtagtcatacagcagttccagtggtggttccctgaccgaattggccactggtttctgtttttgttttttttagggaaagatttttctcttaaagcagccacaatattagccctattataaatgtaaaagtaccrgaaataagtactgtagcagcaataatactgtctttcatccttaaagcctcacatttttctattttttgttactctttattgtaagaagaaaaaaagagattatttgattkggacaagccaaatcctctttggtctatggggtggttacctcaagggagagctggcttcttaactaaaacttaatattttttaggaattccgagaaatctcttacctcaagaaattgaaggttaaaaarcaggaccgtatattccccccagaaaccagcgcctccgtggcggccacgcctccgccctccacagcctcggctcctgctgctgtgaactcctctgcttcagcaggtacagcatttgggaccccggtcttagagctgctttgcaggaattgtttgcccactacttgctggtggtgtggagctggtgaagaaagtatccgtcaagggtctctctttgctgaccccaccatggggaagccttgccctgcaggggataggcctcttctcttggcttgttacacccctgaccacagcaaggtgggagagtgttaagaacatagcatcggctgggagcagtgactcacacctgtaatcccagcactttaggaagctgaggcaaaagaattgctgaggccaggagtttgagaccaacctgggcaatgtagtgagaccccatctctacaaaaatgtttaaaattaatccgagtatgtgcctttagccctagatactcaggaggctgaggcggaggatcccttgagcctgggaggtcaaggctgcactgagctatgatcacgctaatgcacaccagcttgggcgatggagtgataccctatctctaaaaataaaataaacattgtagaagaacaagcarctcttactctgggaggctaggagaggggctcctaagaaaggctaggtcgacagccttacctggagttgggcgcagggtctcctgcctgactgcactgcagaggagcatcccaggcctcactctccaggctgccctgcgcccaccagtcatccgggccctggtgtgatgctcaagtctctgttgtatgcagagggagttactaatcagcactagtgagaaatgcyccaagccaaccaagacagtgagagcaacgtatttttttggcaggagaagtgacccgctgcttgtttactcagagacatgtggcatagtctattggtgaaggtcacagtttggtgggtggaggatgagggttccttccttgaacataaacctgttattgacttccttttcatatcctgagaggggaccagtggtcactgcagtgtgtgctggtggtcatccygagtccactgtgctgctggcagcmtgggtccaggtgcccacatgaagggccagttgggggctggcattctgacccctccrtggagggttccctcctctgctttcccctgacttgcagttcagcatgagtcaataattttgttctctggagacctcagcagtttcagttaaactgtcagtgtttcctagttgtttgccctcacagggaaggcaggaaggacttttccttgcagctactccagttctggacgggtgtcacctgcactgtgttgtttgctgtgaacagaaggcacacccctgtccaggcctttctggcctgggtcagtgcacaccaggctgctgcttttctcctagaatcagttagctcagctccgtgtgattgtgctggccactgctttgagggactatcatggacatgtctcattttaaaatggggttaattcataagaattgcagtttgtttgggagaataacagaaggaattgggggttcatgtgaccttacccctcttcccatccgactccagcctcctggtccctcgtccgcagatgcagccttcctagcctgaccttggcgcggacctggggtaacccgcagctgcctggctcacgccgcgaggctggcctggccatggagtggcattttgtggcttgctccctgcccagtcctttctgtgctgagggacatctgtaggtactcaggtggcagcttgctgtcccgtcctgttttctcgcgagtgtattttcataggcttttcccaggagctcgctgcttggctcacctgctcctccacctccccttactggggagcagcaccagagctggccttgctgaatgattctctcctttcatcccagataagccattatccaacatgaagatcctgactctcgggaagctgtcccggaacaaggatgaagtgaaggccatgattgagaaactyggggggaagttgacggggacggccaacaaggcttccctgtgcatcagcaccaaaagtgagttgaatctgaatttgtgcaacagggacaatgcttctgtatcttatgattgtgatgacgagtaagtgaggaagagtcgaacacagcgctgaaaaactggrtcttaacatcatcatcgctgtggttctttatgaagggaaaccagtatttgctctcagtgttgctgctttgtactgtagattcacatgcattgcgtgttctcaactaaagacggtaagctactataggttgagtctccctagtcccgaagcccaaacaaattgcctcaaaattcaacactttttgagtgacaacatgatgctcaaaggaaatgttcattggagcatttcagatttcagagttttggattagatgctcagtcagtaaatatgaagcaagtattttaaggtctgaaaggtttctggtctcaagcatctcggataagggaagctgctcaacctgtattctcatcacttcgcactgctctgtaagatgtgcatagatatctgccaaaacagaagttcaaggttcaagtatgtttggaaaaggtagggtaaaacaaagctaaacaggtttctgtgtgggtttattatgctgattaccactgtaggtcttcaggaaccagagaaatagaatacaggatttcccatacatatttgacatcagggtgttttttctttggagtgtttgttaacatcgtgctgtagaatggtttggagaaggctgccctggctcatcataccttagaaaagggggaatgttgctgataaaaacactcttgggagcattagacttggaagcaaaggagagctgtgaatgctgagggtttggaagtacacactaaatataactgtagtaatttgaagtttcagttttgttttaaacttgtattttggttttttttcctttcaatttgaacagaggaggtggaaaagatgaataagaagatggaggaagtaaaggaagccaacatccgagttgtgtctgaggacttyctccaggacgtctccgcctccaccaagagccttcaggagttgttcttagcgcacatcttgtccccttggggggcagaggtgaaggcagagcctgttgaagttgtggccccaagagggaagtcaggggctgcgctctccaaaaaaagcaagggccaggtcaaggaggaaggtgagggccccaagctgccccctccagggccaaaagccagggacattggtggccaggttsttgtccacrgaacctctccctttgtgtccctgacatggcctgttgagtgctgcagagcaggacacagaatggcaggcgctttggggtggcgggagtagtgtgtatatagatgccgagttgacagatgatgggaatgagaacaactcatttgccttctaccttccccttactttttagttacatttaacttcatgtttacatttttctgttctcctccaaggtatcaacaaatctgaaaagagaatgaaattaactcttaaaggaggagcagctgtggatcctgattctggtaagcaaacaggactgccagcaaagtgggctrtgccgccccccaacccccagctgactaggagcacacatccaaatgcccgcagcatacctggggcagtgkggtcgtgcctttgtcctcactcaggcctccttcaccagctcccccagtcctgagaacacacatttgtggggagcctcccgagggtggtggtagtgtatccaagaggcgtgaacctcaggcctgcagatcccttctccgtgagagygctagcacctcaaggggasagaaaactgtaggtgcttttcctctgggacaggactggaacactctgcgcatgtcctggagaaaggtgggaaggtcttcagtgccacccttggcctggtggacatcgttaaaggaaccaactcctactacaagctgcagcttctggaggacgacaaggaaaacaggtgagttctgcaggtgtagcctggttgtgcagagacatgggcccgtcctgcattggttagtgctgtgccatcagccttgtgaaacccgttaggcccagtgcctggggaatgaaatckaatcacagagatcaaaaacaaattataaggcctttgcttaaaggggagaaagaagccacttactaaccagtagcgttgctgtccttgtacagttgtcccaaggtatggtttcacatattcttctgctggcttttctttttgtttggtgttttgttttttgttgttgttttgcaactatttgttttgttttttgaaatagtctcgctctgttacccaggctggagtgcagtggcgtaatcacagctcagcggagccttgacctcccaggctcaagcaatcctcccacctcagcctcctgagtaactgggactataggtgcgcaccmccatgccttattttttatggagacgggcctcgctgtgttgcccagactggtctcaaactcctggactcaagtgatcctcccgcctcagcctctcaaagtgctgggattacaggcatgagcctctgcacccagccccagctggcttttctttcagctacttgaatcaagattttctgattttacatatgttttaaaactttgaagcaaataaaggttggcaagcgttgaacttactctttaatgttcaaactccctagtaactaaagaggttggatttgcctttttttttttttaacatggtgagacaggcaaggttggagtgtggatggtggggtacagcagctgggaggtggtgagaggttgggctggcttttgtccttatgtttctaggcagagtggtccttatctagtgagttcattgcccctcagtacagccaccacaaaatagcatttatgtgtcagtgtaaaggcatgtggaaggaactcttactaaattctaacgttgattgtggatgtggacatttttctggtggcttagatttcctggtgttaagtgaaagggtggtgtaggctgttagggtcagaaaaaattttcaacgtagatcaaggtagtgcttctcaaaaattttcacaggaaaaaccaagcagagaatgaatttttatacccctgttcagtagcccagagaatggccagggagtcccaaattttctttgaaatctgtagttctatctttaaaatgtacacaaatcttgtatgtgggtttatgatatatatatatttattatgaaatgacaattaagtgttgcattacctctgctttgagttaatmmaaaattagctcatccaaagctgagcagcacagcagctgggtgtgtgtgatgtgtaccctcaaytgagatggaatttgaacatgacagcctgcatctctaggtcaccggacctgaggagccattgccactgcccccctcatttcatcatgtcttggccttggatctgagttgaaagtttcattatttttagggtacagctgtaagggttgactccttgaacacatgacttccagatagtactttgtatttctttggggagaggactagaatcatttttatgcaaaggtctccagactccaggattcagtcctcaggcttggctgccagaaccaagtttaaactattctttggcattttttgtagtcaatatgatttgaaagtttaatgaaaagtaaaataaagaccctttattgttatagcagttgtgtttgttctgtgttaatcaccatccttttggggtgtgtaaaattcttccccacgtgaatgtaatggcaggaaaggggagctmctgaaatgggacmgctgacccacacatgtgtatctgacaccctccttcccactgcaggtattggatattcaggtcctggggccgtgtgggtacggtgatcggtagcaacaaactggaacagatgccgtccaaggaggatgccattgagcasttcatgaaattatatgaagaaaaaaccgggaacgcttggcactccaaaaatttcacgaagtatcccaaaaagttctaccccctggagattgactatggccaggtaaccacataatgcccttacactgtctgcttctaggaaaaggaagggacaccttattctagaaaatccacatcgtggatcaggtggcatcatagtaaacatactaccaaatgttgagaggagaataatagtccttcacaaattctcccccaaaaatagaagaaaatacttcccagctcattgcatgaaggccagtaccaccctgataccagagccaaagcagcacaggagaactacagagcagtttcctgtgaatagacatgcagaaaccctatgaatagagatacaaaatcctaacaaaccgaatccagcagcatagacggatctatacaccactcccaagtgggatttatcccaggaatgtaaggttggttcgacatttaaaaatcaatgtaatatatgaatagaatggaggacaaaaaccacatgatcatctcagtagatggcagaaaaagcatttaatacagtcaacaccttgaagtatgagatagagcttaaatgagaattgtggtagcatctttgagatatcgaggaggaacagtcttttcagttactcctgaaacaataggacgtaattcagagattccagataaggctttttatctgaacccatggtcacccttgatcatgtgactggtctgtcatgacagaattatagtaacttgacctgctctgctaggtcacactttattagtcccaaattatttcctagtgctgtctctgtagttttgggcgtctccttacatctgttagcacacagcattcatttgtctattggttgacatttttaacttttctgttttgtcttttttctttgcaaaatgcttgcctttttaaaaatgaaaatttatcacttttttaatcagataaaagaaaacatttattttacaaaaagatctgtaggtgggtagagattttaattctaartctttgaggcctagcatgtctcrtagggggaattctttagtttacagagggcctcatgaactctccatattaaaaataggatttacatcttgcttatacaatgatgaggctcagacagtagactttcaggacagatttggcctgactcggtagcgccccttactgagttaaatactttaaaaatttttgagaaatattaatactaaggcacaaaaaactaagattgcccggaattaaccacagttaaagtaatggtagatatctttttcagtcagctttcactgcatatgtacgtttcccaccaccatatgtaccatgttacaaccatctgctttttgccctaatgtaccaggagcatttccttatgtcttctagagcagtgctgtccaatagaattataattcaagccatttcaatacatttaaagttttttatagccacattttaaaaagcaagaagccaatgaaattaatcttggcattatttaaccccatatatccaaaatattctaatttcaacacctgatcaataccaataaaattattaatgagaaaatttcccttttagttttttctctactaagtctttgaaatctggtgtatattttgcacctacagcacacctcagtttggccagtggctactgtattggccactggctgcaccagtccagagcattatttaaggctgcattgaatcccgtcctgtgcgtgggctggaatttatcattaatcagaacagcttcctgcctcctgttagtcatttagattgattctgggcatttactgtaatgatgctgatatacatttaaatatttgtgtgcctctgtgattgttgtcattacaagtaggtactgggtcataaggtagatgcacttaaataggggttttgaacacatagatactttgccctccaatgaagttacacccagaagataacagagtacatttaagatggtgtttcaacactgagagtaggtctactatgaaggtgacagcagcagccatgaacactaacaacgcaagttagctcttgggtaagccagtctgattccaggttcaaagcccagtgccaattcctttcactccaaataccaaattccgytttagttgctagggacastgtgctggacagagcaccgtctataccctcatacagttcaagyctaaagagttaaagcagtttcagtacagtgtgatcttgatataacctgggttcttcagacagtggggggtggagtctcaatagtctattaggcagcktaggaagaggacggacagctaatgctacgatgtgctttaacactgtcagcctggctggcagcgcatgggactggttgcttggtactttgggaatttagagaaggctatataaacttagtcttgcaactggcccttgtgtgaggaagtgtaagagaaaagagaaggaatttgtccatcagtttcatgtcccattgctccaaagtttgcttctacagctgcccagcacttccaggttgggcatgagtgggcactagacaggttcccaggcagggaccagcaaccccagggtgggtcagcccatscagacgctscagtggcawctagaataagaatctggagcagccaagagaacttcagggcaggcacaggaagagtctgacccatgtgcagcatcaggcacactcatcctggccactgttttccacacctttttgattaacactcagctttttttgctggtggcactctagcctgtgtcctttgtctgcagtccagccccacagacgcasataccttgcttgagttgttgatttgggtctcttascaatgtgcttttttcctgaaggatgaagaggcagtgaagaagctgacagtaaatcctggcaccaagtccaagctccccaagccagttcaggacctcatcaagatgatctttgatgtggaaagtatgaagaaagccatggtggagtatgaggttattgcgctttatcattttatctgtgarcatttgctgtggatgattatttgctgagctagtgaagagctgtctgcctgttcttgtttctgtttcaaaaacaatacattggctgtcagcttcttgtacctgtccttcaatcttaaattgtgtgagtgttggggcstggagtggttgcacttttgcagagggttgtttgatttgcagtgaagcatgtgttgtgttggagagagttgttcctggtccctagtcccctttgtactttttttctgagacagagtctcaccatgttgttgcccaagctggtctccaactgctgagctcaagtgatccacccacctcagtctccccaaatgctaggaatataggtgtgagccaycgtgcccggcccaccctttgtatttttccccttcttcatgctgtggcaaggtgtattagccatgcttcctttgtggcccaaccaaaccaaccaactggagttaccatgggaagtgcaagatagcccacttagagtaaaagaaaawtgctgtgacgcttgattcgtaagataaaattcataccagtttttaaaaggttggcagtggggtgggggtggtggttgctggattagtcatgcttctgtccagggcagaatggcagagactgcaggcagaggctccgtgtttcctgtctgttctccttctcatctccgctctccgcccrggagatgagtgcaaaagggcggcccccttgttcttgytgctcctagcatcagagctcttaagtactgaccctgggggccttcagagcagaggtggtcccacctggccagcaaacaccctctcctctctaccctagctgctgaacccagaagcttcaggcykctctgaaaaacaagcagctgtgatgcatttggttattccctttgttctaggctcctaggaaccagtggaggttaagagtctcagatcagccttaagcattccacccttctccatggggttgctcccttcacgctcacgttctgctgtcttcccaagtccttcctcctagaacctcctggcctgccttagagctgggaggacagggggtcaaaactgggcagtataaaccactggcagcctaagccgcatggacatcagggccaaccccgtatctccctgccaagagctcagcctggcaggaatgctcacgcctgtgctgttgtagagtggagtgttgagttacatcctctaacgggtttaaaaaatggccagggcttgttcgctgtgcttgttgaaatcgctgtgtgatctgacttttgtttatgaggtcactagtgtgaacaacttatgggtgggctcactgagaatgagggacggaggtggagggaaaggttgagaggtgctacggtaagggagaagaggggctcgtttcattcacgttttgaagtcctgcacttcatttccagtctcccacaccttggtctatctgtgattcatagacgttctcagctattctcaaacccaagtcctttcctgtgaaatgttgtttttgttgttgttttgtgtttggtttggtttggtttggtttgagacggagtttcactctcttcgcctgggctggagtgcaatgcacgatctcggctcattgtaacctctgcctcctgggttcaagcgattctcctgcctcagcctcccgagtagctgggactacaggcgtgcacgactgtgcctggctaattgtttttttatttttagtagagatggggtttcaccattttggccaggctggtcttgaactcctaacctcagatgatccacctgcctcagcctcccaaagtgctgggattacaggcatgagccatggcccccagcctgaaatgacattttaatgtttttcactggacaggtaactagtttagcaggaagaaaagggacaggggcgctgcttgctgaaacaagctaaaaggcagctagctggaagtgtgtggaaagcggggtgcccactcctgacctcagcggggtccacgtgggattggggtaaccatgtggagaagtagacacagtggccctcggggcttcatccccagcaccaggggaacctgactctccctgtgaggagggcacatcctgagtccagaagggaatgggttccgggcagtcacgacacatggcagggggcagggttccaggctgcagccctagaagcctcctcctggctgcagctggggctcgtgggtccccagtgccaaggtgtttctcccacttttctgtttctctctcaactgggcagctgtggagccactgctcccagcccgctgtccagcgctgtgcctgagtttcttttccagtagtgagggcggcctgtgtggatggagcccacctcttattttagtctgtgcgtatgttttgaggggtgtacaattagggaaactaggtattttcttttttttacataaacaccagaattatacagcgtggaaaatgtcgcgcccttcagagctctgccctcactctggccatgctctgccgtcagaacttcttttgggattccttcttgagaattgctttcagagctgattgagggtccataccaaagtcactctgttcttttattgtaccttgttcttggcttgaaatagattatccaccttcttccccagatgtggctccggctacttaattcttgccagaaatcagatcttcccttargatggagtttgcagtgttgagggtacagggaagcccatgccagggcttgtggatgttattagaagctgttggctcctggtaggtgtctgatgagctgtgagcacttttcacatccttttatttaattttatcaccatagcagttccatttctaagattcttgttcagttctttgttccaagcactgcaggaagtgctggacatgcagaaatggaaaggcgcagtcacggcccccagggagctcagaagggtctattggcaaagccccagagacgatgtctcaggatacagagtgtggggcccattggtacacaggtgtctccacgcaggggctgagccaaataggcagggctgctcgcaaaagggagtgagtgccttttaaggaaggtggccccacttaacaaatggaaaatgaaggctgcagatctcatgcttcttccactgcagcttctcttgatggcaggcagttcccaagatatgagcagtagcaatatttgttggaggtgactgatctgaaagggacagcattgatttgaatgtaagtccataagttcaggagtgtgtcctttttaaaaatagtgttcaacacttgaaaactcttggttcttttccaggtgggaacccaggggtgcacttaactaactgccttggctctgggaccccagggaaggccgctgggtggggtggtcagcatgatttatgagccctcatctgcacatcagaattggatgggaattatgctatatcttcgtccagacgtgctggactgtttgaaactgggcataggggcagaggagacatggttggctaagcccagccgtaaaggaagtgagcaagaatcttcagacacactgccatccctcatggtggggtggggctacagactctggatttgggtcactggtgtcctcaggaaatcccagcaggctcctgactgctcctgttgggggcctgagggtgggctgcccggtccagctctcctgygatcacactgcacagtgcccagctttcagagcgaaatcccctgtctcctcagatcgaccttcagaagatgcccttggggaagctgagcaaaaggcagatccaggccgcatactccatcctcagtgaggtccagcaggtaagcacagggctaccaggggcctcctggaaccctcctctggccgacttagggggtgagacctgggggtggcaggggtaayatttactcaaggttaagaaactggaagtactgaactgcacttcackagggtttcgatttttttcagttcaataaatgacaagtgcctgctacttacaaaagtttatcacaaaactaatgaagagcaacatttttcagttgtcagatacttagtaaactgaccataaacttgaagrcgttggttaccctctctgttaaaagtgaagtcatccctctgtatcctcggggattggttccaggactccctcggggttactaaaattcactcatgctcaagtcctagagtgccctgcagaacccatggaggagaaaagttggccctgcacatctgtgggtctcgcatcctgagattttttttttttttttttggtgggatttttcttttctttttcttttttgagacagagtcttgctctgtcccccaggctggagtgcagtgtcacaatctcagctcactgcaacctccatccccaggttcaagcggttctcgtgcctcagactcccaagtagctggggttgcaagcatgggccaccacacccggctaattttkttgtatttttagtagaggtggggtttcactatgttggccagactggtctcaaactcctgggttcaagtgatccgcctgcctcagcctcccaaagtgctgggattacaggcatgagccaccacacctggcctgagaatactatattttttatctgagtttggttgaattctcaactgcagagcccacaggtgtagagagctaactgtatttattgaaaacatctgtgtataagtggacccgcatacttcaaatcgattgttcaagggtcacctgtgttgtggtttttattttatgtgtccttaagagttaggcagagtttattttgcagttactaggaagtcatcaaatggaagcctctttcattcatgttatttcaacattctttgagcatctttcaaggtctaccagtcccggagccttccagctacatcctggaggggctggagggttccgcttatatttgtgggtgggtgcaggcctggcctgtagaaagaaggaaagcacacaggaagcagaagtgggcccaggcagcgggctttctggctggtgctggagaaaaggcrctgaaccggatctgtcaacttcagttacagctggctctgagcagtgaacctctctccttgttccttactgactgagaacttacaaggctttcctcggccccagcttcttcccatgcaatagtcttcaggaagaagagctggaatagcatccttacccattgccagagccacctgggcagcacagatggaagttgtacaacttggtgaagtccatgtcacagcgagaagcaggcgtggggcttcggacctgctgggtgccacttcatattcccttgaccttcctgtggtcacctaggctgtctgcgaaattcctggaatcccagtggccccgctcttccatctctgtgcattttttgtgcaccctttgcatatagagcaccaagtgacactggcagtgagtgtaaggattgcttagcctttctgtgcctggccacctcaacctccaggtacagtaaaaactaattccaatgaaggtcagtggaggcagggagcctgacwgaattttatagcgatgggcaacctcctcccaacattttattatgaaaatgtttcaaacatacaaaaagttgaaggaattttacagcaatagtcattagcccaccacctagattttacagttaacattttgcatagttgtggcggggtttcaaatgtctgtaactgcacagttctttgtacaaatgaaacttcatgggagaagcccatcacgtgttgagcagtgcttttagaggatgggggtcctgccctgctctttaacaggaagatggtcttctggtcgtttcccatgtgtyctggcatgtgcacataccacgctacttctggacctgctgcagcacccacctgctaraagagaaagcctggccgggggcttggagctgctccctcagtcttgcattccttctgtcccctcctctccaggcggtgtctcagggcagcagcgactctcagatcctggatctctcaaatcgcttttacaccctgatcccccacgactttgggatgaagaagcctccgctcctgaacaatgcagacagtgtgcaggtagcgcaagggttcagaagggactgcaggtctgctgggctggggtgtgactaccttgcagcygtccctccccatcatgatccctgagggcagcaccaatgctgggagggccaccctcttgcccttgttttgaagttgggtttctacccacattgatggaggcagagctgtttttcctgcccctgttctaccaaatccactggggaaagagctgttggagagggacagcctctccctcataacagcatcttcctccccattttccctccctgccttttaagacagctcctggctcaggacccatttgtctaaagtaccttcactgtaggtcccaaatgtcagcatgtacgagaggaaagacagttcttccacctctcaactcccccaggccacaaggccttgttaacattccagaaagtccttatgagctctcaatatgtgcagcaggtaacaggctggccctgaccagcaggagggtttgccattcactgtgttggaccttctctgcatgtaggttttmtctgccacctgggtgagtctgtctcattcaccatgatacctaagtcgggggctttcttttgctcctccaggccaaggyggaaatgcttgacaacctgctggacatcgaggtggcctacagtctgctcaggggagggtctgatgatagcagcaaggatcccatcgatgtcaactatgagaagctcaaaactgacattaaggtaacagggtcaggccttcctcaagcatcttaacctctcatcctgagagcagcggtcccaaacttccatgtgtgttaggatctcctggaaagcttgttaaaacacaggtggctggcgcccaataattcacttttctaacaagttccyggacattgctgctggtggtcctttgagaacctttgggcgtttcacgtgtagataatgcaccttgtttgcaaggcagccttccaagccagcacctcagcttggcgtacaaatttatttttgagggtcttaccaaaagttcttttttgtttgtttgtttgtttgtttcctctccttaatctagagaggagctctgtttttctaaacccttgtagcgtgaacttttagaagacttattaccgrtgtccatttcagaagtggaaatgcttgatggcacctgtaataaaaacrcaatgcttgsgttcatttttctctggtgctgaagtggactgtgttggcacacacagtctctgaacaccccgcttagaccaactagaggagggatttttgcctcagcttctagatggcccggtccttgagcctatctccacactcatgtgccccattgtcctcagcccattccctgcagtgttgcaggggtttgggtgggcgagagtatgttgagtctggtaccaggtgtttacatcgctaaagaaagagccttggcttctttcctaggacaaagtatagacctatgggtccaagcagggtaagacaccacatgtcatttgttttgcccctagagcaccttcctgatgggaaaactgtaggtgtggttcttygtgaagggattcttattctctttttacaattctgaagccttttaattaaaagacagggaggtagaccagcattctaggttttctgaagtttgaatataaatatgaaaataaaacataactagtctcctccgtaatactcaggcttactgagcatagattacatcagctatttgacagatgcttgttaggcctgtgctctgagccagggataattttcattgcacatcatagctgtgacttcctctggcccattgtgttttaactcatgctgagctggactctcttccaggagccaattgcttgttctggagatgccctgttcactgacagtgaatcccacattctagcttccctgatatcccaaaacatagaattttaagacaaaaaggaaccctgagattctctagcagcccaagtagatgaagaggtggaggcttaggkaagtggagccactggcccaggatctgcccagcccacaggcctgggacacaggctctcrgtcatgcccggcttcctttgaggagtgtggtgttgagctatgcattgactgagcctgagcattcctcctctgtagctctcctgggtctcttttgtgctaatcccaagattctgtttatccaggtggttgacagagattctgaagaagccgagatcatcaggaagtatgttaagaacactcatgcaaccacacacaatgcgtatgacttggaagtcatcgatgtaagaatcccttcttcccccacttccttctgtgtcctgccagctcttccctgcccactcctccaacctgggcctgggtagaaaagagcagtttatttactttaaataacccaaagaagtgactcatttgttcagcagaaaaattagtagttttttttttgtttgtttgttttttgtttttttttttgacatggagtctcactctatcacccaggctggagtgcagtggtgcaatcccggcctgctgcagcctctgcctcctgggttcaagtgattctcctgtctcagcctccagagtagctgggattacaggcgtgagccaccacactctgctaatttttgtatttttagtagagatagggattcactatgttggccaggctggtcttgaactcctgacctcagatgatccgcctgcgttggcctcccaaagtgctgggattataaaattagcagtcttatacagtagttkggggatggctttttattctgttttaaaggacatttcctgtccccaaacctggtctcagaacatagattatcagatgtccaagataaagttcctcaagtgcacatctgctgcacagtaatactaaccagcaatggctgggcgctgctgggcaggacctggaccttccatcccagccttgtggaaaacactttttacattgcagcagaccttaagtcttctagccttagggacagccggtcatttctcgtgtatccagtcctgtctttcagtcaaccagagtaacaaatggcttcttttgtccttccctttgtttactactccaaccagatctttaagatagagcgtgaaggcgaatgccagcgttacaagccctttaagcagcttcataaccgaagattgctgtggcacgggtccaggaccaccaactttgctgggatcctgtcccagggtcttcggatagccccgcctgaagcgcccgtggtatgtgcctggcctggcgaggggtgggcaatgcctgtctctgcaggtgtctccataaagaactttgagcaagaggtctagttggtttagggggattctgccagacatcctttctttgggccttcacccttttatcctcctgaccctaaccctgtcaggggtttcaaacacagtttctggaacaaaggaggcagagcatccaggccagggcctgctgcagatgctaatcgggtgtgttgacaagcaaagaacagacacgtggctacaggccaagctgagtccaggcttatctctaccacttcccagccgggccacctctgagtgtcagtgtcttcagcaggaaaacgtagcgatgaatgagtaaggctttacctagacacgagggatcgtgatgccacctgctggattctagatgggtccacctggacaggaccttctaagcctcttgtttcacagttgtagaatgaggaggagagaagtttaaatgattctctctggggctgtgcagtagtgtataacgggcaaatggcctaccctttgtgaacctcgtgtttcatttacaaaagggaataaaaataccagcctgcattccttgggtgttgacaggcgctagtttaagtaacactgatgagctyattccgtcctcatggcagctccatgagactgtgttccccatttgagaaaagaggcaagtagagtccagagaggttacgtagcttcttgcagctccttggcacctggcagagctaggatctgacagcctggcttgtgagctaaaactttggtatttcctcaccatgggcattgtgagaattagaagtgatggattgcagcacttagctgggtggcttgctcaagttggcactcagtgaacagctgctcctaatttcccatcagaagattctcagctctcccttttccgaccttccagacaggctacatgtttggtaaagggatctatttcgctgacatggtctccaagagtgccaactactrccatacgtctcagggagacccaatagscttaatcctgttgggagaagttgcccttggaaacatgtgagtaaacctggctctgggactgatggcatttcatggggacaggtggaatgggctataggcagaactccccttggctgggagagtagaaattccccactgcagttactggacscaccaattaggattcttttcttrtaagtagcagaatccaattcaagttaagggaacaaggragatacarggatacttcaggaaatgcaagggcaggaacgcagccaggcctccagagctggcagtgtcttctctccatggactgggaagcagagagattgagttgcacaaaggatgatcccccaggccgcctcctccactcaccagtgtttcagttttcttagaccaacccaaatggaactggaattttaattccacttccagattctccatagagaaagatctgattagtccagcttgatttggacatcgaccctagtcctgtgaactgtaaccaaaagcacaaggtcaygtaaaaggccaggggtctggggactgtggaatgtggacggaaacctagagctgctgaccaccactccaaatagggccttgccttgaaaatggccccatagcagtgatcgctgggcacaaactatgttcagccgcaactgcagtttcaggttctggaacagttccagaaactcaggagggagcctgagcagtttagatggtctgggttttgtggacttttatctcatctctgtatctgatcttattctcctaatsaaactgttggtttcgagagcccagtgtgaaggcctcttctgagactgtcctcttttgaataggtatgaactgaagcacgcttcacatatcagcargttacccaagggcaagcacagtgtcaaaggtaaagtgtttccaaagctgttgctacagcccgaggcaccctggacagcacagaagccrggggcttgctgtcctgagaaggctgccttgtggctggctgtcaaacagctggagattcattttatcttttcgaggggtgtgtgtgcgttgttgttgttgtttggggggtggtggtggtggttaatatgctgcaactgaccatgattggaggttcattttatttatttttgtaaaaaaaaaaaaaaaataggcaagctctatagcaggaggttcatttttaaaaacagttcactctctgtggctgcagctggtatcacagatgccacaggagaatcttggtgcaggcaccagtaaccagrtgcaygggtttcggctttaacmtaacttgtagctacagcagtgagggacctctcgtgacatagtagtgcctggagcatcttggattgctagaatttgcagcatatgatttagaaccttccactgcctggttgaagtggccgctttgaaattctattgagccgaaatgtgatcctgtagggagggtactgccactgttctcattaaactcagtgaaggttgatgccctgggaactttggtttattgccttagttttatatctgaagaaagatagagcatgtctttaaaatgagcacatgaggctgggtgtggtggatcacctgaggtcaggagttcgagaccatcctggccaacatggtgaaaccctgtctctactaaaatacagaaaattagctgggtgtggtggcgcgcacctgtaatcccagctactcaggaggctgaggcacgagaattgcttgaatccgggaggcggaggttgcactgagctgaagtcacaccattgcactccggcctgggcgacagtgagactccatctcaaaaaggaaaaaaaaaaaaaagaaagaccacatggacccaacatcaaatagagctcatctccctggaagctttgccacatctgtactcacagttcatgtcacttgtgacttctgtttttcaggtttgggcaaaactacccctgatccttcagctaacattagtctggatggtgtagacgttcctcttgggaccgggatttcatctggtgtgaatgacacctctctactatataacgagtatcctttcttgagtatgctgtgtgagcacaaagggatgttctcgagctacagagtcacttatgtgctgtcagattacctggggcagacaaggattagaggctgtcctgtagtgtgtcccatggtgactgtttcccttctgtggtccctccctgtgcatagcctggcttayagggtatgagccttcccccagtttccagaggatgatctcctctcctcagtctgcctgaagaagacttagagtaactttcaggctggcattgagcatcctgccagccccggggagatgaggcaacccagccccatgaagaggccttagagtgactttcaggctggcactgagcgtcctgccagcctgggggagatgaggcacatgtacataccctctgttgtatggctgttggctccttaacaagcttcccctcaggtacattgtctatgatattgctcaggtaaatctgaagtatctgctgaaactgaaattcaattttaagacctccctgtggtaattgggagaggtagccgagtcacacccggtggctstggtatgaattcacccgaagcgcttctgcaccaactcacctggccgctaagttgctgatgggtagtacctgtactaaaccacctcagaaaggattttacagaaacgtgttaaaggttttctctaacttctcaagtcccttgttttgtgttgtgtctgtggggaggggttgttttggggttgtttttgttttttcttgccaggtagataaaactgacatagagaaaaggctggagagmgattctgttgcatagactagtcctatggaaaaaaccaagcttcgttagaatgtctgccttactggtttccccagggaaggaaaaatacacttccacccttttttctaagtgttcgtctttagttttgattttggaaagatgttaagcatttatttttagttaaaaataaaaactaatttcatactatttagattttcttttttatcttgcacttattgtcccctttttagttttttttgtttgcctcttgtggtgaggggtgtgggaagaccaaaggaaggaacgctaacaatttctcatacttagaaacaaaaagagctttccttctccaggaayactgaacatgggagctcttgaaatatgtagtattaaaagttgcatttgaaattcttgactttcttatgggcacttttgtcttccaaattaaaactctaccacaaatatacttacccaagggctaatagtaatactcgattaaaaatgcagatgccttctctatttgtgtattgcgtgtctggtctcattctgactacagatatggttaatcttcacagtgcaaggtcccaagagactttggggggattgtttctacccttaatctgtgaaaccccagaacgtgccaggcagcaaatagcattgcttaatgggaatgccccacctaagggtgggccaagcaccaggcataggagacactttttttttttttcggcttatcagatgcattgtggtgatgaactcatcctgctctctggaggactgcctttcatacaccacattgccttgtacaactgctctgcatttgagaatcatacttaaatgtttacgtttcaattgcctgaaagcagggccagtgtcttatgtcacctctgaccttttacggaaggggacaagtgaggtagtagctcacacctgtaatcccagtgctttgggaggccgaggtgggaggatcatttgaggccaggagttcaagaccagcacctttgacctggagaccctctctcctgatcatccagcaatccaggctgttcggctcttgggctcctgagtattctgcactctttacctttttttttaatcagcacagagaaaggcaattaccctcacagtacctgatgaaataagtatttttaggttggagtgattacttagtgagttccctgtaatcaaaactggtttctttttttaaggaagattcacatttctcaatctattttcctttcaaaagagagaaattagcactttatgttttagtatacacattctgcttttctcccttcactttaaaaaaattcaagtcctggccggatgcagtggctaacacctgtaatcccaacattttgggaggccaaggcgggcggttcacgaggtcaggagatggagaccatcttcgccaactggtaaaatttcatctctactaaaaatacaaaaattagctagacatggtggcgctcacctggaatcccagctactcaggaggctgaggcaggagagtcgcttgaacccgggagtcagaggttgcagtgagctgagatcatgtgtggcaacagagcaagactccggtctcaaaaaaaaaattcaagtcctatctcagggtagcaactaaaatgtgagaatttcgtttaaaaattaaagccaaccgtgaacctggggttggagcctgcagtgagccgagatcgcgccactgcactccagcctgggcaacacagcgagactccgtctcaaaaaaaaaaaaaaaaattaaagccaaccttgcatagaaactcggggtgctccatgagagaagagagaggtatagccctctgcccctcctggtgagctgccctcctcccgcctttgtgcctggaagtgcccttggccaacagtagttgcccaaggcagtactgggctcacatgtcagagcacactgttgcacacagtggtgcatgcatacatctataaaagatgcgctgcgtacacagtagtgttttagccaatgtgctagccaatgaattctgcatcagtggttatctcttgctacacaagaggtgaagaaccattccttcaagcgtcccagagctctaaggcgaagctgctatagaatgatttgcctagaactttgccttagggcaaacctcaagtactgcttttaggaatgaaatctaatggtggccttgtccctggtgcgggcatagtatgtactcagtgttaattgtttacaccaaaagcctggaagctgcattgtcttttggccttcagaaaccttgtatcttaactgttaagatctgaacattgggaatcattcacctctgacctgttgggctggttttattccgctctataaagtacacccaggtgctttaggagttcgcatttctcaaagtggtgtcattgcctttcccttaaattctgttttgactcctcagagattggtggttgcttttttgaggcatagtgtttccaccatttcatcaggcagggcctgccaaattgagtctaagttgaggccattgaggtttagggaggtctgatacagtgcttagcatcccactgccccctcacttctgccattcagcctcagcatggaaggttagatggcagcttccctttggcatgtgccaaatatgcccatttgtatggcttaagaggtcaatgttggttttctcatttctctttactgttctctagagcaggtcatctaggttataagatatattttggagacttcaaaagtaaagaaaatgtggcctgtaaacaccttcctcctcagcgaattagcccttatgtgaaaaatgttgcccactggactagggaacagtgctggtaatagggacagctggtgtgcgtcctatgggccatgtggactcagagcactcaatgccacccaccactgtggcattctgtatagctttgcttctgatcagcgacctcattctacagcacagagttcagcatcaggcttgtacttagaattaactggttttgccacatgccccatcacccagaaatgacctaaatgaagagtagaatggctcatgatggtgccatttgtgagacagcgtcctgaagggatggggtttcatcttacggatgcagtagaggcttgaaatcagagaccaacctggtgtctcccccccrgccaaagcacatgggtctgggaaccagtgggtgaggtgggagtagttcctcttgctgtcaccacatctgatatcccctcacagggcttgtgtttggaggtcttagtccctaagggagagatgcttctagcggacaacacaattatggtttcatcgacttagaagatgaggctaccatatggctgtttggggctccttgtaccactgcagcaatgtgcagaggagggggtgaccttgctggcagaagggactgatcctgattaccaaggggaaagtgggatgctgcacagggaggcaagcaggactatgtctagagcccaggagattctcgggagggctttagtgccaccatgtccagtggtaaaggcaaggggaagtacagcaaccaaaaacactgcaactccaaaaaatgacagcactgtggaaaattcagacccttcaggaacgaaggcttgggtcactctagtcaacaggttctggctgagggcaaaggaagtaaggaatgggtgctagaaggaatgtcacagatgtccactatggcttcatgaccaattacagaaaaaaagaccaaagcagccagttagaggggcagagacattgcaggttttagggggttttgttgttgtgttttggggttttttgaaacagagtctcactctgttgcccaggccaaattggagtgcagtggcgccatctcagctcactgcaacctccacctccctacaacttctgcctcccgggttcaggggattctcccgccacagcctccctagtagctgggattacaggcacacaccaccacgccctgctaatttttgtgtttttagtagagatggggtttcaccatgttggccaggctggcctcaaactcctggcctcaagtgatccacctgcctcggcctctcaaagtgctgggattataggtatgagccactccacccggctaagacgctgcagttttaagccacagaacaagtctagcctgagtgtagggtttctgatggtgagttacaatggctatgcatacactcaaatcgagttctttattatagggtacctataaatgtgtacatcacatttgtacccctaaaagtcctgccctttagttcagtggattctggattctgaggatactcttggtcctttccagagatgaaggcaggcaggggtsagggcccacagaagggaatccctatattcttggggttgtctgagccagggctcatgcctgtctggtgctttcaaccaaacctctctcatgggctctgtaaaaggaacaatcaggccattctgaatcccccagatcttgtacctaccttttagaattgtcttgagagtgtgtgtgctgattctcctgaagtacttcgtgtggttcctgacctataataagtgcttcataaatcttagtcattattgttaaaatcccaaagagtggttttgctcgagtctgaatccaaaaaggaagctccaggtaagaggagaaactagagaacaggacacagaaaccatcctgtgttttttctatcctgtgaaaccatcaccatgacactggccttccctctcagtgtggcctcatcctccatgtccctccctgtagtccccttaactgtgaagtgtccagcctctccagcacttactcccaggcccagctccacttcaggcaggcctgctggggctcagaatagcccagctgctgtctcagcagatggccaggctaattttagccatgtggtactcacccagggaccaggctgggctttttagatttgaataagccagtgtgcaactttggtttagagccaataacaaagtttggagctgttgtgatctctgtgtctgcctagcactttataagattccagaaatataattttaaaggattttgtttctgtgaaccaacaagaacccaagctatggagccagcaggcagtcaagccagcagggtattgatggagggtggtgagaagcagatggtggcaccagctcctgcctcttctccctgatgacaagcgggtggcagggcctcagtatcccgggtgcactgtgctctcactgctctcctggccaaagtgaaagaaggcagcagccaactcagcctcctggatcatcctctgaaccactcgtgggtggcaggctgcatcttcatgctgtggaacaactgtggtccggaagaagtcagccagatgccagcaagaacctactctggcactttcatgtgcagtccctcgagacaacctaatgtgaagtaggcagatgtggaaacaggctcagagaggtaagaggtcccaagagaggctgagattgagccaggttgagaacgtgtcttttccattgtgatgtttctaccttattgttcttcatatgtgaagactgcctttcatcccagttcttccagagagttcagagacaacacacagtgactcggaaagccacattccagcctgccttcacctttccatgattaatttctagttgcagaagcaagttgaccagagaagacagtagaatgaggagaccagactagtcatgcttcctaaactgggtccatgaactcttaaaagttggtttgggtggtctttggggaatctgtttgtcagttgagctgctttcagcttaaaaaataaaaaggaaagccacatttcaagaagtgggagccagacactrtggctcacacccgtaatcccaactctcgggaaggccaaggcaggaggatctccagaggccaggagttttaagaccagcccagcagcataatgaaaccctgtctctacaaaaaatttaaaaacttggccaggcatggtggcttgtgcctgtagtcccagctgctagggaggctgtggtcggaggatcacaatcacttgagccccggggttccggcctgcagtgaactgtgatcacatcgctgcaccagtctggacgacagcgagacctgactctaaaaaaacaaggttgggtgcggtggctcatgcctgtaatcccagtacttcgggaggctgaagtgggaggatcacctgaggtcaggagttggagaccagcctggccaacatagtgaaaccccatctctagtaaaaatacaaaaatttagccaggcagagtggcacgtgcctgtagtccccgctacttgagaggctgaggtgggagaattgcttgaacccaggaggcagaggttgcagagagctgagatggcgccactgtgctccagcctgggtgaggcaacatagtgagattctgtctcaatttttttttaataaaaatttttaaaaattgatgtttgcagcgttggttaattctgcttctctgtttctcttggcttttcatggttgccagatggcagttggacacctagcaccaccatccagaggcaggaaaggagagttaccccct

SEQ ID NO: 93201 - DNA, 62898 bp, Homo sapiens
cagctctgttcagtctaaaagacaaaaagtcctgagtcccattcagtcctgagtgcctcagtacagtcagccaaagctggattcacctcacccaagcctgcatttcctcgtagagagaatcagagaaagttagatcatttcatctcaaaaggaaaaagtatgttatctccagcttccaattcttagagtcacggctgggaattagtgtgaggtgagtgaggcattctccttgggctcaacacttaaggtgtaccaaaaacctataatcaaaagaaggaatattttaatgcaaaattttgaaaaataaaaattaatgttaaacaatccataataaacaacatatcaaaattttatgtaatgacaggattggtttaatgatttttgccttttgccttaggcaccattaagtattagtgggacatcattcctcatcttacctgaacccactgaatcagaatttccaggagtgaggcccaggagaagtctgttttttattaaactctttgggtaatccttacacatgataaattttatgaagtcctggaaagatgatctctgaagtttctctgttgccttagtttgcatgttctgatgactcaaacagccctcttggaggggcccaagtagcaaggaattgaaggcagcttctacgcagcagccagcaatttaggaactggggcccccaaacagcttgcaaggaactgattcctgccaacaaccacaggagctgggacaggatcccaggcctggctaacaccttgattggagccttgtgaaaaatcctgagcaaaaaggccttttacgttatacttagactcctgattcaggaaaaaggtaagataagaaatgtgtgttgttttaagccactaagtttgtgttcatttgtttcacagcaatagataattttaatactctaagtttatatatatatataaattatattttataattaatattaattttattcagtaatgtttaaactggttcaaccatggactccatcagtattacaagtaatagatatgtgttcatttattaaggatatacttctattgccatgcttatattaaatattggaatatttattttgtggtaaattatttagataacagctttattgaaatataattcagatgtcataaaattcattcatttaaagtgtacaattcaatagtttttagtatagtcagagttgtgcaagtatcattacaatcaattttagactatttttagcagcccaaaaagagaccacatacccctcagccatcatcaccctccgcctcctttctccgtgtcctaagcaatctttaaaaaatcttaggctgtttcctaagatctttctattctgaacatttaatataagtggaatcatacaaatatgtgttctattttagaaggaatatcaacctaatattttaaaggttcatccatgttgtagcaggtatcagtacttggatctttttttaatggccaaataatagcccattttaaaacagtccattgtgaataaatttccattgtaaatcttttttttctttcttaggtaaaaaaataaacagaaataaaagttttaacactttctttactttttaaagtgttagaccattgcatgaatcccctaggtacacacaccttagttgatgacattcttatgatacagtctttggttttatgggggatgtttgtctaaatactaaacaataaaatagttattttatgccgagggcaaaaaggccctccacaaaatgatggtttgagaagaggagaacatttattctaaagccatcttattaaattttgcctcaaagcaattcacattgtaacagggctctgatgcagtcatttgcatttatattgacagttggtcaatcagtattattgagtacccaatagttcataaggccctgagagtcaaataatacaattatgaaggccataagaagccagacaggttaaacacagtcttccttgtgatgctggtgaacagccatatacttactgatggatctcacctcccaactcagactcttatggtcagaggcatatttagtgctttcataggctgtgatctactaaggatcacaatttttttcctataagtgttcatcatcatagattctgtgttacactgcccaaggattcattgctcctagctcttggaaatttgtttgacatcactcagctagcaacccctttgggaattattttggcagaagagagtcacctttgccttatccatggtcatactccctaccaggggcagactacgtccaatgactggctaataaaaaaggcctggctcctcacctcaattcaagacaaccctgaaaggccctcctatcttcagaacttgtaacagggtcagctgacatcttcaacaatattgcattacaaatcaacttctccctctgcccaaccttggttatttctctaccccccactggagttaatcctgagtgcactccttaataaacttcctacatgcaaatatctatctgggagtctgattttcaaaaatcctaacctgctccacttatggaactttctaactgttcattagaacagttcatttgaggttgagcacttgacatatagagaaagaagtacaacaagagaacacaagtgattcagtcagtaagtcctactaatcatggaaaattattgacaccctaaactcttacataaagacttcccagtgttttttcaaatctcacttttgatgttactatgatatgatttggcagtgtccccacaaaaatctcatcttgaattgtaactcccataatccccacatgtcatgaaaggtacctggtgggaagtaattgaatcgtggaggagggcttttcccatgctattcttgtgacagtgattaagtctcatgaaatctgatggttttataaagggcagtttccctgcacacactctcttgcctgctgccatgtaagatgtgcctttgcttctccttcaccttccatcatgattgtgaggcctccccagccatgtggaactttgagtccattaaatttatttttctttataaattacccagtcttaggtatttcttcaaagcagtatgaacgtggactaatacatactatatccatatatttatcccagatgacccttatgtctttgcaaagaccttattgagttcaaagttcaaggtgccacagaacattctaaaacaggtttcatctgagttgaggatcttttacactccatttcatggtgttcaggtttttcaagactctacatttatgactttgaatacttcttctccccttataactgaatgatcaaagtggaagtgaggatgatgattgagatagaagtataaaccatttaattcaacttggattaagtttgagttgagatgtattcaattcaagcagsctttttctggttttcaaagaaaactttgttgttgttgcccttctcacttgaagagctaaaaggaccccacaggcggtaccacagaaaaaattagggtctaggtcagaaagagggtttatccaaccagtgcaacatggtataggtagattataaaatcagtcttcattatcaggaaggtctaaggctattgctgaaatagttccaagcaccagtccaagggtgagacaaggaaggagatagaacaaggacccaggcagatagctgagaaaataaggcattcaatagaagcagacatctggcacaatttaagaaatgtggttcagaaatttgcctgtgaatggtacataggtgctggagcttcctttctcagattgcctggtgcacacagcagggattaatgtatcaacttcatgtatgccctggactggaaaacctcccaatttttatttcctttttcttgcacccatttcctcaaaatcttactcattaaaattgacagtgtagactggcaggtcgagaatgtgatggcaaagagaaagttgcaagttcccttgaatggttaatcctaatcacacatgcatttattatttgcacatttttttttttttttggaggggggacagagtctcactctattgcccaggctagagtgcagtggtgtgatctcagctcactgcaacctcagcctcccggattcaagtgattctcctgccccagcctcccaggtagctgggattacaggctcccaccaccacacctggctaatttttgtatttttagtagatatggggtttcaccacattgaccaggctggtctcgaactcctgatctcaagtgatctgcccacctcagcctcccaaagtggtgggattacaggcgtgagccaccatgcccagcctatttgcgcatgtttcctactgccggaagaaggaacagttctcccatataccacattccagggcatcctatgatcacataagaacacaatcctcctgccacaggtaagcgcaatgtaccaggaaacaggttgcgggtaaaccattgttctccctctgccattatgatagaaatatcatgacaggcagctctgcccccaaatcttgcaaaatctcaatgtgcacctcaagtttgtattgttttagcctatgatggaactgacaggttggggaaaatggaaagcaaagttccatcagtctggatcgccttttgtagtgtccccagtgagatcatagctggagaggcaaggatgtaactcactcaaaatttaaggcttatggccaaagttgatgactaataatatagaattgtaggtttgggctttttgctttcttaaaaaactctgtcaggtttggaaagggacctccaatctaattttgagataccacaggtaatgtccaattgtcttaaggtgtgactaaaatttttcttttgtttgttttttgttgttgtttgtttgttttgctgtgttttgagatggagtcttgctctgtcactcaggctggagtgcagtggcacaatctcggctcactgcaacctccacctcctgggttcaagtgactctcctgcctcgcctcccaggtagctgggactataggcatgtgccaccacgccaggctaattttttttttttgtatttttagtagagatggggtttcaccatgctggccaggctggtcttaactcctgacctcaagtgatctgcccacctcggcctcccaaagtgctgggattacagacatgagccaccacgcccagcctaaaatttttcaaaataaacttgctgttacttttcttctttaatttaaaaatacctctataggctacatgagagtttttgaaaaagtagccatgtttggcatggaaataggccccaaatatgtcaacacctgtatttccttccagatttcagtcctacaactttggactcccaacagattaagaatcactggtctaaggtttctaaagtcagggtagatccctttcccaagtgacagccacaaatccaacgctgtatcataccctatctaaagaaaagataaaagtaaactggcttggcacagtggctcatgcctgtaatctcagcactttgggaggccaaggcaggcggatcatgcggttaggagttggagaccagcctaaccaacatggtgaaaccccgtctctactaaaaatacaaaaattcgccgggtgtggtggtgcacgcctgtaatcccagctactcaggaagactgaagcaggagaattgcttgaacctgggaggcggagtttgcagtgagctgagattgtgccactgtgctccagcctggrtgacagagcaagactctgtctcaaaaaaaaaaaacaaaaaacaaagataaaagtaaactgaaaacaaggatagaaatgtctgctaacatgctctgtgaccttgatcaacagctttccccgctcttggccttggtgtcctaacttaaatggggaaactgtgatctctctcagctcaaaatttacatgacattatttacataccaaacctgccctacgcttcctggaaactttactacttatgagtgtggctcctccttccctttcaatcccttaattaaatagcttcccctctacaggcttttgaagtggtagcagttcctcctaactccygccagaaacagctctcctcaacatgagagctgcacccctcctcctggccagggcagcaagccttagccttggcttcttgtttctgctttttttctggctagaccgaagtgtactagccaaggagttgaagtttgtgactttggtaagtagacttttctcattgctttttccttaaaactgtgttcccagcaaagtctgataaggcaagcgtcaggtttcatcttatccttggattgtttcccagagaccaggctctgttcaaactcagaaagtgaataatcaagttttgcaagttcctcttaatgaagacctaacgtgtcctaacaaaaatattttttggtcgctgtttttttaggggttgctttttatttgcttttgctgatgttatttatttacttactttacaactgccttgaattcagattccttttgacagccacaccagtccagaagaaaccacagctggcgctgtttatgtaccaagagctggcttcattcaatttaatcattatttgtttgcaagccaaaaaacagtcattttctgaattaagtagtcctttcacctttgtttatcaggaaattagaacaactatttgtaaacaaccttgaagcataaaagtgaatctaaatttggaattttaggatgattttctgatatatagatttagttgacgattaaaatcattggcacatgtgaccagttatgaaaaaagrtggggggtggctgatgcataatatcaagaaaagaaaatatactgttgacattgtttgaaaatagatggaaagagggtttgcaaagtgaaggggattcatcatgttacctaagagtctgattttctgtttctgtatctttttttccttctgtttcactctttctctgcctctaagcctctaagctgcttcttgcctttcctctctcgttttctttctcttccctacatttttttatttgagatagtgaaagtgggctgataagtaggtaaattttctttctgtcaagaatactcaaaaattatttttataatttgaaggaaagtcactgtttccttaaaaattaaagttcaggcttttttttttttcagcatgggatattcaaagctctttactttctacagaaaatatgatacccatgtgcttatttgaatcattattcttatagtccagtaaatccttactaggtcatgagtcaacaatgacagaaaacccagtgaaacaaactatcaatttatttacaaatgattcaccagctgtcagacttctgtgcagaaaaaaaatatataatactgtgtgccttctttagggaaacccatgtgagctaggcttgtacttctatcagtagttttcttgctaacatgtgcatgaggcaagtttagggactgtagaaattgtactgcatctgccgtgcttgtaatactgtaaacctgtgacaagctggttgagtggcagtcctctgagaaatccaagttactccaagctcactgtacatgatgtattccctcctccatgttttacccaagttagcccaggctaacttcctttgactaccaaattgttgtgggtttcctatattcagggactgcaagttaattctttcctgaggaaagccaaaatacaaagctagctctcttagaactaaaaaaattaacaaatattgcacaaagccagtgttaactattttttcctaccatgatttccttccattaatggtagatgaagggccatttaatacatctttcttggcccttataaaacaacgtycatctaagtacttaagccaataaacatcagtttcttatttttattgactaaagagaatatttgactataagtggttaatttatacaaatgagataactcttagaaaattattaggagaaccagaattgttttaaaagatgcccataactaaagtggtaatattaatgataataaccaatagtcaattgagtgcttactgcaagtacttactgcaattgagtgcttacaaggcactgttctgagtgttcaatatgaattgtatcacataagcctgtcaacaatcctctaaaataaggtcgttaaataaaatatgggatgaccatttgaatttgaacttcagataaatagcaaataattttttagtcccatgcaatatttgggcatcctgtatgtttatttgccaaatctggcaaccattctataaagttttgtaaaacttattattcctattttatagatgaagaaattgaggcacaaaaaggttaagcatcttgcccatggtcacacagatggaatggtggagacagaatttgaacccaggctctctgaccccggatgcctttccctttatcactagacatggtcttttcctgctgtgtgtatataacccagcacatggagctagtctgagatccccctgtaaggtttgctggattagcttgactctgaatcagcaggtggttcccttgcttttcctctgtgatccgagaaaaatawatcctccccaattctgaaaagctgttctcagcagaaagaggaggaaactgtccttggttcttgttctcggactaactgaagtgcctgtgacccatgaaatgctagtttgacaagttgttaacaggtgtacatggggaaaaaatcagtttcaatagtcaagttagctttgggaatagaactgggttaaactgtgtttaaaaggtctctytaatgcagtaatcctaagtctttaacatgctaatacrcactgtggctttcaaggaaaggatctagtgttttccaaactctgttttcaaaattttgattacagcattcacctccctctttttttccccaatgtcctgtagaaaacactgagagaactgacatttttaactttatatggaaagaatcgtaaatatggtgaatctggatgtcctcatcaaccagcttcaaagactatcacccatgcaatcttgtttcatctgcatagccactcatttcccacacacacccacttgagttttttaagttatttcatgcaccatatcatccagaaatagaaaaatgtcattttaaagcatcctgtctcccctaacccagagaaaacccacaagttcagctgatccaagacagaaaaattccatctcatttcaccggtgttaagaaaggaatgatgacttacaaggtatacactcttctcattcttcatggttgactttcttcatgcagaattcttaatcaagtaatataatattcttgggktttttttttttttttgagacagagtcttactctgtcgcccaggctggagtgcaatggcgtgatcttggctcactgcaacctccgtctcccaggttcaagtgattctccagtctcagcctcccaagtagctgggattacaggcgtgtgccaccatgcctggctagtttttgtatttttaatagagactgggtttcaccacgttggccaggctggtcttgaactcttgacctcaggtgatccaccagccttggcctcccaaagggctgagattacaggcgtgagccactgcgcctggcataatatgatattcttgatggaagcagcctccaaattctcagcacataatctatatactggaatgggtaacttccacattatggacatgaaggacytcctagctactagggaaggtggagctagaggatcacttgagcacagcagtgtgaggccacattgagctaggatcacaccattgcactccagcctggacaacagggaaaaaccctgtcgcttgggttggcttataaaaagaggtaccagaggctgggtgcagcaactcacacctgtaatcccagcactttggaaagccgaaacagaaggattgcttgaggccaggagtgcaagactccaggctggttaacatagtaagacctcatctctgcaaaaaagaaaaaaaaaaaagatggaccagataaaattccactgaaaagcaaaaatcaggtctcctgcctcagttcacaaacaaccttacatacaatctctctcccttgctgtatggctcctaatcactgtatccaaggaacagccaagctgtctggagaccacaggtttttcaaagacatttgccggaaacagcaccgtgcgctgagagttggtactgagccaggctcagttcagtttgcttacatgagcttctccccagatttatgccaatgcatttcacaaattttcagggtgcatttggccaagacatttcagccaaccaggttattcctgtgggtgcttctcagtatcctaaatgcaaaggaataattaattattcctctcagccaaggaaataaaagtagggagagatgattagaaattaacagaggtatgtctcgaaggagagtgctgtttcccattgctcaataggtagtgctcatttgccctatatgctgcaaattattgtcagcaggaaaggaagtatatatgttagctaagctaaatgtctgaataatataacaacaaaaataattataacaaatataataataaatcccacatatcaaatgcatccggtgtgctcggtattatactgatggctttacatatattacacatttaattttcatgatgctcctggatgagaaataatgcttttgwgttttacacgaaaggaaattgaggaaaggaaagggaaattgaggcatgcagaatgttaagttaaatcattttcccaaggtcacccagcaggaccttgacaaagcaggagtttgaacccaggtctaaccaactgaaaacccagaccttttctgatatatcacacatcttctacacaacataatacacagtttttacagcttcccttatttgcaggcctctgtgttcgtcccagtctctggatcaaagtcttattagacttgtcctgattgcttcacggggagtacagaacatattctcatgctgattcctttcaaggtcagccagctttccttctaacctctgaaatgacactcatttacattactcaattatttctgcccaaactattttatttttaattttctttaccaatggatttatttcttaggtcctaaaagaagaaaataaaatagacttctactcatagttatctttgtgcatcacgagattttcacaacttagagtataccctaataaaataataagaagaatttaatgtcaggagataaggttccttttaggacttccagaatcaccccaaagttttatgatgtgtctccaattccaaacctgaaaggagaacatgatggtttatgagacttcaatccagtctggaagcagactcactgttctagaagcaaaggcacaaatgaataggatagagactgctacaatttgaatgtttgtcccctccaaaactcatgttgaaacttaatcccaatgtaacagccttaagaggtggggcctttaagaggtgattgggccatgggggctctactctcctgatggattaatggattaacagattaatggattaataggttatcacagaagtgggtgagttatcatgtcagtgagtctatcataaaaaccattttggctctcagtgtgccccttcttgtcctgtcatgccttctgccatgttatgacacagcacaaggccctcaccagaagctgactagatgcagctgcctgatcttggacttcctaacctctagaattgtgagcaaaataaacctctttcctttataaatttcccagtctcaggtattctgttaaagcaacagaaaatgggctaagacagaggggaaagacaagaagatgaaagaaaggaaaaaaaaaaagcacacatagcacaccttgctgataaataaggatgatgatcaaaaaccctcatgaaatgagaagattggaaagaaatccataatgtacctggaagtactagacccaatccgagattcacctgttcatcagaacaggccttttttgcatattactatgttccaggcactgttttggggttatagcagtgcttgtgacagcaaggcttctkctttcaaggagtttctagggacagggagggagccagattttttttaattttagtaaaaacaaaaaataagaaaacatcaggaatatttatttgaaataaaacagtgagataagatagagattgagcaagaattataatgatggtcaagggatgtctctctgtaaaggtcaaattttcaggacagacctcaaattgatgagtggtgtgtatgctgagagaagacgcagacttgagacattcaaagcagacaggacatcaagagcaaaggccctgaggcttcagcaaatttagtatattggatgtaacagcaggagggcccatgtgggtaagctgaggacatcaaggtgagaatatcaaggtgggtagggaccagatcaggtaagatcttgtgagcccttgtaaggacytttaatttatgcaaagagcaatagaacatgatataatatctaagagtgatgaggatataaaagaaacaagactagccacatacaagttgataattgttggagacagtggtgggctcatgataaaaatctccacttttaggctgggcacagtggctcacgcctgtaatcccaacactttgggaggccaaggcgagtggatcacctgaggtcgggagttcgagaccagcctggccaacatggcraaaccccgtctctactaaaaatacaaaaattagccaggcgtggtggcaggtgcttgtaatcccagctacttgggagggtgaggcaggaaaatcacttgaacctgggaggcagaggttgcagtgagccaagatcatgccattgcactccagcctgggcaacaagagcaggactccatctcaaaaaaaaaaaaaaaaaaactccacttttgtatatctttacattttccactggatatagcctcgactgtactcaccaggttctccacaccctaagccacatgccagatttgtttagcagattcagtggagcaggttcattcatgggggcaccaaaccaaaagtccttttaaaaacagttacctatgatttaaaagtgtgaagtgattgtagtatgatggggaaacagtgggccaactatcatgagaattaggagatctggacagctacatgatctctttgatcatatagttttcttacttgctcagtgcagcagtagtgccaacctgtcctcagacggggatgtaataattaaaagaggtagcaggggaaaattctacaaaccatggagggttgtgcaaatgtaaggaattattatttttttttatttttatttatttattttgagacggagtctcactctgtcaccaggctgaagtgcagtggcacgatctcggcttactgcaacctctgcctcccaggttcaagtgattctcctgcctcagtctcccgagtagctgggactacaggcatgcgccaccacacccagctaatttttgtatttttagtagagatggggtttcaccatgttggccaggatagtcttgatctcctgacctcatgatccgcctgcctcagcctcccaaagtgctgggattataggcatgagccactgtgcctggccaggaattgttattatcttggatgtctttctattacaattaccactactactgcaaaaatcctaattgctaataaagtatttttaggtttttaaaggatttcatagagtatgattgctggactgagcacagaggtaataattggtagagcagcagttaagaagattgctctaccacagaattaaaagaatgtcttcgcatagtccaagaactccagctgaattttgaaactccaaaagctcaaggaacaccagcttcacatttgcctgcgggaggggtgtgtgcacacattttgatttccagccctggaagtggagaatggtttattaagtgtttctccaggacatcccttccaaagggttgacagcatgtttgagcaactaccttggaaacacttaaaacctactgaaatgtaggggagtacaattatttctgaactatgggccagagtgagaaagtttgcccaagtctcatgattatgttccagttctctgctcttcaaaacactctgctaaggtgaccacacttgtttttctctctcaggccattctgtcatttagttgcataacytcagttctattctttcaataatatacatagttcacagtgccttcggggtagtttccgtatcaaggttttggtttcttctgatacaaaacacacacacacacacacacacaccccttccaatcctagaggaaaagagtatactaagtagagttaataaagaagcgttagatcccagaccattcagatttagctggtgggactgtgaggagtgtgatcatacagaaatgaacctctcacaggtggttaagtatgctggagttggaggcacagcctgtgtttgaatatcagctctaccacttcttacatgctgtgtgagtttagacaggtcacttaattaagctaaacttcctcatttgtgaaatggaaataataatagtaactgctttgtggaactgatgagaagattacatctatgagaagcacttagcacagtttccaggacaaagtgagtgttcaaaaaatgttaaggagttaccgttgtggttataggttggtgggaagcaatgtaaattattttattacaatgtctctcacctgacttctctttggctaactcagtggctctcaacttggggtgattttctgcccctatggcagaaaatgtgcctttttcagttgtcacagctggggaatgttactggcatccggtgggtaaaggctagggatgctgctagacattctacaatgcacaggacaacccccacaacaaagaattatctagcccaaaatgtcaacaatgctgaggttgagaagccctagaaactaaaacagtgtggggtttgtaatttattgaaaccatgtaacaactttagttattcaaagacacatttacctgggatataaaaactctaaaatgtacttcaattgtggaaagaggcatcaatgattaaccataatcatttctgatcatgaccaagtcacccctgagactagtaactgcaggtgctcacaaaaaaatatgcagctgtccttcctgccttcaggggatcattcatgaaagtaatttctcacctgaccaaaatgatcgcttaacatttattgcatcattgcccctgtttctgtagactaytctaccgaagttttaatttgtcactagtttaaagggccaaaagatctgttttcttcagatattagagacacaaaccaagcatctcccactttcttggaattccttctcaaaaatgactaaagtctgagactgttttcttatttaatgtctattgaattctgttttacagaatttcaaaagagcaggttcttagcttacttttcaatggaacattttagccaggtagtataagtacaggtgcgggtaacctcagataaatcaaggtgttatgcagctgtctctatattaaaaatatttgctgacatcagtgtagacttcatcttgtagttcttcagtgttttctttccttatcttttgctcataagatggctttgtgtttggtttgatattatactgagaaagcatattagaatcaaagcaccaagatttcaaaagtccagactactcttcccaaagagaaatgtgcaatcacaatagcatgacatgggtacaaatatagaagtatgttattaaagtattgagaattagctttcctaacctccccacctgcaatcttttactcctaatctccaaaaaatgaacaaatcattggctcaaaatggtcacaaattgtatgtggtgttaaaaatctattatttttattgtatataaaatgttgccaggtgtggtggctcatgcctgtaatcccagcactttgggaggccaaggcaggtggatcactaggtcaggagttcaagaccagcctggccaacatggtgaaaccccatctctactaaaaatacaaagattagctgggtgtggtggcgtgtgcctgtaatcccagcttctcgggaggctgaggcatgagaatcacttgaacctgggaggcagaggctacagcgagccaagatggtgccattgcactccagcctagatgacagagcaagactcagtctcgaaaaaaaaaaaaaagttatactagttgggcacggtggctcacacctgtaatcccagcactttggaaggccgaggcaagtggaccacctgaggtcaggagttcaagaccagcctggccaacatggtgaaactccatctctactaaaaataaaaaaattagctgggcgtggtggcaagcgcctgtagtcccagctactcaggcggctgaggcaggagaattgcttgaacctgggattcgccactgcactccagcctgggcaacagagcaagacactgtttcaaaaaaaaaaaaagttataccactattactgtaatcattaagggaagaatacttctcatcagagtttgtctgcagtaaagtactcttgtcagctttgtgttcctttctgtcctatcttatgtacaaaccgatctccattatgtgtcacctgccttctaatggctgatcatcttgattcttacattacctgaaacacagtgaaagtgttagtgaacttagaatagtggttcttaactagagatttacccagggagattttttaaatcctgatgtcctggccacatcccagactaattaaataaaaatcactaaggttgaaagccagtcctcagaatcttttaaaactccttacgtgattacaatgggaagccaaagttaaaaccaatgagttagaaaaaaaaaaactattataatgagcagaagcaaaacacccaagtgacgtttgtaacatcactctctcacatctactttcaggtgtttcggcatggagaccgaagtcccattgacacctttcccactgaccccataaaggaatcctcatggccacaaggatttggccaactcacccaggttggttggacttttagctaaagattgttgatgaagctgggtgtggtggctcacgcctgtaatcccagcactttgggaggccgaggcaggcggatcaactgaggtcaggagttcgagaccagcctggccaacgtggtgaaaccctctctctactaaaaatacaaaaattagccaggattggtggtgggcacctgtaatcccagctactcgggagtctgaggtaggagaatcgcttgaacctgggaagtggaggttgcagtgagccaagatcgcaccattgcactccagcctgggcaacaagagtaaaactctatctcaaaaaaaaaaaaaaaaaaaaaaagattcttgatgagtctcaaggggaaatgtatatagaattgtctgttttgatattttttgcccttctggctttatttaaatgtaagagatgtacatgaacaaagactatatgagcttagaaatgctgaagagagccaagtggtaatcataagccaggatttgaatttcttaggcttcacatgagaaagtgaaaaatagtcttgtaatcaataagctgaatcaacagcattgggaaacatgattccccaaagtgctgatatcagaatatgatttcttgtcagctggatatattgggatttgaccttccttataagtggtcagttaaacacagggagccctactttctgaagagcatctaaggagaaggtgaactggggagcaaagccatctttagtcactgttccaaagccctattccctttgcttgtaagattggatgactcttctgtttggagccacaaggccaggtgaattgcttctgtcctgatctgtttaaatatattaattaagaaaatgtcacagaatctttagagtagaatgtctcaaaaactaatgggtcttaatcctgccaaaacattgggattatctggagaggtttaaaaaatatattgatgtctgcctgggaggttcttatttaattggtctagtatgtgtcctgggcattgggatttttagaagctccttggtgatcagttcactctaatgtgtagccraggctgagaatttctgccctgactatatttcatagaggagaaaactcaggcaggctatttgagaccagcatcttctgtctcccaggtcaaagctcttctcaccatagcctacccatcttctgtccctttgaatgaaagagaggctacaaaaattcagatttgcttgttaatacctatggctctgtatagactcctgttctgttgctatgttttcccattaagaccaaaagattcttctaggctgcaggatctgagttcttcttctgaagaaccttgattacccatcagattctattagggcagtatttctcaagcttccatgtgcaaatgaatcacttgggaatcttgtcaaaatgyagattctaattcagcaggtctgatgtgggacctgcgattctgcatgtctaacatactcccaaggatgacaatggcactggtacatggaccacatttgaagtgacaaggttctagggctcagattcctacccttgtctaggtacttttttttttttttttttttttgagatggagtctcactctgtccccgcaggctggagtgcagtggctcgatctcagctcactgcagcctctgcctcccagattcaagcaattctcgtgcctcagcctcccaagtagctggaactacaggagagcaccaccacgcctggctaattttttatatttttagtagagatggggtttcgccatgttgccaaggctggtctcaaactcctgagctcaggcaatccacccgccttggcctcccaaagtgctagaatttcaggcctgagccaccacacccagccttgtctaggtactttaaatctacataatcataagatgatggctgtctagatcagtgtctaggtacttttaatctgccttgtctaggtatttttaatctgcataatcataagatgatggctgtctagatcagtggtttttaaagtgtggtccctggaccagcagcatcaccatcacgtgggaacttctcagtaatgtaaattcttcacgcaatacccagtgaaccataaactttggaattaaagcccagaagtctgtgttttattgagtcctccaggtgattctgtgcatgctaaagtgtgaaaatcactgcttcatacagacgactatttaaaaagtcagctgtaagaacacaattagacctaaagtacctgcttctccgctactcaggtcacggtatattattcctttcccaccttgtccctatcgtagatgggaagtgattatagtggtggtcaagcaaatgacaagtgtgacaagcaaatgacaagtgggaccaagcagcagccaccgtaacaacctcctctctggctcccaaagctctagtaaggctctggattaaagacaaacttgaatgctgcatttccaaagcatggtgctctactacatgcatctgaatcacttgggagacttgttaaaatgcagatgtcagggccccactcaggaactaatgagctggaatctctgatggagatgctgaggaatctgcatttcaacatgcaccgctggataattttgtttctgatgcacggtaatggttgtggaccactgagctaatgcagtgcatctcagtgattactgtccatcagaagcttgttaaaaaatattcttgagcaccacccccaaaggttctggttcagtaggtcaagggtggggcccaagaatttgatttctataatgcttttaagtgaagccaatacagaccacacttagagtaacatgttctaatttttttatgaaccaggaattaataaactgggcagatagtaaagcattgcccacagaggttgaaagagactttcagattcatcgagtctaatctcatcagatggttgagcttcttccacaaaatccccaccaagtgggtctctttgaatgctctaccaacaaggatcccactacatcagagatgaaccatttacttaaatcagatcaatcacccaactatcaactaagcacttactatgtgcaagtctctatgttaagtgctaatgaagataaatgagttttctcagggagtcagggaactgtaactaaagagtacagctcttttgttttcacttaaatatgtgtcattattgtggaactattaaaccacaccattgttcattctacacacataatgaaaaaaaaaatcaacaaatttttatgatagtgtgattcatagaacttactttcattaatttttgcttttatttttttcccatagctgggcatggagcagcattatgaacttggagagtatataagaaagagatatagaaaattcttgaatgagtcctataaacatgaacaggcaagttggggagccaagagtgggaactttgatctttgawataattraaataattctgcatatataaaagtgctttgcctgttttccaaggaacttatacaagtcagaggtcttgtttacaaatatattcctctttatgcaaatttttgttccaaaaagtttgtgaatatgagtaatttcaagattttatgaacacctgaataaatactttggcttgacaagtagccactgcttaattgatctcatttgtcaattcaactattggccaaccaggttgctttgtaccatgatcataatattgctcattccttaacaagtattatgattctgatgttagcacaatgtctgtaatatttcactgtgggwgtcctttcctttctctaataccttggcagctctgtagaaaaaaacctcatgctccctttacgttcgcttctgctttgattttcctactctaggtttatattcgaagcacagacgttgaccggactttgatgagtgctatgacaaacctggcagccctgtttcccccagaaggtgtcagcatctggaatcctatcctactctggcagcccatcccggtgcacacagttcctctttctgaagatcaggtcagtatactgggaaaaccaggagatttcagatggacctagaatgaggaaggcaggctactcaacagttgtggatttgggagtctggacactccttgagctgtgcagttttaattctttcttaaataaagatacaaaggacaatttaggacatggaaaaccctagctaagagagagtaggaaccaaatttctctttggatctgtatgatccactttgttttgccactcttgcaactcttggcaatttgccccctcatcgtcatacacagagagagagagagagggagagggagatagacaagtcccccagtgttctgccttaattcccaggcttttggtgccccaaacaggtttctccactctccagattatccaaagatatttataccaccaaacactcctccactcatgaaaatccacattcctaggtagagaaaaaaagatttgagtgcataatcattgcctaacattttatgtgaatcattgtgttacctttcataacaactctgaatggacaatattcttgctctccttttatagtgagggaaataagtgcttggagaggttaaataacaaacaaattggtccaaagcaacactgctggcaagcatcactctgggattaaaactaggcctatttcattccagagcaattttcttccctataaaatcatgattctcagacttagctgcatattaggatcacgtggttttttaaaaaaaatcctgatgcccagggcactctccgtaagaaatcggaatgtctgagggtggacccaggcatcagtgtttgaaaaataatctccctcgatgattccagtggggaggcaagtttgagaaccagtactataaactaagctgcctgaatggggctgtttgagagaaactctcaaacgtgtttacacaggttgggaccgaccaagctttctttaatcttttcagaggaatgggtatttttaaagtagcaatagataaatctaactaatcttccaggtgtgaaacttaaggctatatgaaagaaatagtttgggacaaagaatcccttcctaatttccctgcagtcccatcataggcatgaccrtcgcatctctttatggctgaagcttagcctgactgctggacccagacttttgcccagtgacctctggggtaggttactatcctctttgtcctgccagtacccctagaaatttgacttaattgctgcatctagggacttagggatttttcccaaatgctgtgtagaaagtcactggagttaaatctactccaaccatttttctgctgtttcttgaaaagacaggatgattcatttacatctcttttccttcacagaatcatgagggaagtattgtgattaccagtgttaagcatttgtgaatattttattccaaaaagaaaaaaaatcactttaccagccttttctgcagagataaagactggaggtcaggtgcggtggctcatgcctgtaatcccagcactttggaaggctgaggcgggcagatcacctgaggtcaggagttcgagaccagcctggctaacatggtgaaaccccatttctactaaaaatacaaatattagctgggcatggtggtgcacgcctgtaatcccagctactcaggaggctgaggcaggagaatcacttaaacctgggaggtggaggttgcagtgagccragatcgcaccrttgcactccagcttgggcaacaagagcgaaattccgtctcaaaaataaataaaaaacaaaacaaaacaaagactggatagcagcaccaaaatttagcaaaatgtagaccacaacagctatttaacaattaatcctgaatgatagtaattaagttacacagaaagagaatgcaggtgctagtagaagaggaggaaagaaacagggagagtgagggagagaaagagagaagcaaggaacattatctacctatggcttccatctatctgattcactaaggtcaaaaaaattctctcatatcaactaagaaatctaatgaaaccaatcaacactagcttattcctagcatttagctgtgctgaatgctgtagagaaataggaggcgaagtttttctaatttatagtttgatgaaagcaaattagcatgtgtgaaatgtgtagaagacattataagatggcgggcaataatttcaagtacaagccacatatgctgggtgaagtcagagaatgagacttacgtgcagttaccacagggccgtcgttcaggtcttcataaagagagtgagaacttgaaccagacctcagaggagagggaggaaggagaggaaggcagcacaaaaacacgaccatgagtgaatatgtagaatgccagttcttctgtgcccagagttcatatttagaaagagaatgaaaataaaattgattatattggacacagattagataatccaaatttaatagccaggaggaatcttgagttgaaagaaaggcagtgtgatgttagaaggagggctgaatttgaagttggaaaacctacatccaactaccacttcagatatatgaccttgagtaacctccgtaaacctcagtttcctttctgtaacatgggaaaatagcacccacctaacttcttcttagggatttgtgaaagtcaagttagttaaaaaatggaaaacaccataaactgcaaaattctggacagatgtctcggtgattattctgtttattttcagcctgactcaatttgtggatgaaaaaactaacatccagaaagtaattaattaaattccaggccttttaatgaacagtcttctgctttttctcttaacaatataatttctcctatggaacaatttgaaagccatgcatgcaaatttagactaaaagcaatggacayaaaagaaacctgtatacattcttcggtattacgcacatgtgatgagtggtgcttttgggcacttgcctgacagtagcttggacagaaaagacactggagcctcagagaataactattgaagcaattctggaattaagaaataaggcctgaaatgagatggtaaaagatgttagaggaagagaagcaaggtaagacaaggtgacacacagaatcagaaatgatgaacaggaagcaacttttaaaataaatgttttctgagtagctactaatatgccaagccctgtgctgggcattgacattgcagcagtgaacaaaacagacacgatcctggctctcgtcaagtttatattttataggaaatagatgataaagaagtaaaataaaataatgtcagatggcgatgagttcctggaaagaaatgaaacaggttaatatgatagagactggcccaggatggctagaagaggggtagaagtcaatgggggagtgttcaaggcaggaaacagttttaggcagagctcctaagccagtgccttccgggacagcaagaaggcccaaagtgttgctggagaggagtgacaagggacagtaataggaaaagagggcagtgcagttcctagaggccaactcatgcaaactcttgatgtagtctgtgtggtggtgagttttgattttattttaggtaaaatggaaagccaatgaaggtcatgaaccacaaaatgacatgatctgatcgatactttaaaaagattcatgcttaaaaaataataataggccgggcgcggtggctcacgcctgtaatcccagcactttgggaggccaaggcaggtggatcacgaggtcaggagatcgagaccawcctggctaacacagtgaaaccccgtctctactaaaagtacaaaaaattagccaggcgtggtggcaggcgcctgtagtcccagctactcaggagagtgaggaaggagaatggcgtgaaccygggaagcagagcttgcaatgagccgagatcgcgccactgcactccagcctgggtgacagagcaagactctgtctcaaaamataataataataataaaaggtattagtgtaactgctgtgtggagaatgaattaggatggctgaaagagtgaacactgatttaccaaataggaagttctcacagtagttgaaacacaagttatggtggctaggactgggaggggactatgaagataaaaaaaagcggtctattttgaaatagaaggggatatgttttgaaaatagagaaacaaaagtgactatgaagtaggttgataaattctgccactagcaaaagcagagaaaattacaaagagggaatggttaaaaatgaagttgaattcattttaatatgatagaggctggggaaggatggctagaagagaagtagaagtcagttggggagtgttcaaggcagggaacagttttatgcagagatcctaagcctatgccttcagggacagcaagaaggcccttgtaacatgtacaagtttagccttgtacatgttaaatttgagggaaaaaaaatgcaaattagttatttctaccaagggctagaaatacaggactagtcacagatggaaagtaagggcaacaaaataaacttgagagccacaaacctgtgggttacagttaaaattataaaacactgtcaaaatttaattaattttaggaagttcactttgtcctcacaacaggtttttgaagtatatttttctaagtatttaatacgtactcttaacagtctgcaaatttgcaaaacctgaagttaatgagtggttaattgacttaagattttttccagaatcaaattcctttctccatacatacatgcgttggggtgtgtgtgtgtgtgtgtgtgtgtgtgtgtgtgtgtacaggtgtgcacctactgcaagaaatgaaagtgattgggaaggaagcaagataacagttattcacgtggaagatcgagaagtgtaaatatttaccaccaacagctcagttatattatggcaagtttatgaatgaaaaaaaggattttcaattctgaatacatatcctactattttaagacctatagatcatttgattctttctccccaattttggaatttccactcagctcaaaacacatttgaatcttttattaaggttgctttgaacctaatgaggcttaaaatattgctgcagcatatttagcaaagtttttctgactcataacagttttatgatttttctcttatcctcagttgctatacctgcctttcaggaactgccctcgttttcaagaacttgagagtgagactttgaaatcagaggaattccagaagaggctgcacccttataaggttaaaagctagttttgtttagtggtacttgttagtttgttagtggtacttgagtgtgagggccaagacacaagatgaagctttggcttcttaaaaagatgggacgaatgcatctgtcagtggctggttacagcaatgggttagaatatttaatgagggaggtcatcactcctgcttcccttccccatacaggggtcacaagccaatagacaagccagtccttttgaatcctttactcatggccttgagaggaaccaggtgtgagtaaatggctggatgagaataaatataagtctaaaatcacctgccttattcaggctaaggggctgggattattgtcttcatatacaaaggatagtcttttttttttgtttctattttgcaaartacccattttcagcacaatacaaaaggtagatataatgctgtgtactttttaaaataatcttttgaatattatacattcatactgtccaaaaattagaaaatataaaaaggaatacagtggaagcctccatgaccccacaggtaaccactagcattattttctagtagtcttttatgtgtttattttatgcagtcttttatgtattttatgtagtattttatgcagtcttccaatttccttatgcatatacaaacataaaaatatattctgatagtttcttcttttgttacacgaaaatggtatactattcatagggttgggcaccttggttttgttttgtttttttttttccatttaagaaaatatattggaaatatttctatatctgtatgtaaagagtttcctccttttctttcttttccttttttttaacaaatgtgtaatatttatatttatgccataatttatttaaccagcccctattgataggaatatgggtcatttttcaatctttcatttttacaaacagcatgtatgaataacttgtgcatctaaatagtttcacaagaatacctgtgggataatatcctagaagtagacattctgggttaatctgaaatattattaatttaccctccaaagaggttttactactttctacttctatcagcactgcatgcaaatgcccatttctccacaactttgccaacagtatgtggaccactctggggatatttgccaatctggtaagtggaaaataatatcactagaagcatccatctcctctaaaattaggaataagacaaggaagctcactattataactactgtacaacatcgtgctatagtacttttcttcttgtgatgagtgagtttgggtatcttcatctagttaaataccattttttggtttgttttttgatattgtatttcttttttaacttttattttaagttcaggggtacaaatgcaggtttgttatataggtaaacatgtgtcatgggggtttgttgtacagattatttcatcacccaggtataaagcctagtactcattggttatttttcctgaccctttgcctcctcccacccttcaccttccaagaggccccagtgtgtcttcttcccctctatgtgtccgtgtattctcatcagttaaatgccatttatatttccttttatatcaatatcccttgactatttttcttttggatgattgattttccttttgctataagtttttagaagcttttttctatgtattttaacatttctgtctgtgatattttgtgtgtgaaaaaaaacacactcaatgtgttttttcctatttttctcacttgaaaacaccaatcaacacagacagaagacttctgtgaccaaatatgggggatctctctgcaagaaaaggcagcccgttctgcagtagacaccagctgggtggcctccaattcagttttgacaccatctatttggagatagcatcagatcctacaggttgagggctcaggccccaaaactggccacccccaacccgccacctcagacacagatgaaagtccagacctccaaacttctgacaggctggctttaagttggggttcccacaacttcctctttgggttcgatcagtttgcaggggcagctcacagaactcagggaaacacagttattggttattacaaagkatattacaaaagatataaggaaaaggtcaaggagcttgcctgccttcttcaggaccaccacattccaggaacctctaagtgttcagctctctgaaggctctctgaaccctctccctttgggctttttatggagatttcattgcataggcatgattgattaagccacaggctattggctatcaacttaaattttaactccctcccctccccagaggttctgaagtagggctgaaagtcccaacgctctaatcccggccttggctttctggtgaccaacccccatcctgaagctggccagggactgccagccatcaatcaatcattagcatgcaaaaagacatactttggagactccaaggattttaggaattctatggcagaaaatggagatgaacaccaaatagaaggccgggcacagtggctcacgcttgtaatcccaacactttgggagaccaaggtgggtgatcacctgaggtcaggagtttgagaccagcctggccaacttagtgaaaccctgtctctactagaaacacaaaaaattagccaggcgtggtggcaggcgcctgtaatcccagctactcaggaggctgaggcaagagaatcacttgaacccaggaggcggaggttgcagtgagccgagatggcgccactgcattccagcctgggcaacaagaacgaaattccgtctcaaaaaaaaaaaaaaaagaccaaatatatatttcacaatatcatagataatgaatggcatttttaaaaaaaagtttgtctmttaactgcttaccgtgttcttgccatgtaggttctgtatcratgtattcttatatggcttctatattttgagtcatgtttagaaaagctttccccactcctaggttataaaggaagtctgcaatgctttcttctaattccactctagcttcatttctcatttatatattgaattcatttacagttcatactggtagaaggtatcctgtttaagttttttcctggaagattatctaattgctccatcattgtttattgaatagttcatttttttcctacttattgaagctattatatattaaaattcccataggtgtggggtctatttatgtaatttttattctgtttaattttttattagccaaaacttgggttttaactattaagactttataatatgctttaatatctaaagggctagtcatccctcattgctttttctgagtttccatggctatgttttaattttctttgtgaacttcagagtcagcttgtctagttccaaaagtattttttaatttttagtattttcattaggatcatattaaatttatttaacttagggagaatttgcaacttttcactgtcaaatcttcctaagaatatggtacatgttcctacttgttttatcttaaagattattttagggttttcttcatatatgtctttacattttttgttaagtttgtttcaggtttacagtatctccagttttcaaaaatgtgtatctctgatttcttccttttgcctatttgcactggccactacttacagtataatgttatgggcagtgttggtagcgggtattcttgtcttatttctgattttagaggagttttcctaataagcatacaggcttttgaaccaaaatagacatatttttatgaaaytaaggaaatatccacctttcttattttcttgagtgtatttttttaaatcaatattagttgtttaatctcctgaatgattgttttaacattttttaatacaatcaaattatttttctccttggattaattacaatgattgattacattcatagatttaccaatgttgaacaatctttatatttctcaaatcaaacccatttccttttatgtgacattgaattacttcctgttattttacttacaccttttgcattgatatttacaagtggcattgaactaatagttttattttgggggcaatctttgtcagtatcagtgttacacttaattcataagaagtttttgaaagttttctttcatcttctatgctccagaacagttaaaatagcattagaataatttactcttgaaaagcttggtagaattcctctatgacagtcatctggccctggagcttttatgtttgagaagatggcagtaggagctctttaacaataatttctattattttwtgaaaatctattgaggttaatattggcaaattgtagttccctagaaatttcatccatcagacagacaatatcttccaaaaaggcttcccagaaatggctgccaatttcagcagtcagatagctgaacattgggtctcattattgcgacattccaagaaacatacagaacctagcgaaagatttgcattccatccaagttttatatgtatagccaaagaccaagccctatttgtgttgcatgttccaggatgctttggcctgaaatatgctttcctttctcacctgggacatatttacacatgagttatactttacccacttctaaaaagaatctgaggcagtacacttcaatccaattccagcacgaaccaggaacatgtggcagtcagccagcatctatctacattttaaatgtaataataaggaataatcaattcgtgtttgtaaaattctttggaatgacattatcgtaaccaatattactggtgcatttttctgtgaagaacagcggttctcaacaggggcgcatttgcctcacaaggaacatttggcaatgtcgggagatattctgggttatacaagtgggagattaggaatgctactggcatctagtgggcagaggccaggatactgtgaaacatcctataatgcacaggagagctccctacaacaaacaattgtctggcccaaaatatcaataatgctgaagctgagaaacctgtgtaggaatttttctttctctgtttgtgtttcaggattttatagctaccttgggaaaactttcaggattacatggccaggacctttttggaatttggagtaaagtctacgaccctttatattgtgaggtaaaagaaaaaaaaatcacaggttaacttgcaatctgattttatgatttatgcttattttgaaatagatgaatatcttttctttcacttctttatgaatgtattacttatacttcttttgacattgaaacgtaattcacaacttccttatattaacttgaaaatgctgacttctcttttctctctattattatttatgttttcaccctttagaaaattacaagcaaaattgcttttcttctatgagtttccactttagttttttccccccttggattcagtaggagcttatttattttgcagccactcaaaaatgctgggttcctgtccttggtcttaatgaaaaaacaatgttgttataaagaaagaggggaaaattacctgatttccgaatgtagaaataaacaagcaaaatataagccaggctatttatatttgcttaacaagaaagaacttctttcttgctttgcgatgcatttgaaataccgtttgtggccagataaattacgattgcttttcaaggttacatggtgtttctcactcaccatgctccaccttctggccaaaaggagtactctctgttcctgttttcccaactagctcactaaatatggggcaagattctsacsacccacctaattcatattgacttctaactttgaggtcatcgtgagagtctggggggcagcaattacttccgtagttctatcttaataacagatgacacagtttgcctccatccmtyctaaagttaattgacccaatcacatgctactttcccagtattttcacttaatcatcagcaactatttcagtgaaaattcattagcattgtaaaagactcttcagtgaaaacaagagcccccatttttgttccagtcataatttttttttcttccttactacagtttgatctgagctattccaaaatgtggtcatgtcatgtgatattttttccaaatctctctcacttatttcctctgtaggtcactccactttggtctcctctttcacgaactcactttctctcactcttaatcctgcctttgaaactgggggactcctaatcaactcttcctaacgggtaataaatattggcacaaggtctcacctgccctgcttgtacttaaccattcatttaacgcatatttaccaagtatccactgtgtgcaaggtgcaggctttcctcaagagtcagtgaactacagccaggtatggtggctcctgcctgtaatcccagcacttctgggaggctgagatgggaggatcatttgaggctagaagttcaggatgagcctgggcagcataatgaggccctacctctacaaaacacttttaaaaattagccacgtgtggccaggtgtagtggctcatgcctataatcccagcactttgggctaaggtgggcggattgcctgagctcaggagttcgagaccagcctggccarcatggcgaaatttcatctctactaaaaatacaaaaattaggcgggtgtggtggygcatgcctgtaatcccagctactcgggaggctgaggcaagagaatcgcttgaacccaggaagtggaggttgcagtgagctgaaatcgtgccactgcactccaggctggatgacagagcaagattctgtctcaaaaaaaaaaaaaaaaaaaagtgccacgtgtggtggcatgcacctatagtcccaactactcaggaggctgaggtaggaggattgcttgagtcctggagtttgaggttacagtgagctgtgatggccactgcattccagccttggtgacagagcaagacaatgtctctgaaaaaaaaaaaagaaaaaaaaagtcagcaaactagaccttgatgggggtaggggagaatatattactgaaggctccagaaatatattgcctttcctaactggcctctcaggcagcccattcagcttttaaggaaatatcatttaactctgtcaggttcatagaaagatttctaaccctttcataaaggaatgaggtattatttccctactgcacccttactctgcaaaatatgagccacccactgatccagagttaaaccaaaagctatggactgggtaggaatgggtaaattcatttatataagcttttcttctgaaagtcaataccactacttatcacaatatgaagttctyttagaaagaaatggcaggacaagaaagtctggccctactagttcttgtgaggtgaaaaaggataagtcaacaaagaggacagtcatataaatacacatacatttttcttcctttttctttgctacagagtgttcacaatttcactttaccctcctgggccactgaggacaccatgactaagttgagagaattgtcagaattgtccctcctgtccctctatggaattcacaagcagaaagagaaatctaggctccaagggggtaagtattawaaaatgagaggagcatattggatttgtggttgaatgatccaggtctgagtcattccctccacyaatcaactgtgtgatctcagacagttcacttaatcactcttgcaccagcttccattctgcaaaatggggatattaatgatacctacttcatagacagtgagtattaaaatgaatgtatgtattcaaatggcttagagcaaacagtacctggtacataatacactgtcaataaatgtcatatgttagtataatcataactattactcactcaagcccttagttttctatctggaaaatgaaagctaaagctaaatgatcctttccatcccctccagatcaaaaatcaaggatctgtgtctgagccacatgaaaatcaattgtgtcttgtggcctatatgatgaatttttcaagtgggaggtatgacaaaagtggcctgttttcctgaaaccctgagtggtagtcattgtgaaagccgataaaatatatttttcaggctaattgttatatttttcagaccaattatgtgctgttaaaatatgttgcaattgacaagtttataacacagcttgaaatttttcattgacattgaaagctgttgagatttatttatcagtgatgcctcttcttggttagaactggctcttcgtagcacaggacaccctgtcatatgaaggcagacccaggcaagaggatgctggattcttgtaatcaggataagtggatggaagaaaaaagtcaggaccagcaaagacaaggacagatgttggggcttatgagagaaactggatgggcaggccaagataccaaatgaggtgtcagacttagatgtggttatcataggtattaaaactagggataaagaagaagagaaagttcatcatgtcaggttgacgtaatgaggaaagtccaagccacaggagatggtccaagtcaggctgacacacatattcaaggcattttgagattaatacaatcacatcatgattccagccattgacagacactattcaccacagcatcaggacaagtccatcaaaatcccaagagaatgcatagaggcaaagcatattagggctggaccagactgggaggttgttcactsaggctacttaactagggaaaaaattcaaatcactgaccagaaaaggaatcaattatagctagaaaagcagggctgcacaccaggtataaagagtgaggcaagctgtaaccaggggaatgaggtatgaaaccaggatggtcaggagcaaattcatgtgagatgaataaagtaggttggggcaaaaaatttaggacagtggccattaacgacatgaggttgttgtagatctgctattacaaaaatcctgattgcatggcacagagacagacttgatagaaatgtgcaagtccttacttcacattaaacacatgagcaacaagatccagccttgaggaagggagagtctccagagaggagtcttagatggaagctggagtgttggaaaaaattaccaggcgggatacagactgtgtctatgggcagaacccaggaagaagctcaatcttaagtgcttaacaacaaaagatgtagagggtgccttggaagccacataagcactcagcctcatttctggcccaccaggtgccagcagtgtgactcagtygcaagccccatcaaatggtggaagcgggactcttgatttatttcccccaaccwagttatggtggattcaggcacctagtccctcacractcaaagtgcagtctacttttcagcatsggcatcaactaccacctggctagaaacacaggccccactcccaaacgagttgaatcaggatctgcatttgaataaaatcccaacatgctttataccagacaggagttgacagtagtctaatagtagatgtagggatgtgtatgtatgaataagaaatggagttgctccactttcctcatgtttcctcttttatttcccttgcctactagaagattacatttgggagaagccacttcccctctctggatctctgtttcactacctatgaggagattaaactagactgtctataagagtccttctctgagttgttctctgatcttggattctaaaggctggcacttgtatgaaaccagctgtcctgctttctggaaaaagtccagcgccattgttaagcaggaaaatttctcctgtgtggttctgccaaaacaaaagctcagactattattcagatctggctgggcaagagagatttgtcaactacatgtttattgaatgatgaaacagctgmacacattcctgcacagaaaacacacrttgtctaggtgacaaagagtaatgtggacacatcagggccaycttctgacctttgctagtttttttgttagtttgttttgtttttgtttctttgtattttttgtttgtttttgtgtctgtttttgagacagggtctcattctgtcctccaggctggagtgcagcagyatgatcacggctcactgtagccttgacctcccagsctcaagcgatcctcccacctcagactcccaagtagctgggactacagtcatgcaccaccatgcccagctaaatttttttwaaattttttgcaaagacagggtctccttatgttgcccaggctagtcttgaactcctgggctcaagcgatcctccaccttggcctcccaaagttctgggattataggcatgaactactgtgcccagtctagaatttttatttcatcatttaacttcaggggtgacactgttcagtaagacacacacacatacacacacacacacacacacacacacaccaaaaaaatccctggggcaaatttaggatsatatggctggtcatatcagtgaaaagagagctcttcttgctctaggccagaggttggcaaactactgcctgtatgcctaatccagcccactacctggttttgtaaataaagttttattgaaatacagccacactcattcatttatgcattgtctattgctgctttcatgctaccacygcagagctgagtagttgcaacagattttttaacccacaaagcctaagacatttactctctggacttttacagaaaagtttgccaacctctgctgtagactagaaatgaaggaagcaaagtttatgtcttcagrtcaatgatatttttgtctagtttacgaagatttaataaaggatacaacagataactttgaagctagctttccacgatagcatgttctaatgattacaaataaaggttttgacacaggacatgctagatttaaagccctccttctctgcttgcaagttgtataatctaatcaagtttctgagcctctccaagcctcagtttcccctataaaacagaatattgatatgccagagcctgaggataatcatgatagtcacccctaatcactcctgggataagggtgtaatcataccagaaccaagaactgatatattcatgaccaaaactgcagcctgacyaaaaggcacttgttgacaaagggcaacttgctgatttcaggtggctgtcatggctcccaaaagcttggccacagagtttagcaccaacatggcatgtgaatcaagctaaagtccctaatgcattccacagggcaaccctctctgagatrgagggatttagacctgttagacatgtacattcagattatcctattcatcytcaaggaatttccagtatcttatagaaagagcagatacctacctccttaattaacccttttttatacttactggtgtacagacctgtctcttcttactattttatgagtttttggagggcagggaccaggtctgattctcctagcacagtatctggcgcatcatagctgctcagtgtgtgtttgttgagtggactacagaacctgagattatagtcaatctgttaatatcaatgccctgctcattacaactcacacacacacacacmctaacacaccctactggtcattctcagccaagagagcacatgatgcagggtaaagagaccaacagagacaccagatagttacagacatctctgaagcaacatgtccttaaaacaggatctgttttggcaccacaaggtaccccacagccctcagtgcctagaaataggayaaatactgtaagctctatatctgtctttcaccacctcaggagcaacagcagttaggtgttcagatgtgaagtgtgaagagcaaaagtttcctctactgaagacagacagaaactcaaatgaaagctaaagatgctggctgtccccccaatagtgacacctagggtaacctggagaaatggtccacagagaatagtccatgatctgtacaaacatccagagagctgctttctcccatggcctcccacaggtctgactgccagagagtagaagcaagaggggtgaaaayagaggagtacctgctgtgctgtcatttcaggtctgctctggagaagaacatgggctaagaattatcttttatgatctgaaaaagctgtctgaagttccttccaagcttatcagcctcctaacctgagctttaacaaaacccggtatggtagagtcctagtgtgccaatccagctttccttacctggctgtgtgagtcacttaatatctttggacttaagattccttacctaaaaatgagggttgagacgtaggattcagtttaaaaaaaaaaaagtatgtaaatcacattacctagcacagagcagatgctcaataaaattagatctttgcccctcttcttaagtcatggcagggagagtccgcaactatgaagtgacaaaaagctaatgaactaaaatagaagcttatgtttggttcagtttggttattgattcatcttctttaaggtgtcctggtcaatgaaatcctcaatcacatgaaragagcaactcagataccaagctacaaaaaactyatcatgtattctgcggtaagtattttcatcttcatttaacatatrtttgttcaagtgtgtgatctcttgaagcacaggacctcatctttttttwatcttcatttccccatctccttgtacgtggtaggcacttgcacaaagcttttagaattaaatgcatcattctgtcctttaagggatttataatctaaactaacaagaagacaaacataaacactatacaaaatgggatggaaatrccatgcaggcaagtgctatggcacctcagaaaatctagccatcccttctgttccaagagggtggagaagagaagcagwaaggcttcctagacaaggcagcacatccaacacatcaaaatgaaaggggttagtaagtgctcctcactagtgtgtaggacaaataaagtaaattattaggacagaagtggaaggccaggaatgttgtgtcgaaaaagtggtaccaaattagtggatgttaactgtgctgctcaatatggaacctagtagccagaagtagctacttacatttaaattaattatgattaagtagaatgaaaaattaagtccctcggttgtattagccacatttcaggtgttcaatagccatatatagccagtggctactgaattggagagcacagatatacaacatctccatcatcatggaaggttttttagatagccctgatatggagtgtcagaagtttatgctggatggcagctgaagggccatgttgtcctgctgcttctttgtttaattgtagaaagaagcaaggaagcwagggagaacccccctgtcagtgtttgctcagggaaggcagggcaggagtgacaggataggagcagcattttggaaattaattattttatagaataactggatgttgggaacaggatatggtgtagaaagcttttgtgatagtctagaaaaatggggatatggcctaaaattagggcagcggcaggagaggaaaagaagtgagccaggttacaagaaaagctgagtgtgcattctcagtgatgaattggaagtgggtggaagacaatgatgtggaaggtgaagccccakatgaagtcaagatttcagttttcagtggcaggaaggaggtggtcttgggccaggcaaatgtactgattaggcaatgggtttgaaatgccacaggggcatcccagcagaaaacttcagatggcaaagagaatagaaggaggaaagggaagaaggactgcaactcaaagttggagctacatttgggagtagaaagaaaagagagcaagagatcttagaaaaggctttcatcttggagaagccagggagagaagagtctgagacgccaaggagagacacagtgtttggggaaaattctgcaattgtattatacattcaaatagctgcccatggagtctgggatgagcagggaaacaggacatagcatgctgactcctttcactcacatctccatgacaaaaggtttctcagctgtggctggagaaagaaagtcatgttttcattcatgcaagaaggtgaaagaggtgactgaagatgccaggaagtttgtttattatcaggagccctaaatggtatagactagggaaataggcctgggcaggagcagagtgcttcctggagagagataggcctgaaattagtcatttctgccaattttcgtagtgtctaatctgatttctagttttaacttgtggtgtgacttccagcatgtcatatccgtagctcctttttttttttctctattagattacttctaacgccttttgaatatgtgcacgctgccatacagtttaggcagccaaatgttatcccaattttgcagatatggaagttgaggactgcctaagattagatagctaatcagtggcagaaagggggttgaaaaccactcccctataccttccagccactctggggtaaacatttagctttacaattattttaaattgcatcctatacttccttgtattttatcttccctaaacatttaaacctcatatattcttccacaactttaaatcacagatgatgctaatctatagaaaaatataatctagcattaatgtgtttcaaaatatttcaaaaaggcacagcacttaaggaggcttgattcaaatttactttcttccatttggggttatatgacattaagcaagttgcttaatttccctgggtctcaatttcttcatcttttattattatttttaaaattattttattttatcgagatggagtcccgctctgtcaccttctgagtgcagtggcacgatcttggctcactgcaacctctgcctcccgggttcaagcgattctcctgcctcagcctcccaagtagctggatttacaggcccatgccaccacacccagcttttttttttttttttagtagggatggggtttcaccatgttggtcatgctggtctcgaactcctgacctcaagtgatccacctgcctcgggctcccaaagtgctgggattacaggcatgagctaccacgcccagccaatttcttcatcttttaaatgaaaataatgatacatatctaaatcatactgcctagcacaccgctaatgctcaaccaaaatctttccttctctacttattaagtcattgtkggcgtatgggaaatttaattgaatcagaagccatcatggtgctgtacaagtgcttcatacctattgaatgtgaatctgaacaggmgataaaattgatttcaatctctgtagcatgacactactgtgagtggcctacagatggcgctagatgtttacaacggactccttcctccctatgcttcttgccacttgacggaattgtactttgagaaggggtaagtgactaagtgcttttcaaaatcagtatcactggaccttgggtttcattattattattttgggttaagggttgtgtgcctgtttgtctttgatttggttttatattcagagggaagaatggtggtaacaagatctttgctagtcatgtctcttttttctttttcatgaagacttttactggaaaataatatacacagtagatgaaaaaattgggaaatagcctatgtaacagaaattacatttttaaaaaaattaaggtattctaagaagtaggcatgtattgtatatatacttggcaagagaaaaatttcttgatggttatataataatattttttcaattaaagaattcaaacatattcattcagcttctgatgattcatatccacaagtcaagattcttaaagtacaatttctaactggtgtctacctctgtgtgacctggtgtggccctccccagatgaccacagcttagcttgaacccattagaagggtcaaagttagcgtagccaaatgtcccagttcaccagaattgacccatgaaatctggtgttctcagaacatgtgaatttcattgttaaaaccagaaatgtcctggaaaaactggggaagaattgattatcacaccaaggtcataccaaaaatatttatctgctgtgacaacgacattctcattgggaggagaagaaggaggtatttggaacaagtcaccagacttcatgggatattattagtgaaataagagcaaggaaagggctgagttaaggcagtgaccccagagtttgttttgggattagtcagggagatctattttgcccttccctcaaggcattcacaatagctgcacaccaacctgactgtgcagttacatggggacctggctcaaaagagcccatgcttgttttaatgatctgctgtggccatctttaaattgtaataatgtttaaacaatgggccctgtatttcatcttgcaaattttgtagtcttggatgtagctttctggcccctgaatttgtagagtaagaaagtaacagcacagagacttcattctcaaccaatatcttcactgcttacaaagaagtgagttctgcacagttagggacaggtagatacattctttattgaacctctaactgagtgtcaggcacaatgaactagaactaaaatgtggtcttagttaaccttgctctcaaatatctagagtcagcatggagaggtaagacccacaaaatggagactggccaaatagaacagaaaatgggaatgaaacgactagagacataaaaccctctcttaataacaagcccggcacaagtctgcccatcagaaggccagctctgggcacagagttaataaatccaaccaaattccaggatcagcttcaggagcaggcaccatctcctttgggataagacaagagaagctactgactctactcgtacctccctgttctctggtttctggaccccagtggtccagagcttgctttctcagtgcacagaagcattttctcccactgaattgccttgttttacgaccctgagttaaatctatattacaaatcaagtgtggagtattttttcaactgaaaggcagtgacatacagaaaaaattaaccaagggccacgtaaaggtcaagtccaatttgttgttgtattaggattttttttattggcactccagggaaatatcaaaggtgaaacgtgattgcttttaaattaggatcaaggaggcttcgagttaacgaattctgtctaagcctgcttattaggtgatcctgactgtgaagtgatctcacattttcttatgagaagatacggagagagacagaaagagagagtattttagattttcaaccatcttaaatacgtaaacttttcaggttgtagaaaaggtagctaaaaatattcttaaaagatttaattttgggttagatacagagatttaaaatcatagactatataaaataattcattaagttaatattgctttgtttcacttttacattttataaaatgattttatctaaactctttgtackcatctttggcttgtgtcttcaccactaaagccaattttgagtcttttaaaattgtttcccagatatattcactaataaaagataattttgtcttctatatagatgaacctcagatttttgaagtcttaacccaatgaaaattaatttcacacttatctaacagtacaatgcaggtgtacattaatagatgtgattcacacgtggtgattcaggcacccagggttccctctttggacctacggtttcaagagtgctgtgctcacttgcaggcagcttgtagaaaggaatgaaagggtggaggcagcaacccgcttatcaaccacgtcagccttttaaaggggacacatatcatttctgctcactttctactggctaaattagtgacttggtcctacctaggtacaacgtagtcttggcaatgtggtcacttctgagccataattcaattctatggaaagagaataacagagtttgatggagtattggtcatctaggccatatcatcttaagacagaagatgctgttactgaaaaagttattccaagatataagtacccattcataatacatattagggaggtttttgtaagttttatagacatcttattttattttatcttattttattttattttattttatttttattttattttattttatttttgagatggagtctcgctctgttgcccaggctagagtgtagtggcgtgatctcggctaactgcaacctccacctcccaggttcaagtgattctcccgccccagcctcccaaatagctgggactataggcatgtgccaccacacccagctaatttttgtatttttagtagagacggggtttcaccgtgttagccaggatggtctcgatctcctgacctcgtgatccacccgcctcgacctcccaaagtgctgggattacaggcgtgagccactgcgcccagccttatagacataagtgaatatttgctgttactatgtttatatggctttttaaagtgatgttttaaaaggcttgtttataatgacaaccaaaagtagccattgtaaggttacaccaaaagaaggatctctaaatccttcttgagttcccctcctgactccttgattagcaaatggcttccataagcaactcacgctggtttaactcaggttagtttacaccattggaccttcccaaatagtacattgtttttttgagataaagcattgagagagctctccttaacgtgacacaatggaaggactggaacacatacccacatctttgttctgagggataattttctgataaagtcttgctgtatattcaagcacatatgttatatattattcagttccatgtttatagcctagttaaggagagrggagatacattcagaaagaggactgaaagaaatactcaagtaggaaaacagaaaaagaaaaaaaggagcaaatgagaagcctaaaaagaagggaggaggagaaggaaaacccaayacccccacctgcctcccacttcttatccaaaggctcaaagtcccacccagctccctgcaaccatcacttctcaccacctcctctgatttagcatcctggtgcctacctcctatgtccctgttcatctaacaaaccagccctcccatttccaccctgcaaatctctcccgcctgccccagtctccccatttacacacctaaattggctaaaatctccccatamgtttttccattagtccctcaactggcatgtaatagtccaagtggaaagaaattcwgtggcagttcaacaacacagaactaacagagctctctcctctgcctttgtctgccagggagtactttgtggagatgtactaycggaatgagacgcagcacgagccgtatcccctcatgctacctggctgcagccccagctgtcctctggagaggtttgctgagctggttggccctgtgatccctcaagactggtccacggagtgtatgaccacaaacagccatcaaggtactgargacagtacagattagtgtgcacagagatctctgtasaargagtagctgcccyttctcagggcagatgatgctttgagaacatactttggccattacccccagctttgaggaaaatgggctttggatgattattttatgttttagggacccccaacctcaggcaattcctacctcttcacctgaccctgcccccacttgccataaaacttagctaagttttgttttgtttttcagcrttaatgtaaaggggcagcagtgccaaaatataatcagagataaagcttaggtcaaagttcatagagttcccatgaactatatgactggccacacaggatcttttgtatttaaggattctgagattttgcttgagcaggattagataagkctgttctttaaatktctgaaatggaacagatttcaaaaaaaaaycccacaatctaggrtgggaacaaggaaggaaagatgtgaataggctgatgggcaaaaaamcaatttacccatcagttccagccttctctcaaggagaggcaaagaaaggagatacagtggagacatctggaargttttctccactggaaaactgctactatctgtttttatatttctgttaaaatatatgaggctacagaactaaaaattaaaacctctttgtgtcccttggtcctggaacatttatgttccttttaaagaaacaaaaatcaaactttacagaaagatttgatgtatgtaatacatatagcagctcttgaagtatatatatcatagcaaataagtcatctgatgagaacaagctatttgggcacaacacatcaggaaagagagcaccacgtgatggagtttctcyagaagctccagtgataagagatgttgactctaaakttgatttaaggccaggcatggtggtttacgcctataatcccagcattttgggagtccgaggtgggcagatcacttgagctcaggaggtcaagatcagcctgggcaacatggtgaaacctkgtctctacataaaatacaaaaacttagatgggcatggtgstgtgtgcctatagtcccactacttgtggggctaaggcaggaggatcacttgagccccggaggtcgaggctacagtgagccaagagtgcactactgtactccagccagggcaagagagcgagaccctgtcycaataaataaataaataaataaataaataaataaataaataaataaaaacaaagttgattaagaaaggaagtataggcyaggcacagtggctcacacctgtaatccttgcattttggaaggctgaggcaggaggatcactttaggcctggtgtgttcaagaccagcctggtcaacrtagtgagacactgtctctaccaaaaaaaggaaggaagggacacatatcaaactgaaacaaaattagaaatgtaattrtgttctaagtgcctccaagttcaaaacttattggaatgttgagagtgtggttacgaaatacgttaggaggacaaaaggaatgtgtaagtctttaatgccgatatcttcagaaaacctaagcaaacttacaggtcctgctgaaactgcccactcygcaagaagrratcatgatatagctttgccatgtggcakatctacatgtctrgagaacactgtgctctattaccattatggataaagatgagrtggttyctagagatggtttctactggcygccagaatctagagcraasccatccccgctcctggttggtcacagaaygactgacaaagacrtcgattgatatgcttctttgwgttatttccctcccaagtaaatgtttgtccttgggtccattttctatgcttgtaactgtcttctagcagtgagccaaatgtaaratagtgaataaagtcattattaggaagttcaaaagcattgcttttataatgaacttaraaaaacgtatgtgtgtgtgtttaattagaataaaattcctctaggcagatttcaggagctccctttgtgtttggggtttttgttttagtataacaagatggaaaatattaatataaagtaaaatgatttgactggcttaaatgaacattttacattgaaaatatagtttggactttaccacttcagataaaggtgaagctgtggatggctctgcctcatctatttaagatggaatttgctaaggaaacaccctcaggaagtgcacaatatactagggaagtaaagagatacatactgtacaacatggaaaaaccagggctatgtcttatgactacacagattactgtgggaacaagagttatccagatttggagtaggggaagtaaggaaggtcaggaaaggctttctgcagaaggtagcaactgtaccacgtaaaatcagtttgaggccaggcgaggtggctcaggcctgtaatcccagcactttgggaggccaaggtgggcggatcacaaggtcaggagatygagaccatcctggctaacacggtgaaaccccatctctactaaaaatacaaaaagccgggcatggtggcgggcacctgtagtcccagctactcgggaggctgaggcaggagaatggcgtgaacccgggaagcggaacttgcagtgagccgagatcgcgccactgcactccagcctgggcaacagagcgagactctgtctaaataaataaataaataaataaataaatttgttaccttttcccctgaccctactcttgtcyatcttgatgagcagcaatacctggtaacttaggagttattttttaccctaccctctccttcattctccatagtctctcacctcctcttgtaaayctacctgtggtatgtttgcagaattctttccctcaaaacacaaataacaatatgcaggtagagtgaaatatgattaagcagcaaaaaatgttaatagaaagaaaaatgtaagggttgatgtgctgcagcccgctcatacagatctcaagagtggaatgtgtccatcagttcccaactctcagttcaaccacttcacctgggcagctccaatgtggcaggagtattttcaccaaagaaattaaatgctacaaatcctaccaccacaccactggtttgggctcatagaaagtttgttaagagtctgtgacatgaggtggcctctaatacagtgagttcaatatttgaacttctgtaaagaaaaggattagatttattcagtatgatcttaaagagggatgctaggggcagcaggtaaaaatttcagggagacagattttcgttcagtgttgggaaactcctgaggtaagaagtgcccattaggctgggtggccactcaccttagaagagagatactacagagaaggctgaaacatggaagattgtaggggttgagtggctcattagtttggccaccaaatctagcaaataaaagtacaggatgccgagataaatttgacaaaaggctgtaactgccaagtttttgtaattcattggaaaaaaaaaaaaaaaacaatacaggacacttaggatgttctgaaaaagccgatacaggaagcaggacaaaatcattaaatataggatatgtcctatatatgcaagatactttgcaaccctactccttagagtaggggtttccacccattaaattctatccataactataagcagtgtttttagctagtgccagtaggctcacttaaccagattccagatcrtatcaattaaattcaccagagtctttgctggaaaattcacaagtctaaggccatagcacattgcttgaaaataataaaatttgtcaaactgcttctttaattccaacattttactaacacattcagactttcttcactagtgctctcccacccccatctcaatgtccaactctaattatttcacaagaaggagacttactagtgagaagtcccagttttctctcattatctttctaaagctgagaatctacagcacaaatacacatgcccaagattcaaccttgagcttcttaaaggcaggatccatacatgtttcctctttgagtgttcagccagtagacaacgcctagaaccttgtgccttcaatcaatatttgctaactgaatacatgtccagccctgcatacctagcatggcttccttgtggctgagctcagaagtcagaagcctggaactcagtttatttataaataagagagagaagctatgaatgagcctcaaaagtgattatactgtagagacccaatcattggccataaacacatttctatgtgccaacatgtctgtagtatttgacttctgttttcagcatagttgttttggcattctcatgttcctccattgctattaaaagcccttgttcaatgatatcccttgttcagtgatatcccttgttcaatgatatcccttgttcaatgatatccagcaccgctcctccctcaaagatgaggccatctgattaaaataactgtttcctcattcttgttgccattatcttcagtttcttggaatatatctcaccatttgctaaagacattggcaacttgctttggtatgctccgattcactcctcactccactcctgccctaaacctaggcaattctgacagctataacgctgacctgtcccatacactgctcaccatgccaatacctaagcctctagatcaagtcagtcrcatggttttttcattctgatctgtgagtagagctgaagcaagcaaaagtccaagcctattgtcaccatttcaaacgatgaatgtagacattttattccatcctcaactgagtctctcagtgtttcttggtaaatgtattcacccctactgaacacttttcctactccctgcaggaaggcctgtttgtcccaaaagtctgactccattttgttttctttattcttataagcaagataatctattgataagtcctttaagttctactctcacaatctcaaaaatatctcagtagctttaaccttcctttgctgctgtccctcaggaaaccacattcctccctgcatgggctgacctcattgtgagtgtgaacccatctccgcagtctcctcaggaccccagggaatctcttggctaacttcactttcttcctctgccctggctccttcccttatactacgaaaatgcccaaatatcctctcatcaaaacaccatcaagtgcttattccacctcactctcttcaatctcaattttcttgaactaatgattcacatgttcttgtactattttctcacatccatcttatgctttaactattctgtaaaattatgtccacccttctgtcatctcttttttttttaacttctcttttgaaagccatcagtgtctaattcagtggcctttctttcattgtgaagcagctattagtatccccaatttacagagaagaaaactgaacctcagaggataacatgccacaagtaataggatcaggattcaagcctaacactttccaacatcctatttctaccatatcatactcacttttcattccactgtgtcttgtggactactttcttagaccaatttccaaaaataggattggtgggtcaagataaatgattatttaataagcaatagatttactgagtacctcttatgtactcaatattttcctatgtatcaagcattaagcttgctgagtaaacagcagcagacaagaagactgtccccatatggcttgcagaccttatggagaggaggggtggacgaggaaatgaataattaaatcagccctaacagcaaagtatggtgaattctgcgatgaagggcataaggagaaaacacagcagaggcaattagcctaatgggtcagagaaggcttcttggaggagtgatgttcaaactgaaacctgaaggagaaatggtactaagcaggtgaatgaaggtgaggagagaggaggatgttacagacaaaagaggagaatgcataaaggccaagaggccaaaggcagcatagagcactttgggaactggaaaaagtctagtgaatgtgtggagagctgaggctgcagaggcaagcactaagtgctccataggtcaagttgagctgttgtgctcatggaaaggttttaggcagaggacagatgctgtaactggcttcttgttttaggaagacccttttcagtcattacctgtacgagatctctttstaktaagatacaattaatcatgctctcttttctcagtgtctaggacaatgctctggcaaactcctgaaatattttacagtacaaaggagcatatcatttaaaaataaataaataaataaataaataaatatcacagggagagaaagcatacgcgctcacctgagtcttttctttgttttcaggttcctcattccacattcagtattagccagtatacccaggcctctgtcttctatgtctacaatccttatttctacatctaactgtagaattcttgacctgttttgtcaagctgcctactgatagtctctatcaggataataacctgtctcaatcccacactggagacaaaataaattatcttctctactccaaaccaattcttttttgtggtcccaatctcaatttatcttctcaatcacccaaacaagaagccatgagattgccttgaccacagctcctcccttaccagtatatgtagcctgttactaaagcctgttaattctactgcatctcttgaattccctcctcttcgttcccagggccacaattgcggttctaagccctgagtgtcatattaaaggtattttcaatagttctctatcaagcctaatgtatctccaccatcctatcttttccacagtttttgtttttcttaaacacagagtggttggccaggcacggtggctcatgcctataatcacagcactttgggaggccgagggggtgaatcacctgaggtcaggagttcgagaccagcctgaccaacaaggtgaaaccccatctctattaaaatacaaaaattggccgggcatggtggcaggcacctgtagtcccagccactcaggaggctgagacaggagaattgcttgaacccgggaggcggaggttgcagtgaaccgagatcgtgccactgcactctagcctaggcaatgaagtgaaactccatctcaaaaaataaataaataaataaaaataaaataaacacagagtgggctgtatcacttccatatgtaataattgctgatgacttccatttgccccacgtcaaaccaagcactctaaaaactggcccctggccaggcacagtggctcatgcctgtaatcccagcaccttgagagtccgaggtgggataatcgcttgagcccaagagtttaggacctgcctgggtaacatagtgaggctctatctctacaaaaaatacaaaaaaattagctgagcatggtggcatgcatctgtggtcccagcttcccccgggaggctgaggtgggaggatcacccgggcttaggaggttgaggctgcagtgagcagtgattgcaccactgcactccagcctgagcaatgcagtgagaccctatctcaaaaaacaaaaacaaaaacaaaaacaaactggccccccatttacacatgtggtttcacctccctgaagcctgtattccagtcatgtgtaactcctcattatgtcctaaacatgcccttgtgaaactctttctgtttcatggcaaagtcttactcaccttgcaggtcagctcaattcttagaagactttccaaactctttctctttcaaatagaatacactctgctgactgcaactttctctttgtttcaatagcatttcttttgcacctccattttagtagttatcacagtatcttgtaattacctttctggttctcctgctagacattgagctcctcgagggcagagattatggaacctcagcatccagtacagcctacctggtacatgtgtgctcaccacatgtctagaaaggaaagaaggaaggataaagagcagaaaagcatgttccatcagactgctatgacaacacagcccataaaaataactgaaaataaatttctaaatacagagtcagccatgaaaatagatttttaaggatcactactatctgccttcctcatttccactgagtcctttctttccctcttcaatttcatttagttgccttaaacttatattaaatctatctgcagttctaatgagactgtctctcagggtataacttaaaaccaccttttcgtgatgctaagaagcatcctggcatcatcagaaaatactggactaagagttgggaacttataagttctaagtcattaagttttttctacaaacatttattagtactygttatgtgccagatactgttctcagtgcttgagatacattcatgaacaaaaaagayaaaagttcctgcctttgcaaagcttgtgttctactagagggagagagggatagataacaaataataagcataataagtgttytggaagatgaggatcacaatggccaatttggggtgaagtgaaggaggatatacaagatgcacttttaaatgggaaggtctcatggagatgagatttaggcaaagaaagcaagggatgtgtgggagagcattcaggccatgataacaggtatagcaaagtcactaaggcaggactgcttggcatgtttgaagaacagcataaggattatgaggccagaagtgagtgagtgaagggagggtgataggagaggaaatgtgaggggactcataggagacagatgatgtggatcctcataaactatcatcattagaactgtagcttttattctgattgagatgagcattcattgcagactttgttttaaggagagaagtggcatgatttgactttaagtcatttgactgctgtgttaaaaatggattgtggtccaggcacggtggcttatgactgtaatcccagcactttgggaggtgcaggtggtggtgggtggatcacctgaagtcaggagttcatggtcagcctggtcaacatggtgaaaccctgtctctactaaaaatacaaaaaaaaattagccaggcattgtagcgggcacctgtaatcccagctactgggaggctgaggcaggagaatcccttgaacctggaaggcagaggttgcagtgagccgagatggtgccactgcactccagcttgggcaacacagcaagactccatctcccaaaaaaaaaaaaggattgtggccttgtggccaggtgtggtggctcacgtctgtaatcccaggactttaggaggctgaggcagatggatcatttgagcttaagagttcaagaccagcccgggcaacatgacaaaaccccatctctacaaataatacaaaaattagctaggcatggaggtgcatgcctgtattcccagttactagggagggtgaggtgagaggatcacttgagcctgggcagtcgaggctgcatgagccaagatcatgccactgcactccagcttgggtgacagagtgaaactctgtctcaaaaaaaaaaaaaaaattacaaaggagaaaggatagatagaaacaagggaacaaataagaggccattatagtgatcctggcaaaagacgatggtggttcaaagcagggtggtggcagagaagaaaagaagtcagtgttgggatatatttttcagtaagaccaataggatttcctgatagtgtaagctgtgagaaaaataaaggagttaaagaagactccaagagttttatcctaagccaacagaagaagggagtttccatcaactgagaagagggaaggctctgggaagagcaaatttggtgtggggaatgaggatggggagatcaagagttcagttttggacttgagattgaaatgcctattagatatctaaagaaacatatcaagtatacaattggataaatgagtcttgcgcttaagatagatgtcagagctggagatttatatttggaagtaattactgaatagatggtttttaaaatcatgagactgataagatcccaaccccaatacaattatctgcttaaccataaccagattatctaattgctctgcttcttattttcctcattctcttaatgataatgtcaggtgaaatcagtgattttcacctgtcttctatgctgcactagggttctgtagaaagagctgatgggatcagagggatgtttgctctcctattgcctaagccaacaagaaaccctatatttttacaatgaaaagacatacatttagagatggyacaaactggtatttatgatgtgtatactatagtggactagggtgcgtgtataggagagtaactttccagatgaaataatgaattagcatctcattacgaaatggccccaaatatctgcttttactggtcagctatcaaaagaatatgtgtaaataaaggtacatattagaaatagtacacagttatgctagaaatgtttgccatagagacaaaatgtgcacaagatctcctcttcaacaaatatttacctaaaaatcaaatttaaaaatcgaaggatttcatttcttttagatccaattgattgcagttgagcattcagaatttcctttgaccctgagaccatggacaattggtaatataactgtaaaaaatgcataaagttagtgctataagaggacttagaaatacttcagctaattaccctcccttttcagtggggagctgaatctcaagggtcaaagtttatgctggaactggaacctaggtcatctcctgactcctagtcctgtgctcttcttagcacacacataatgctgatttcaaggcctctttagcaactcctctgaaatttgcaattaaggcagaaagcaacactcacatgtgatcttcctattttcctaatgcattaattttacattaatacttttcctattttcccacagttctaaaggtcatctttgctgttgccttttgcctgatatctgctgtcctaatggtactactgtttatccacattcgccgtggactctgctggcagagagaatcctatgggaacatctgaacagacagctggataagccaggccaacctcctgtgacacagcatctctcagtggtgccgcatctaaaggacaggcttttgccatgtgggcattgccatcctcacaccctgccttttgaatctgcccagagcagggtctgaactcacagtgacccacagrctgctgctggatgaacactcaggctacctaggtcttctcataatggagtggtagtgcaggctgcttgttcagctagaaagaggctgttatgcataggatggttgtattctctgccacagttgtccggagagaaataagaagccaaactccaatcagccttttacctgcaaagagtgaagggtgagaaggtggacaaagacatagattagaaaaatactggatattgggggaagttagactagaagtattattatacagggtgattcttacgaaagaagacccaatcataaattataaataaactttttatttagctattaagtaggtttaatacacatacatacacacatgcacatgcaagcacacacacacacaactgaaaagaaatttctgcccagtgtttgatagcggaaagatttctgtttgtgtgtctgtatattaacacacatacatacacatatccatatttaaaatgcctacagaagaggtatttaattctcgaactgtaatatcacccactttatgtatgactcaggtcatctgtttacaatttctatagtggggattaactggaaaatacacatagccactatcagatacctccactatcagatctggatatttttaaagtttccatttttattgcatttaaaattgtaagatcttactttcgtaagggctagtcatagctcaactgagggttgacagcccactgtctcagccctgcactggctttgggctcatgacttagaacaagttttttttatatctttttttttccagacacattgtctcactccgtcacccaggcttgagtatagtggcatgatcatagctcactgcaacctctaactcctggactcaagcaatcctcccacctcaatctcccaagtagctaggacaacaggtgcacaccatcacacccagctaatttttttattttttgtagagacaggatctcgctatgttgctcaggatggtcttgaactcctagcttcaagcaatcctcctaccttggccttccaaaacactgagattacaggcatgagccatcacacctggcctagttcttttatatcttttaccttggtctcctaacctaaaaatgaagaatctgaattagatgaacatagaagtcacagctagctctcatatactgtgaatcatttttcattttatgctctagatgagtcattgaccaagcaagcactgtcaaggatggtagtattgtggcaagctgaaaatttatgctaaacaattttaatctgccctgaacccccagccatccagttggtgggatattcaatctcactcctcagtagggttctctacctcctcaggtcccagagaacagctggtgggaggagttggagaagagtcctctagacctctgtccatgctggtctctgttaagttcaccatccctgcccacatggtcttctgacggtaggcaggggatatctgtgccattgctcccaggactatattcttggagtccaccagcctgagactgtgcaatcctggggtgatacttttgctcagcacagaatcacccccaccgcctcccagaacccgactccatctgttagtctcaggaatcttcctctccccttgggtcccacagcttctacctgttaagtttcatgcacttactttctacataactctcactgagccaaggttattgcaaacaaaaggctaagaaggagttgtcttctcttgcttggcaatgtctgcttcctgatggaatacaaaaaccacctaggtaaaaacaaaaacaaaaaacacaagacgtggctaccttcttagcttgggaaagggaaaaatatctacagcagcaagaataaaggacaaattactgccttgataaagtagccagccatatcagtacataagccataatatcttatgctaattcaacaaacatggatgagaaaactattacttgctaatcactgacctagatgctaaattgtccaccccaattgtgattattaattgcttgactctgacaccgaccttatacagggttggtagaatgtaaaagtaagagctttcacaacactttttccatatcatctttttttttttttttttttttttttttgagagaaagagtcttgctctgtcgcccaggctggagtgcagtggcgtgatctcagctcactgcaacctctggctcctgggttcaagcaattctcctgcctcagcctcctgaatagctgggatcacaggcccgtgtcactatgcccagcaaatttttgtatttgtatcacaagggtttgtgataaaggattgatttattaattactatattttgcaagaattaacattattatctttaaagcaaaattagaaatgcctttgatctggacactcccaagtctgggtctcttcagtaaacattattaatttgttcctttaaccataaacatctagaggctaggaataccaaactttctagaaacacagcccagcaagtcccagcttcattttgctagccctyactcaaaatggagttgctctggttcacacgtctctgacagcaggattaaaagataatatgggccaggtgtggtggcttatgcctgtaatcccaacactttggaggctgaggtgggcagatcacctgaggccaggagttggagaccaggctggccaacatggtgaaacctcgtctctactaaaaatacaaaaattatccaggcatggtggcgcccgcctataatgccagctactcaggaggttgaagcatgagaattgcttgaatccaggaggcagaggttgcagtgagccaaagctgtgcggctgcactccagcctgggtgacagagtgagattctgcctcaaaaaaaaaaagaagactgcaagtaatctgtattcaaaacaaaaataaatgcagataatacaataatacagaagagtataaaatgcaaagtgaaaggtcttcctaaccagtttcaatcactagtggcaatcctgtcaacaatacctggttttatttcttcaaaggagaggcattaattttataaaacatacttttattttctgaaattttcacatctttcccttcttttacaacccatggtgtcctctttcttgtattctttttttatttccctgaagcaatttttttaaaagatgcatgaacagtaagcattctgatcctaacatctaaacatgtctacagtgtgccctcacacttacctattagttggctgggtatattcaggttgaaaatctttttttttcttttttttttttattatactttaagttttagggtacatgtgcacactgtgcaggttagttacatatgtatacatgtgccatgctggtgcgctgcacccactaactcatcatctagcattaggtatatctcccaatgctatccctccccgctccccccaccccacaacagtccccagagtgtgatattccccttcctgtgtccgtgtgatctcattgttcaattcccacctatgagtgagaatatgcggtgcttggttttttgttcttgcgatagcttactgagaatgatgctttctaatttcatccctgtccctacaaaggacatgaactcatcattttttatggctgcatagtattccatggtgtatatgtgccacattttcttaatccaatctaccattgttgggcatttgggttggttccaagtctttgctattgtgaataatgccgcaataaacatacaagtgcatctgtctttatagcagcatgatttagagttctttgggtatatacccagtaatgggatggctgggtcaaatggtatttctagttctagatccctgaagaatcaccacactgacttccacaatggttgaactagcttacagtcccaccaacagtgtaaaagtgttcctatttctccacatcctctccagcacctgttgtttcctgactttttaatgattgccattctaactggtgtgagatggtatctcattgtggttttgatttgcatttctctgatggccagtgatgatgagcattttttcatgtgttttttggctgcataaatgtcttcttttgaaaagtgtctgttcatgtccttcacccactttttgatggggttgtttgtttttttcttgtaaagctgtttgagttcattgtagattctggatattagccctttgtcagatgagtaggttgcgaaaattttctcccattttgtcggttgcctgttcactctgatggtagtttcttttgctgtgcagaagctctttagtttaattagatcccatttgtcaattttgccttttgttgccattgcttttggtgttttagacatgaagtccttgcctgtgcctatgtcctgaatggtaatgcctaggttttcttctagggtttttatggttttaggtctaatgtttaagtctttaatccatcttgaattgatttttgtataaggtgtaaggaagggatccagtttcagctttctacatatggctagtcagttttcccagcaccatttattaaatagggaatcctttccccattgcttgtttttgtcaggtttgtcaaagatcagatagttgtagatatgcggctttatttctgagggctctgttctgttccattgatctatatctctgttttggtaccagtaccatgctgttttggttactgtagccttgtagtatagtttgaagtcaggtagtgtgatgcctccagctttgttcttttggcttaggattgacttggtgatgcgggctcttttttggttccatatgaactttaaagtagttttttccaattctgtgaaaaaaggcattggtagcttgatggggatggcattgaatctgtaaattaccttgggcagtatggcctttttcacgatattgattcttcctacccatgagcgtggaatgttcttccatttgtttgtatcctcttttatttccttgagcagtggtttgtagttctccctgaagaggtccttcacatcccttgtaagttggattcctaggtattttattctctttgaagcaattgtgaatgggagttcactcatgatttggctctctgtttgtctgttgttggtgtataagaatgcttgtgatttttgtacattggttttgtatcctgagactttgctgaagttatttatcagcttaaggagattttgggctgagacaatggggttttctagatatacaatcatgtcatctgcaaacagggacaatttgacttcctcttttcctaattgaataccctttatttccttctcctacctaattgccctggccagaacttccaacactatgttgaataggagtggtgagagaggacatccctgtcttgtgccagttttcaaagggaatgcttccagtttttgcccattcagtatgatattggctgtgggtttgtcatagatagctcttattactttgaaatacatcccatcaatacctaatttattgagagtttttagcatgaagggttgttgaattttgtcaaaggctttttctgcatctattgagataatcatgtggtttttgtctttggctctgtttatatgctggattacatttattgatttgcgtatattgaaccagccttgcatcccagggatgaagcccacttgatcatggtggataagctttttgatgtgctgctggattcgttttgccagtattttattgaggatttttggatcgatgttcatcaaggatattggtctaaaattctcttttttggttgtatctctgcccggctttggtatcagaatgatgctggcctcataaaatgagttagggaggactccctctttttctattgattggaatagtttcagaaggaatggtaccagttcctccttgtacctctggtaaaattcggctgtgaatccatctggcctggactctttttggttggtaaacaattgattattgccacaatttcagatcctgttattggtctattcagagagtcaacttcttcctggtttagtcttgggagagtgtatgtgtcaaggaatttatccatttctgctagattttctagtttatttgcgtagaggtgtttgcagtattctctgatggtagtttgtatttctgtgggatcggtggtgatatcccctttatcattttttattgtgtctatttgattcttctctcttttcttctttattagtcttgctagtggtctatcaattttgttgatcctttcaaaaaaccagctcctggattcattgattttttgaagggttttttgtgtctctatttccttcagttctgctctgattttagttatttcttgccttctgctagcttttgaatgtgtttgctcttgctt

SEQ ID NO: 93202 - DNA, 146361 bp, Homo sapiens
ataacttttttttttttttcgacacagagtctcattctgtcacccaggctggagtgcaatggcatgatcttggctcactgcaacctccacctcctgggttcaagcaattcttctgcctcagcctcccaagtaggtgggattacagatgcctgccaccacgcccagctaatttttgtatttttagtagggacggggtttcaccatgttggtcaggctcgtctcgaactcctgacctcaggtgatcctcccgcctcggcctcccaaaatgttggaattacaggtgtgagccaccacgcctggctcagataactctttattgtgggagctcgtcctgtgcattgtaggatgcctggcagcatccctggcctctacccattaggcgccagtagcaaatctcccccacttccctaggtattataataaaaatgtcttcagacattgccaaatctccccagggggacaaaatcactcctaattgggaatcactggtttataacaaggagtgcttcaggaaaggctgcaaatggggcaatagtaattaaaacggatctccaagactggatatcatttagccaagcaaagtcggaggaaaagaaattccaaggagcatttgtgcagaaacaatgatggaagatttcaggtgtgcttaggcacacaacatgtactcatgtcaggctctcaccagagcatctgagtgcaagttgcatgattttgaacaggagaaaaaaatctaatcagaacggaggactagggagattactagccatctgtgtgttgggtggattggggcagggagagattaaaggcagggataacagtaatccagagggaaagtacaatgaatgaccaaactagggcagtgagagtgggaactgagggggatgactaagagattttgtggagatacaattgggacggcttagtgattacgggatgggggaggctcatatctttctctcttgctttaagtactatctataaagataggagctatatgaaagtttggaggctggataattggaagcacattaatgacatcagcagagagagggaagcaggttaaaaagggaagattatgtgcttggatttggattaattgggcttgttagaatagagatgaaccagagatctagtatagttttaaaagttatcagactacaggtcatagtagagacactagaggacagagtataaagaggagattcaagatcagatacaggtgggatgaacaccttgcctatatttagagggcatgaggtgatcataaataaggtgtaaggacctgccagagaggctggaggagattcagaatcctatcgtggaagggaggagtttcaaggagaaggaggatagctttgtgcgtcagggtggaaagtaccctgagaggttctagagaactagcagaaagaagactttacaatatcctttcaaaatagataggaattaatttatttttatttttatttttttgagatggagtcttgctctgtcgcccaggctggagtgcagtggtgcgatctcggctcactgcaagctccacctcccgggttcaagccattctcctgcctcagcctcccggtagctgggactacaggtgcctgccaccaagcctggctaattttttgtatttttagtacagactgggtttcaccgtgttagccaggatggtctcgatctcctgacctcgtgatccgcccacctcggcctcccaaagtgctgggattacaggcataagccaccgcgcccaacccagtaaatctaattttacatggggattaggtactagagtgtgtacaacaaggataaaaataaatccagtgagtcaaaattgtcatgggaaatttcccaaaaagtacagtataaatgattttcgagtattgaacttggtgtgtgtctgtgtgtgtatgcatgtgtgtgtgcacatgtatgtaatgggcaatgaatgcaagtattataggaaatataaaaacagtacaattttgaagtattttttactatgagaaatagagaaagagaatgacattgttttctgagtgtgtagagtagaattttagagtagattttcctcttttaagacagagtatcattgccttatgtaaactctcctattcaaattccaggaactgttaataactcaaggcagagaatatttgtgagtttctgctttcctagagaaaatttagtaagatacagggaagacattctgcaggtagttggcacatatttttcataatgatggcaataaaagcctttgttaataacagtgaggacaaaatgaagctggactgtctggcgctctggagtcaacctcaaaattagtgtctattagaaatcttagaaatgctgtctcttcttcagtaaaagacactgcccatagatgggtatatggtatatatccagtttggatccagttttccttaaatatcttttactgtgacttgtttgaagtacagtgccactgtcagagtaacaaccttcgttgatcatgagcctcatcatttgggaaaagcatgtgtgttgtctgggagagaagctttgggagtttacagttgacaatgagggagaactgtggggcccttctatcaacactaaagggaaatgggaggagagacatagctagattgttcttatattctttttttttcttttttttttttttttttttggagatgatgtctcactctgtcacccaggctggagtgcagtgaagtatgaagtgatcacagctcactgcagcctggatctcctgggctccagtgatccttccacctcagccttgggagtagcttagactgcaggcacataccaccacaaacagctaatttttgcattttttgtaaagactggcttttgctatgttgcccaggctggtcttgaactcctgctttgacgtcccaaagtgctgggattataggcgtgaacgcccggccctcatattcttctgtggatgttaattccctaactttctcacttcccttcaagctctttttttttttttttttttaaatatatactaccttctctcttcctttgttgctaacatcaaaagaatccttaagtaggggtaacagcaacagggttggaggtgaaactgtaccttcaagccaaaaacagcctgaaggctgaaagaccagactgctggtcctggatgaaatccatgacgcagagtgagaatttctgttcctgtttgcctgcccctcccctattctgagccgataaaaagccccaggactcagcctcatggaggagactttcctgccttcgggtagggggaccacccccgcttccctctctgctgaaagctgtttcatccctcagtaaaactccccgccttgctcactcttcaattgtcagcacatcttcatttttcttgggcatggggcaagaactcaggaaccaatgtgcaaggcaaacttgactcaggcgggcaaattgcgtggggtgcctcctgcagcaggtagtatgccccgagctaggcctccggcattgccggctagaggtccttgactggcaaagggactgagaaaaatcctgcattgagggagaggggggcgaggggcggtcgttggatctaggagtaattgccaggcttgctctagaacttattaatgcatttatatctatgaccccatcactctctatccccttattactctttctcataaaatttaccacatggtacctgtttttttttttttttttttttttttgagactgagtcttgctctattgcccaggctggaatgcagtggcatgatcttggctcacagcaacctctctgcctcccaggttcaagcgattcttgtgactcagccttgtgagtagctgggattacaggcaccccgcaaccacgcccggctaatttttagtagagacggggtttcaccatgttggccaggctggtctcgaactcccgacctcaagtgatctgtctgcctcagcctcccaaagtgctgagattacaggtgtgagccaccatgccgggccatagagtaacatctttattgagatataattcacataacatacaattcacctatttaaagggtataattcagtggtttttagtgtgttcacagggttgtgtaaccattaccacaatctaatttgagaacattttaatcaattcaaaaagaaatccaacgcccatgaacattcactctccattccaccctgtccccagattgaaaacaactatgtgttttctgtctctatggattttcctgttctgcacatttcagataagtggaatcatataatatgtagtcatttgtgagacgcttctttcactttgcatagttttcaaggttcatccatgtgactgcatgtaatcagtacttcatttctttttattgcagaatataataatattccattgtatggatgataccatgttttatttagccattcctcagttgataaacattttgctacctgatttaaagcttactttctgtttctcacactagtatatgagcttaatgagggtaagaacatttttgttgtttcccactcagtccctagcattttgcacattgcctgtctcatgtcagtgtcaggttcaaatctatctagctgtgctttcactgacgggggccaggaggtttcacaaggactcaatggctgattaaatgcttacagatacagatttctcagggcagaacttctgcaagcattttggctgtggtcagttactttcaggttttcattactttttggttttcacagcatccgcaagtgcccatagccattatctcagctgcctctctctttactctcttgccaatggtgccaggccacagcaggtgttatcttatcacctcagtccaccatacatatgcttatcaatttgaggggtcagcaatttcactggaggctgaaacccttgtcataaatggctccattttgagacatttcagattacaaaccactgttatataccagcctagcatgtagaaatcactcagtacatttattgaacacataatttaaccattcattcacctgaccaacagtcattaagcactgacacatttgttttcaacactccctctcttccacggcaggccacttggtatgggagataaatatgacaaaggatctgcccttacgaatctcataatccactgaagtgacaactgtgcaaacaaataattaaagtaaaattaagaagctgggcacagtctcacatctgtaatcccagcaatttgggaggcggaggcgaggggattgctgaggccaggagttcaagaccagcttggccaatttagtgagaccccatctccattaaaaaatgataaaataaaataattgattttgagaaaggatgtggacaaagtgcagcacatagaccaagggcccagttctgtttgagggcattggaggcaacttccacagcaaagacttgggttgaaatttacaaaaataggagtttgccagcttgacagagaggcagcggaggtcaaccagcagcacacttaagcagtcatggaggctgacctaggcgctggacatggaaaagtagcaatcctggagctttgtatagatgtggggagggaacttacaggggaccaactaggctactgggcaatttcacattataaagaattttatatgctcaaattaaaggattaaaaattttcccccatgtacataataaattggcaaaaatggttatatttgagggtgactaaggaactctgggaaagagatcggcaaaccaggcacatgttcttgactactgcaaaagtacatttaaagtagccgcgggggatacatgtatacttttgggcaggattgtgccgtggtcctctcagcatgcagcaaagttactttggggacagtagggaggtgggcaggagccagtgatgacggaatggcaatcacatttgacctctgatctgtttatttcctcctccttgacgtctccatataaatgttacacgggcatccccacactcggatacgcacccacagtggctgattcgggggtaaccgtgtcatttgcttgcaacactggcacctctgccctgcaccccgggartgagcagtgagtgaggctcgggtctgggcgctggctccgaatcttcgggctgggagagactccaccatctgggggcggcctgggggagcagccttagtgtcttcctgctgatgcaatccgctaggtcgcgagtctccgccgcgagagggccggtctgcaatccagcccgccacgtgtactcgccgccgcctcgggcactgccccaggtcttgctgcagccgggaccgcgctctgcagccgcagacccggtccacacggccaggggctacgacccttgggatctgccctccgctcagctcgagcttccctcgtggccgacggaacaatgaaggtaactacttatggttttgtccgtgttttacaaaaatgtgtgcgtgaatcgaaccggcgatttctccaagaaacatagttggcagggaggggaggaaggcgagacaaccatggcttatatcccccgcaaacgtctcagtatcttctttatcaatcgtagtttgcggggaccgtgcattctgttcagatttcggtttaacctccactcgcaggacgtgccttctcggactttttcacattcgcttttgggaacggaggtgaaagtctgctacagctccctcccctgcttgtgaagtttggaaaggaagtgagggcttctctcagtttctcctatgcacaggaggtggggaattttggagaggaggtctggggatgtcccgggctgtaaatgcgctttcctgcagcgtgtgttcgtgatgcaggagggagcggctggaagagttgacccgggtggagaggggagggagaacgatcttttcactgttaaaagcagaaggcccctcttattttgtttcttgtggaaattaaagcttctaggagttacaaatgatagacgcctaagggcattcatttgttaaaccagtgagcaccctaatggctctgatcttgctaatcaaggataattagcctagctgcctattatttctgactatttaggtgtagggatgtacaccgttgagtgttttgttttcctagtttcacacactggaaaactgcaatcgcatataaaacccgaagagcaactttttccaaggaaagtgaaggatgggcagatattcttgccatctaacattttggaattgagatgaccataatgcaatctgaacttctggtaggaataaagcctcgtttcagagtttctaaggagggagatgaagcgtggttctcaactgctcttatctacaacccatcccagaccatagtttcacttagaagaaataatatgtaaatagcgcctttgttgccaaacaaaaactttcactacaattaaacagtaaccgagtggaaactatgcgtttttgtattcaacagagatcacacaacttttcttctatagttagaggttctatttctggcttcctcatgcttgtttcatttcagatgaaaaacacactttagttgattatagctttagtaagtaaaaggagaaaactaagaatgaacagtcttgcttttccagctttttcctgtccatgtgcagttgtggttaattacgcgtttttgtaggtccaaaaacccctgtcccttccacaagatacttttataacatggggaactaggtaagatatctacaagtagtctcttttctgtttcctgatatttcctaagattaagaaagaaatgattgtattctaggtatgatcgaagaagtatggaaggttccattaagttagttttatcacaatatttcaaacatctttccacttatctcttaaatatgtattgctatcacaagcttgattttttaaaaaaatgttatttgcacatggcatcttgattgcctttgtcctcagcaaattctccgggcttaagtcatgcatgagcttgtattttaagacagacacatgcagaatgggcaacttggataagaaacataggatatacactgagtagcatgtgtacaaaaatggtaagtgagtattatgacttaataaatttagatggggatttaaaaatgatacacatgtaaatgggattggaggcaagggaagtccgtgtgtgtgtgtgtgtgtgtgtgtgtgtgtgtgtgtktgtgtgtggagggaagacgggaggcctagtggggagagaggttttacattccagacacaggatgtggcccctcaggctaggctcagagatgtaaagctagttaagctggcctaacaaaagggtggtggttagaaaaaggaaaaaaagaggtgggggttggggaggaaaagaatttaatgctggccaatattttcatctgataagtttcagtaatgagtaatttcactggatttcagaactacagagagaaaaggggaaaaatatttttccttttttacgcaagaatttctcttgcttttcagctcattagaaccagatctaattatttgaaatgagtttaaaaccttattatgaaaggaagttgaaaacattcgatcacaattgagttttgtactatggactaaaaccaagatgtgctttctgtcagtagctgtgcaactccctgaaaaaagaaaaatagcgcagagcgatctgagctttgtgaaggctacacaatttatcaggcccagagagataggagtgtgagacktcagtcacgtccccccgtacgcatgcgcaggagtaattatttaaagacattttgttcctgactaactgcctcactcattatgttcctggaatttgtgatacaaaaaaacaatgtttagcctatcaatagtttatatagtttatgttattttaatataaattcttctcaacttaraaactgcctcttttttcttttaaaaacccacttgtaactgctgtatatattcagggcaacttgatttggtgtttcgttggttgcagtcctcaaatttgacctcaatatactctctacytatataaattttgtctcagttttgtccgtaggctgacattccaattgttttcctaattatatattttgttccttatttctcatgtctagaaataaagctagggaagtaaacagctggaaaactgatagtggtgttattaacctaactgagagggctgggcttatgagtaaattattcctgtgcataaatgaaagattgtttctaaatggcrgctatgttgagcctttgtattagttacatcttttggggtttcaggttgccagcttctttaaatggcctcttctcaactggtataggaagttggaaaataaagaactttctttatttccctttagtgttggtaaccacagtttctttaaataacagatgcccaccccagggaaacccagtggcatgatcagccttatgctcaggaaggtttggttgctatactggagagtgagaatctgggaccttccatgatagacataattgtgccagctatcctctactttctatatgatgctatcattcttttttcttttcttttttttgacagaatctcactgtgttgttcaggctggagtgccgcaragtgatctctactcactgcaacctctgcctcctaggttcaagcaattcttgtgcctcagcctcctgagaagctgggattaccaccatgcccagctaattttcgtatttttttgtaaagacggagttttgccatgttggccaggctggtctggaactcctggcctcaagcgatctgcccatctcggcctcccaaagtgctgggattacaggcatgtgctatcattctttttgagcacaggaggaaactatggctgatctgctcattttactgtcaaaaatataggcagcttttgtattgtaacattatccccttaacagctgtccaactggtctatacatttcacctaacatatggtaaatgttcctactgttggcctttcctgagcctctgtccattcaactaaggccactrcaatgggattgtatgcagttcagccaagaaataaatgtgaggtgcaactcacattttttaaatgtttcaaaattaagcatttaggtgcttttattcataaacatgactttgcaaatattggtaaacagtttcatcataagaccttgtcagtgactcacaatgtcaatggtgaacgcaaaggagaatctgtcttttctggaacaccaggttcaggtatcagtttcaactaygcttataatttgtgctctaaagtccacaaagctaaattatctttcccctaaaaattgagtactcatatccttaaaatagcttggaaattagattaccttatgaatacagcatagcatgtcacataaacgtttttctactgttatacctttttggtgggaaagactattttgcaaaacatttttcttgtgttcagtaattaatgggaaaaacaaactctaaaagaaagagacagttatgtcccaaaaatacaggaaaatggaagaatggaaacagggaagaccaataaagaaaaaaatagaggaaattacaagtaataaactgaagtcatactgaaaaacatatggctctttcttattgaaagttgtgaaatacttgcaaaactcagctagttccattaagaatagtctttaatctaaaaagaacaaattcatttgtcagttctttatttcggtgtgtagatttgaatrtttcatcaattgcatttacggtttatccctcagtgtgagaactgtttttgctgttttgactataaatggatatctgctttaggaagacttaggaagcctgggacataggattacagatcaaattctatttgactccatagaagttgagacggaaggagcacctgttgggatattctagaccaaacattccacagctgtctcttaacgtgactgacaaagagacacagttgagacgaagtttgggtatatcctgggatgaggccaagggtggatttgcacaggatggtcacagggcagttgttagcattccaccactacataaaagggtgattttgccaagtgcatttcatttcatttcagttgatttagataccaagttatattgttttgactttaggactagatgtgagttcaggaatttgaaatcataataaatgtttccttgaactttgaagataaaaggtagagttaaaagacagctgcraagtctacatggggaagcataatacatgactcagggttccatggttttcagtgtcggtgagtgctctgtacacttataagaatagtgctggtgtttatagaagaaacacatgcaggtttgaggcaagacttccttgcttaattggtgcttttgctttccattttctaaatgccatgcaaactacttttttttttttcttttgttgagacggagtcttgctctgtcacccaggctggagtacagtggtgcgatctcggctcactgcaagctccgcctcctgggttcacgccattctcctgcctcagcttcctgagtagctgggactacaggcgcccgccaccacgcccggctaattttttgtattttttgtagagacggggtttcaccatgttagccaggaaggtcttgatctcctgacctagtgatctgcccgcctcggccacccaaggtgctgggattacaggcgtgagccaccgctcccggcctcaaactactttaactgaaaacattcttctaaggaaagcatcagaaaacttactagaattgcttaagaataaataaataatacaaataaaagagcaaaatgagaaagtagmcagactcctagtctattgtgctattgatctctccaggttytaggctttyttgggtctgacaccactttgtaaatttttttttttttttttttttttttccagatagggtctcattctgtcacctaggctggagtgcaggggtacaatcatggctcacttcagcttcaacctcctgggctcaagtgatcttcctgcctcagctccctgagtagctgggaccacaggcatgtgccaccacgcccggtgaatttttgtattttttgtagagatggggtttctccatgttgcactggctggtcttgaactcctgggctccagtgatccacccaccttggcctccaaagtgctgggattacaggcatccgtcactgcactgggccagtttgtaaatcttatgaaaagtatggccaatcttttgcaaaatgtgcaaacacayatagacacaaagttttatatctaaattattggttattaaagccaggacaatagagtgcatatagcatggaagacaggtagaaaagactgaaatggtttagttattcagagcagtggagggctattggctcttgcctttgcagtcagctgagatatgaaactatataagcagaagcttcacgctgccatttgaatattgaaaatctccacttttagttcaagagataaacaaccaatggtttgtttgttcacagcacataagttatcactttcttctctgtttcatcccatcaagatctaaggtgtatagttacagaatagaactcggttcataccatatgcaccctaatttcttcgatcttcaactagtttggaagtgtgtgtgggtgttttcttagccaaggttaatatgcaatttcttagtggagtgtaggagtttggggtgcctagccttcctacttcccacttagataacttcccctacctgttgtacctgtcaaaggagaaggccagtatggccatgttctttgcaggtgactccaccttagccacagctgattgtaacaagggtgtatatttggcccaagtccagccatcttttttttttttttttgaggcggagtcttgttctgtcacccacgctggagtgcagtggtgtgattttggctcactgcaacctctgcctcccgggttcaagcaattctcctgcctcagcctcctgagtagctgggattacagacacccacgaccacgcttggctttgtatttttgtatttttagtagagacggggtttctccatgttggccaggctggtctagaactcttgacctcaagtgatccgcccgccttggcctcccaaactactgggatyacatgcccagccagccatcttttacttctttcttattctcttattccacatattcaagcaggtaccacgtcctgtggactctgtcttctctgaatctataggttctctctttcccattgccctgcatactggtttatgctctcattacttctcgcttgaattattccaaaagtctcccaactggtctgaagcttaattttcattatgtgctgttcgatgtcattccaccacgcaaaatctatggcttccscattgtctcctgagtttagtttagtgcatgagaccgtttaaaatctacctacacctcttctatgtgcatgcatttctctagtcataagagaggatttgatctatctcaaaatgtgttcttatatttgcatttactggtttttaactccctccatcctatctataatttgcaccatgttgctcaccatgcagcccactccccagacaccttgtgagaacagtgatcatgtttttgcagtggaatgaacatgggcgaaaggtgggaaggtatgcatagatttacattttgaagtcaggaaataagatactgatcaatgctttaattcgactgtgctttttaccttttcctctgttgtagcatgaaccttgccccaaaaagatattgatcatatgctgcaactcctctgcacttaccttttcttctaccatggcaggaaccttgcaccattgttggtgctttacagatattggttgagttaaatcgagagcctatttctggactttcaagattcagattaattgattctgttttatacttctctgtttttgaatggcacatacatctttccacacttggatttctttgaagttaaagctttaattgacttccaaaagacagaggattataaaaacacagagaacagtaaagtatttacacggtcttaatgcctattgccaaacacatatagctgctattaatgcctattgccagactcatatagctgcaaactcatgtagcttaatgcccrttgccaaactcatatagctgctatatatgtctactggaaaactcacatagctggttgattttaaattgattgtaggaaaattcatacaaaaagatgctacataggaatataaactgaacaccacaaaaatcgtaatgaacaaactcagtaatgccagcctgttcaatcactagttttcagattaaggcagtatgcaaagggaaacatccttggaatggtcttagaatatagaacaaagtcatgtgtttgggaatcttaaccaattccaatactgttcaacatgtttttctttgttgcaaacaatgcagtttttaagcaaactaatgaatgcataccctgacaaacaaatccaacaaaagaggyacttagagcagtgttcattgaatcctagaattttgaaagaaaaaatctattaggtcattttgggcttttacttctgctgaagaaggattgttcttttgagtttatttttctagctttcagttctattccatttaaatgcctcgagaaataggacttctcaaattccctgtggagagttctggcacctactatattcacttttgaaagtctcctgataactgatttcctttttcttttggttatacacatcaactattcatggttggctctgctgatagttttccatgattctttatgcttatttaaaagaaatcatataacattaatcatataacatataaccattacttggttataaagcatgatattaactaaactggcttttaaaaattcaataacattagagcaaatattttattaatattgtcagtagttccatgaatatatagatgtaggatgtcaataaagtttatgccccttaataactgagtgtgttaatgttgtatttgctggttaactggcaccttccctcctcttgatcaatgttcttagaacagtatgtacaggagtactttagtctaccacttgatattcaaggacaacacttcgaagcttgaaatgagggattgttttaaccatattaacgtaactgcatagtttgcaatagatttaatgattcaacatcattgttaatatttagtttaattaaaagtgccttatattaacttgtacacatgtgaaatgacttatcaacaagattatttattgcagcattgtttgtgattacaaagagtggaagtcatttgcatagtcattaggcgtaaaaaataatgacattaaaagaaaacaattgaggaaagaaccagtaagctctcaggtagagataaaaagaaagttaccgtgagccttttcactgtatatatttatatatttgatttttgacacgtgagtttattataatcaagattgaatgaaaaaaattgaagccttttaatgaaattagcttgacaccagagtcattatcaagaaaatctgaaatactggtacctatgcacatttgattttattatttttagttttattattttttgagacagagtcttgctctgtcgcccagactggagtgaagtggtgtgatctcagctcactgcaatctccagcctcccaggttcaagcgattctcctcagcctcccgagtagctgggattacagatgcctgccaccatgcttggctagtttttgtatttttagtagtgacggagttttgccatgctggccaggctgatctcaaactcctgacctcaggtggtccacctgcctcagcctcccaaagtgttgggattacaggcgtgagccactgcacccggccatttaagcaaattttagttaagaccagtaacatatttttgacagtatttccgaagtgttgtatttaatttaactaattgaaaattatctattaagaaagcaagttaaatgtaatgtgtatacttcatagtatacacattataatgattcatagtaaccattatatgaagagtgtctaaacttttcttcaaatctaccatttatatagtacaataatgaccagcaaacaatggctaagttttacttaattagacatttgtgtagctcctaccaaggctaccagactttgtacccagtaacaggaaaacagaaataattcaagcattattctcactcttgagaaacaattctatttagggagatatacataaaaagcaaaggtggctgggtgcagtggctcatgcctgtaatcccagcactttgggaggccaaggcaggcagatcacttgaggccaggagttcgagactagcctgaccaacatggtgaaaccctgtttctactaaacatacaaaaattagctgggtgtggtggcatgcacctgcaatcccagctactgggcaggctgaggcagataattgcttgaacctgggaggtggaggctacagtgagctgagattgcaccactgtactccagcctgggtgacagagcgagactccatctcaatgaataaataaataaataaataaatwgcaaaggcaataatgtgcatatagtaggtgctacagtagaagtctgcacaaggttctgtgtatgtggaaaagacaagtcagaaaaattaggaaaggctttattgggaggtgacatttaagcagaatcacgaaagaagacctgatgaacatgggggtaagagcacttgtacacaaccccatactcctgggctcagactcacttgctcattccctaatcatagaagaccttgaggaaaagcatgctggggttcccttccagcccactggtaaatacagagaggcctaagcacccaacatcccccagggaatacaccactgggacttaaagcattggcaacccagcacccagttaaattccccttgtcactgtttccacattgtccccatcaccttcactctcttgatgctctgcattttctctcttaactcgacccacagtagaccctcccactcaaatctgcccccaataacctttgcaaccaatattaccgcactacactttatcttccctaagggtttcctgctcctcctggtcttaggtgaggtcatttctctgccagcctttaaagtggaagctgctcattttctctgtccctcatccagggctggagtgggactgatgtccttcaccctgcccagtactgtttccacatgagactccttgcatagcatctgctctctgctactcagaccaggagtctgtgctctctcttcctctaaccatcattggaagacaccccagtccctctggccccattatccactgtagattttagcacttacctcctctcttccctcccatgtgctgttttcccatttattttaaggtgcatgtggatggcccattccccttcctggcatcttaatccctttaatttctcatttccattaatttgctacattcctcatatgccagctacccctatggccatatcccagacctttgaatcacacaccaaattccatcaagtcctatgagtcatttttggtccaagacctatcttacatctatgcagtsctatctattttaacaaccatgtgcccagtttaggccactgtcttctcttcactgaatatatgtgttcctgttttttctcatccccatttgtttcccagacacaatttgttctccagagcagagtgatcacatcagtcacctgctwtaaaaactcctcaacccggtggggcatggtgactcacagccccagcactgtaatcccagcactttgggaggctgaggtgggaggatcacttgagcccaggaggagctgaagtgatctgtgatcacrtcactgcactccagcctgggctacagagtgacaccctatctcaaaaacaagcaaacaaacaaacaaacaaaaaccaacaaaaaattttttatyaagcaaaaaacctcttcaacctcttcctgttatgttttgaataaaagctaaagtccccaccatgctccagaagttcccaagggatctggtccttctcatctttacagcctcatcttgttttgccgtttccacctccctcatcccccaaactctttttyttcagggcctttgcacttgctgatgcctctgcctggaaggtcttcttctgattccccatccaggggtgccttatcaccctgycctgccaacctcagattggatgctacttcctcaaagagacccttgggactcccatgtttcccaggctttcagtgccctcatctcaacttgtaatgattgtattggggtgattatttgtatgactttgggattgatatctgactcttccactagaccatacatttcttgagagcagagagcatatccagtttttttaccactgtgcaaccatatgtcgtccaatgcttggcccataatagggggttggtgaatgtggtaggctgagtcatagcccccaaggatgcccatagcctcatccccagaagctttcatggtaaaagggattttgcagattgtgattaagttatggatcttgagatggagagattatccttgattatctaaataggtccaatataatcagtagcgtctttataagagagaggcagagggtcaaaagcagaatcagagaaggagatgccacagtggaagcaaaggggtgtgtgtgtatgtgtgtgtgtatgtgtatgtgtgtgtgtgagagagagagattgagatttaaagagctccattacttgatctgaggataaggatgagccaaagaatgcaggtggcttgtagaagctggagaagccaagaaaacattctcactctagagcctccagaaggaatgcagctctgctgacaccttgatttggaacttccagaaccataagataataattttgtgtagttttgaggctgggctcatgcctgtaattccagcactttgggaggccaaggtgggtggatcacttgaggtcaggagtttgagactagcctggccaacatggtgaaaccctgtatgtactaaatatacaaaaattagccaggtgtggtggtgcacgcctatagacccaactacttgggaagctggggcaggagaatcacttgaacccgggaggtagagattgcagtaagctaagrttgtgccactgcactccagcctgggctacagcktgagacttcgtcagaaaaaaagaataattttgtataatttcaggccacaaagtctgcagtcatctgttacaacagcagtagtacacgaatacagattttggtacctggaaatggtgtgctactgtaacagatacctaaacaatgtggaagtggcttttgaattgggtgttgggcagcatgtggaagaattttgagaagcatgataggaaaagcctagcttgccttagaaagactgttagtasaagtagggatgttaaaggcgctgctggtgaggacttggaagtgaagagcatggtaaagaaaatgtgtttcattttagagaatatcaaagtcattgtagaaggttggcagaagtgtaggttttcataatgtgttgttggtgagggctgagaaagaaatgaggaccatgtttagggaaactggaggaaaaagatccttgtcatacagtggaatgaaactgtggaattgtgtcttacagttatatgggaagcagaatttgtttgaacttggatatttggcttagctttccaagtaaagtattgaaggtgtagcctggttttctcttgctgttttatagtaaaatgcccgagaaaaagggataaattgaggtaggaactgttaagaaaaaggaacaaagacatgatgacttgggaaattctcaggatacctggtttgtaaaagatgctaaaattagaagattcattgtcaggaaagtgtgctctggagaggaagccaagggtgagttccttgtggcgtaggttaggggctgtggcagggatgcagggaagagatgatggtgacttggactaggggtctgacggggtatgggaaaatagagaggaatgagttgattctgttgggactttgtattgagttccttgattccataagtggaaacacatgtagagctctctttcctggccacctaagctctctgaccatatccctgactctctccagaatgccttggcttcatgtccacrtgaggacaaatcatatttttctgcattttgcgtgctggattcctctctggactaaagatccaatgagaggtggtttctagctttctgctctttcccacaacactccgtcagtgagtcttctggatgtcctataggcaactcactggatccacttggtctgtggaagaatcactaccacatccatttcaccttgggcacagactagaaggtgaggcagtcatgtcctgcagtcactgggtagcttacaagtgctaatacagcaatagcttaattagagagagagagaagaagaagaatgttatggagcctgtttctagagaggaaaccacaatatcttgatcaagagaccctaaaactggaagaaccagagcagctggtatcaaaatgtggaaaaaactgagatgtggcaagtggtacaactgatagccaaggaggaaaaatttgtatmcccctgtaatcccagcactttgggaggctgaaasaggtggatcacctgaggtcaggagttcgagaccagcctggccaatatggtgaaaccctgtctctactaaaaatacaaaaattagctgggcgtggtggtgtgcacctatagtcccagctacttgggaggctgaggcaggaaaattgcttgaacctgggagcagaggttgcagtgagccamgatcgcaccactgcactccagcctgggtgacaagagttaaactctgtctcaaaaaaataaaaagaaaagtttgtaccctcttcttttctcttgcctcaggataactgagattcttataatgcatttattgaacaaatatttgaggagtactcattatgtaagcatcagacactgctcaaggtcttgaggctgtgagggtgtattagtccgttttcacactgctataaagaactacctgagactgggtgatttataaagaaaagaggtttaactgaattacagttcatcatggccagaaaggcctcaggaaacttacaatcatggcagaaggtgaagasgaagcaaggcacatcttacatggtggcaggagacacagtgagaagggagaagtgccacacttttaaaccatcagatcttatgatgatataggagttaagaagaaatcacttaggtagatagtgagggtacgggagtccttggtaaggcttttcttttaaatgaaaagcagccccacacatagacaagcaagctgsgagcttgcacgggtgaatgccggcagaaactaggaaccagacaygttaagatggcrgctccattttcccttctctgccagccaagtgtacagtaaggagcagacaagctggtgccggccaagaggagaattcatgtgcataataagattagggtggggtgaccagscttcccagtgcgctatgtgaacatcatacctgattgaaccaatctgtgagccctatgtaaatcagacaccacctcctcaagcctgactataaaatctggtgcattcgccacccgccggtgtttcctctcagaagtcccctctctctcattagagagagggctgttttcctttctccttcttctgcctattaacctgtgctcctaaactccctgtgtgtgtctgttctgaattttcccggcatgagaggatgaacctggggtatataccccagaaaacatagccacttaagtgagaactcactcactattcacccccaagatccaatcaccttygaccaggttcctcccctggcgtgaggggattaaaattccacatgaggtttgagtagggacacagagccaaaccaaaccatatcagagggtgaagagcaggtaaagttgcagctctcctgcaacttgcagggaaaggccatataacacatggttatgagcacaaactgggactggactgcaggtgtgtgagccccagctttgctattgagtgaccaccagcaagttattaaactgtgcctcagtttttttgtttatgaaatggtggtattagtacaacccacctctcatggatgatgtgaggattaaataaaataacatgttgccaggcacagtggtgcacacctgtaatctcggcacattgggaggctgaggcccgagggttacttgaggttagaagcctgagacctgcctggccaacatagcgaaacctcatctctgcttaaaatacaaaaaaaaaaaaaaaaaaaaaaaaaaaaaggccaggcgtggtggctcatgcttgtaatcccagcactttgggaggccgaggcgggtggatcacaaggtcaggagtttgagaccagcctggccaatatggtgaatccccgtctctactaaaaatacaaaaattagccaagtgtggtggtgggcacctgtagtcccagctactcgggaggctgaggcaggagaatcacttgaacctgggaggcagaagttgcagtgagccgaggttgcgccactgcactccagcctgggcgacggagcgagactccatctcaaaacaaaacaaaaaaaccaaaaaaattaaccaggcatggtggcacacacctgtaatcccagctactcaggaggctgaggcaggagaatcacttgaacccaggaggtggaggttgcagtgagttaagattgtgccactgcactccagcctgtgcgatagaaggagacagtctgcaacaaagatccaaaaacaaatataaagcacttataacagggtctggtctgaaataagtactatgtaagtactgtaagtattaactaatattattacaatttatcctcatatagtaacatatcaaatattttcagtcagtgatgcaatatgaataaaatgaaatgatgcagtagtgacagaactgagagaaagctggtacraatttatactgactggtcagggaaagcttcacagaaaaggtgaactttcagctgacacctgagtaccatggtctggaggtaagagtgtcccatgcatatggaacagcaaatgaaacttcccagagcataatctgagaggggagatttcaggagtggagccacatcattgaagttccttagtcctggtaagtgtggattttattctaagtgtggtgaaatgcccctgagaggttttgagtagtagatggaattscatttttaaaagtcactggtgagtcaagtagtgtactatggttacatttttttccccttatacctcattttgtttttcctgcagttaattcttgcattatttccttttatttacttaccttactatatatttattatgaattctttccaattcccaacttcctgacagcctctcaatgtaattttacttaggttaaatgtatctgacagttcattttcttttttgtctctgtactctttctgctaccattctcattcttgcactaatttgtgctggtttctctctgagccagctgcacagctgyctgcctaagacttcctcttggcatcttttaccctctctctgtgttacatccccggttttctgaatcgtgtggcgttctcctttttactttacttcctcatttgtgttgcacgtatgctctagttgtttttagataaagagtgcatcagaggtagatgttttgattccttacatgcctgactttttgttctacttttgctctaggttaatacttgattttgaataatatcctaggttagaaatgatttttcgtcagaattttaagggaattgcttttctgttgtctagtttcctgtgttactgataggaagtccaaaggggctcgtatttcaggtcctttttatgtgtaacctgttttttgttccttgaggtattcagggtctctttttattgctaatttggggagctttatcataacatgggtccttagtcattcatcctagaaaattttcctttcctatatctttgatgatttcgtctcctctgctttccctcttttctcattcttaaacttctatttgtttgacattagacctccttgtttgatcttctaatttaatttttctctcctagtgtccaatttttgaggtgggagaaagatctcatcaatgttatctttcagcctttcccctgaattttaaaattttactcttcatatttcttctgattaatcctttaaaaaaatagcatcctgggccaggtgcagtggctcacacctgtaatcccagcactttggaaggctgagcggggagtggatcacctgaggtcaggagctcaagaccagtctggccaacatgatgaaaccctgtctctactaaaaatacaaaaacttagccaggcgtggtggtgggctcctgtagtcccagctacttgggaggctgagacaggagaatcaccagracctgggrggtggaggttgtagtgagctgagattgtgtgccattgtactccaacctgggtgacagagcaagactctatctcaaaaaaaaaaaaaaaaaaaaaagggccctgttccactgaggcttcagtgckgagcatggagggatactacctccaaattccaaacacgtttgacacatctaaagaaccttctaaaggatgactaaactaattctgcaagctttagcctctaacttatctccaatttatatttaatagaaggctggaaattgaacagaaaggaaataagattatttggaaataaaaaattgtcagccaagcaaggagagcttggcatttctggaaacttctttaccctggaagaggtaaaaaagtgattctcccattcccccaacagggcattcactaaaaattaagtgagaaatgctttgcctagaggatctgtagcttgcgaacacttgacttgtgccactggtgtacggaacatagcagtgtcagctctgccctgggacagtcaaggctggctggtgctgcctgtggttagagtcaagagaggggtcttcagtgggtgcagtttgcagttccagagtttagtagagcaaagacgtcatgaactatgtgaactctgaggaaaggtgtcatagaaacacctcaaaaggacactgtctaagaaggctacttgctggggcaaggagaccccaggggtcagaggctgtgtagggaataatgccagagctggggttgaaggagaatccttagaggtgagacagaatgtgcatcattgcagtggggctgtgcaaggcagtggtctccacaggaggtgaggacaagggggaggggaggttgtgaagaatccgtaagtgaccatgatgcaatagaaagccagaatttgggcatttgccataggagagggcccccagtgccagattataatggtcacagacaaatgagatttttaaccatttcctctaattcatggtccacacttaaccccgtgggtcctggaaacagcagctggagaatggagaggaaagtgatgtgggagagagaaaactttctttacccttttcataactgagtttatgaagtaaactgacagtagaaagataaataggagaaaagacataaatttattttgtgcgtacacatgggagtcccataaaatatgagactcaaagaaaggccagatgattgaagtttatatagtattcctgagctacagaaaaggaatcagggcttggggcttattgaggggaggtggtgacaggttataagagggtgaggagaggaagtgtatagcragcataggttgtcttgttatgcagataaaaagtctctcaggtgataaaagttgtctcagagtcccccatcagaagaataggtaatagcctgtgacaaggtctacctgtccaatcttctccctggtgataaaatcttccctggttgatgagattcttatcaaagtttttttctttatagatataaattttgtttacaaaaagacagtttttcagagctactcctgtgtctacagtgtctcagaataactaactggaaatacatcaaataagcatatcctgatgtggcatattctggtcatattttgggatggtgcgtcctgagctccaatgctgaaaaaacaggaaccccatttctgttggatgtgccaamctaaaataatcaaaagggtcagaatctagtttaaagatactttattcaagtgcaaagtttaaggacagtgctagggaaacacggatcccaaagaatggaagtcagcgttctgaactttagaagtttgggattgtttatagagagagagtttagggaagcttaacagaatttcaacatctttctgtgtaaggcttaatgcctagttacaatgatctgattagtcaaggtggtcactttcatttgagaaaggcatatttaacatttcacgggctgggagcggtggttcatgcctgtaatctcagcactttgggaggccgaggcgggcagatcatctgaggtcaggagttcgaggccagcctggccaatatggggaaaccccttctctactaaaaatacaatrcaataaaataaaataaaataaaawaaattagccgggcatggtgcacgtgcctgtaatcccagctacttgggaagctgaggcaggagaattgcttgaacctgggaggcagaggttgtggtgagctgagattgcaccattgcactccagcctgggcaacaagaatgaaactccatctcaaacaacaacaacaacaacaacaacaacaacaacaacaacaacaacaaacatttcacactgaaggtgtaacagtcatgggtttgtattttcgtttttcttggttttttttttttttttttgagactgtctcgctctgtattgcaggctggcatggcacaatcacagctcgctgcagcttcgattttgtgggctcaagtgatcctaccacctcagtctcccgactagctgggaccacagtcatgtgccaccacacccggctaatttattttttatttcttatagagaccagatcccccttttgcccaggctggtctcaaactcctggactcaaacaattctcctgcctcagcctcccaaagtgcctggattacaggcatgggctactgtgctcatcccatggggtcttttgtgccaactggtgtgagttaggtacaggacaataaaggaggcagttaatccattaatccataacaaagatcagtgaagggggaaggtctggtctctggtctctcctagtcatttacagaactagaacgatgagaagagagtgaatctataacctaagaagcagaattgcaaacatgctatgtgactcagtttccagtacttaacttctcccttggcataataaataattttagagagttttaagaattttgttttcttttacagatgttaacaacctcagcttgctgggggctggtggtggtggctgctcagacagtaaagcattgaatgcaatgtgaggtcaaagttttattacagatcataccggtcttttaagtacttgcagcaagattttcctaatacttaaaagtgactggaaactcaataggatcagtgtgatcttctccagatagggatggtagatttttgaaagtgggtgtgaagggcagtaatgagagaaaaataaaactatttctggttgtactctcccaagtcaaggtcattcaatgaatggttatatagatttgcatcaaaagtccctgttttcagcctcacctttggaaacacctggattctctattctgagactttctgagatgagggaaaggtggcttctcatcagtatctccttctttgtgcaatacagtttcagttctttctaatctacagagttagttccttctctactgtcagctttctaccttccaaaatgtgttaatgtcactcattatcatgtttcccattctctttcccttatggtttaaactttaaaagacaatggtatttgtttaagtgaatatctaaaaagatgtggagaaagattcatgtgttcagtctaccatgtttaattggagtcactggtagatttttaaggaaaaataacattctaggtttttccagtattgctatgtagcttgtctatgtagatcaccttgcattcttctgtttctctcttataacttgatttttttcttttcttttcttttctttttttttcgagacagagtctcactttgtcacccaggctggagtacagtggcacaatctcgtctcattgctgcctccatctcctgggttcaagtgattctcccacctcaccttcccaaatagccgggattacagacatcttataacttgatttttactcatttcattatcatccaagagatgaaatttaactcaaagcaaatgactattgtttcaaatacaaatcttaatcagggagaaaagattataacttatagttgaactggggtttggagattatatgtgttttttaaaattattctgtcccacatgtaacatacaagtgaggattttaaaaatttgtctgcagtttttttttttttaattgatcattcttgggtgtttctcgcagagggggatttggcagggtcataggacaatagtggagggaaggtcagcagataaacgagtgaacaaaggtctctggttttcctaggcagaggaccctgcggccttccgcagtgtttgtgtccctgggtacttgagattagggagtggtgatgactcttaaagagcatgctgccttcaagcatctgtttaacaaagcacatcttgcaccgcccttaatccatttaaccctgagtggacacagcacatgtttcagagagcaccgggttgggggtaaggtcatagatcaacagcatcccaaggcagaagaatttttcttagtacagaacaaaatggagtctcctatgtctacttctttctacacagacacagcaacaatctgatttctctatcttttccccacatttcccccttttctattccacaaaaccgccattgtcatcatggcccgttctcaatgagctgttgggtacacctcccagacggggtggcggccgggcagaggggctcctcacttcccagaaggggtggcctggcagaggcacccccaacctccctcccggacgggscggctggccrggcgggggctgcccccracttcccaracggggtggctgctgggcggaggggctctttacttctcaratggggcggctgccgggtggaggggctcctcacttctcaracggggcggccgggcagaggcgctcctcacctcccagacggggcagcagggcagaggcgctccccacatctcagacgatgggcggccgggcagagacgctcctcacttcctagacgggatggcagccgggaagaggcgctcctcacttcccagactgggcagccaggcagaggggctcctcacatcccagacgatgggcagccaggcagagaagctcctcacttcccagatggggtggcggccgggcagaggctgcaatctcggcactttgggaggccaaggcaggcggctgggaggtggaggttgtagcgagccgagatcacgccactacactccagcttgggcaacattgagcactgagtgaacgagactccgtctgcaatcccggcacctcgggaggccgaggctggcagatcactcccggttaggagctggagaccagcccggccaacacagcgaaaccccgtctccaccaaaaaaatacgaaaaccagtcaggcatggtggcgcgcgcctgcaatcrcaggcactcggcaggctgaggcaggacaatcaggcagggaggttgcagtgagcagagatggcagcagtacagtccagctkcggcttggcatcagagggagaccgtggaaagagagggagagggagaccgtggggagagggagagggggagggggagctgcaattttttatttagcaatttccaaacctattgtgttaggcagggttctccagggaaacagaaccaatagggcatatctatatctatatttatatctttatctatatctatatctataatctttctatctatctatcaagagatcgagagagagagatttattttaaggaattggttcatgtgattgtgggagctggcaagtctgaaatccatagggcaagttggtcagctggaaattctggtaagagttgatgttgcagtcgtgagtctgaaatttgcagggcaggtcaggtacagtatctattgcaattgcagtcctgaggccaaattccttcttcaggaaacctccgtcttttttgctgttaaggccttcaactaattggatgaagccctcccacattgagggcaatctgctttactcaaagtctgctgatttaaatggtaatcacatctaaaaaatactttcacagcaacatttgaacttgtgttgtctaagcaattgggcactatagcttagccaagcagacacatgaaattaaccatcactctgtagagatgaaagaactactgtttcaaaaaacaactgtttttgaatccgtcatttatcaacggattcacccaatggttaacctttctatatgctttctctttctcccaagtactgaatcatatgaaaataaattatggttgtgatatttcctatctaaatacttcatatgggacattctcctacatagcacacctaagaagattagtattaattcagagagatcatgtcatatctggttcatatataattttccctagctgacctcaaaatgtgtttgttttgtttacatattactctttatagttatgtttcttttaatacggatcaatatttgtgtgtttttgctgctattttttttaatgacattgttttgaataattcaggctcattggctatttcacatcctgaatttctctaattttatcttyatgattagagccaggctctaattcttggcaagaataacactgaagtgaggttgtgtactcctaattgccctgcatcaaagacacatgatatgcattggttcctgcattagtcatgttaagtttgattagctggtgaaggtggtcgccaccatttctcactcttgtaaagggacattttctccttttaaattaatatgtaatttgtggcacaagactttgagactgtgtaaatatcccattctctgacaacctttcttctgatgactttagcattaactgatctaattatatcattcttggcattgagtagcattcttgtgtaaagaaggggttctctttctctccctcctctcattataatttgttactgttattttcttacaagttactaagaattactcaaaggcagtatttttcaataaatcattggtaatttatggtcttctcactctagaaaagggaggatgggtcagaaagctgaggggaaaaaaagggaggaaacgagaatgtatattatcgacataatcggttgaaaatgtctagtgctgtaattatgccatcatgcagattaaaaagccacctgtgaaaaatcaacttgtattgttttgttttgtttgatttttaataaatccttatagtgtatgaataaaaattaaattaattgatcagtatcttcactaatggcagagaaggggatggactgagcagattctgcttttcactctgatatttgttaattgccctgtgtggtctgaagacctgggttctagtaccagctctccctctgcagacaggtgtgttactttggtcaaggcaatcaatcttcttgatactcagtttggttctctctgatttgagcataagaaatatacttgaaggccgggcatggtggcttatgcctgtaattccagcactatgggaagccgaggtgggaggatcgcttgggctcaggagtttgagaccaggctgggcaacatggcaaaacctcaactctacaaaaaacaaacaaaaaattagccaggcatggtggtgcacgcctgtagtcccagctactcaggaggttgaggcaggagaatcctgggaggcagaggttgcagtgatctgagattgtgccactgcactccagcctgggagcctgggtgacagagagagaccctgtctaaaatatatatatacacacacttgaatgcttcatgtcccttgctcagtgacagccccgtcctctgcttytgcacagttgaccaaggcttctcagtctactcctgtgtagaaaagaattaaagcaggcctgaggctgctagtcttagaaaggcttgcaaagttggcccttgtctggtgtctgggaacttgaatttctggagggttctcaccattccctgaaaagaatggctcacgatgcctaaaatatttgtacaaacaatgaagtttctgctgaacatctgcttccttctgggagtctggaattttaggatgtgctaggtaggggtgtttacatgacagccccacataaaaaccttgggcactgagtgtctaatgagattccctagtaagtaatattttacacatattatcacaactcattgctggaggagttaagtgcatcctgtgtgactccactgggagaggactctgggaagcacatgtctgatttcctttgtcccatgtgccttttccttttgctgatttttgccttgtaaatttttttttttttttttgagagacagagtcttactctgttgcccagactggagttcagtggccccatgtcggctcactgcagcctctgcctcctggattcaagcaattctcctgcctcagcctcccgagtagctgggactacaggcgcgcgctgccacaccggctaatttttgtatttttagtagagacggggtttcaccatgttggccaggatggtcttgatctcctgacctcgtgatccgcctgcctcggcctcccaaagtgctggaattataggcctgggccactgtgcctggccataatttttatcctgtaataaattatagtcgaaagtattgagtcctgtgaatcaacttagagaatcaccaaactgcttccaattttctcatatgtaaaatgggttgctataataatgatgatatctaccttatagggttgttttaagtatgaaaaatatggtgaaatatgtgtgaaactaggggccggatgtaggatgagtcatacagtgggtggttattattacggatcatattaactcttcaggtaaaaaccatcttgtagctgggcaaggtggcacatgcctgtagtcccagctacttgggggactgaggcaggtggatcgcttgagcctaggagttcaaggctgtagtacgctatgatcacgtctatcaatagccactggactccagcctggacaatgtaatgagagtctgtctcaaaaaaaaggaacaatcttgtgtttgcgtgtgtgctcatgtctttgttggaataatactgacacagtcactcaaattaactctcaaatctttgattattcatttgatgggaacaacaggtttatgtgccagcttatcaggacccctagttctttcattaaagtgtgtatgtgtgtgtgtatgtgtgtatgtgtgcacatgtgtgctagttttcttatctaacgacgaagtcctttgggaggtttactttttcattactatttttttcatgctttcctttgatgtgcacctggcaatttatagagccaatgtgtactacatattctgctgcagaaaatgacagaggtgaggaaggagcaggaagcagatttagaaaggaatgttacagtttatcaagttgtgactaatggaagctattaaaacaaaaggtaccaacccatcttaaatattcactgcctctacaactatttttctataactgttgttccttgtcagctctggggtggagggaatattcctgaatgttttattaagtaattcaaagatcttcctaggtatgtgtatcaaagatcctatgatgtatctgtcttgtaaattgagactggcatatattgggcttacattactgggaaaaatgtatgtcatcatcattggtgaaaaagagtttccatagcagttttttytaagtagagagataaatgaatcagacttttggaggaggtatgttttaactcactggaggatcacaccaagtctgaacatctaaggaaccctagtggaaaactggttttcctgtatgctgctctagcgatctgaggaaaggcctaaaaaaagccagtgtccctgtgatattgtgaaatacatatatgtggtctttgttcctgtttcctggcatacaagtactaaaaatccttggaatctccaaagtgctgtctttttgtatrttagtgttgactgatagcttcagagtggggctggtcaagttgatcaccaatggccagtggtttaatcagtcatgcctatgtaatgaagcctccatgaaaatccaaagggaatggactggggagcttctaaraagtgttttttaccttcccgtgagcctcctgtgctgaacacgtggagggtcacgggaaggtaagcaaaaattcattcacatgctgggagggtggcacatcccaactccacgaggacaaaagctcctgtgctcagaacccttccagacttggaccttgtatctcttcattggcttttatttgtattttaaaaaatatcctgagtgataaactggtagatgtaagtgtcttcctcagttctgtgaaccacgctagcaaattaatcaaacccgaagagggggtcatggcaaccccaacttgaaacctgttggtcagcagttccagagacctgaacttatgactggttggaaggacggggtgctcttgtgggactgagccctcaacttgtggatctgatgctatctctgggtagacagtgttggagctgaattggaggacacctagcttgtgtccactgcagaactgattgcttgcttcctgctggggagaaatccctatatattttggggtccagaagtcttccgtgttgattgtttttgtgtgagagcagaggaaaaatggtttgagagtttttcgggaaacagcccctcttagtatagtggtagaaacactccaaaaataaaatatgctaccccaaaaataaaaaatgaaaataaaaataaaaatctggagtggtcagtttgccaagaggatttatggagcatctaaggtcaagcattacttctcagccctgcagcaggcctctaattaagccatgccacagagtgcggtttgcagagaggtggagttcctgtggattcattcttctctctaaaattataaataacgcagcttccaaacatgccatattacctcacaaggtctaaagactcaatatgaatcttcaacttaacaattataactgacacagattgagatcttcctggatgctgaaataggctttacatgatttatctcatttagttctcataaaactctattattaatattattttacagatagagaaatggaagcacagagagggtaagtgtattagtccatttttatgctgctaataaagacatacccaagacagggtaatttatacagaaaaagaggtttaatggactcacatttccacatggctgggaggcctcacaatcatggcagaaggcaaaaggcacttcttacctggtggtggcaagacagaaaatgagaaccaagcgaaaggggtttccccttataaaaccatcaggtaacatgagacaattattcactaccacagaaactatatgggggaaaccgcccccatgattcagttatcttccattgggtccctcccacaacacgtggagctacaattcaagatgagatttgtgtggagacatagctaacccatatcagtaagtaattagacaaaccttgcaaagctagtaagtggtattgctggaattaaatctgccaatgtcactccagagtctatgtgatttactggtatattatagggtctacctataagcttgataaccttatgttagaacaaataaccatgacatattctgttcagtagtttgcatttccttttgactcctacaggggaggaggcygaggttcagggacattaaagtggggtttagagacattaggtggtttacccaagctttatctactagatactasataattgtctatctgacaataaagctagaacttacacccagctggacaatggagctacagcttaaaacaaaatcttctaatgagctcagaactcatggcttaataagatttgggaaaagtcctgcggacatttcactgtctatccagaaatgcgaggaagttaggagaaaaggcaaagtatctcatagacagataaaggcagttcagtaagtagcctgaataaatagccatatttaaaatctaatttggttcttttgtgcctaacacaattgactttatgctggtatctattttctgctctgtctctctttctgtctctacttatgtgtgtatgcatgtgttataaaatatatcagcccattgatcaatttttaatttaagcaaaaacatggtagattaatatattcaatcaatttattgagtagatatttatcgaggctcacacatttatctgactgtgtactaagcactggaaacccaaagagaatgaagtcactgcctagacagttggaggctgacacataaacaagcagggtaataatcaagtgtcataactagtctattacatgcaatgttaaactagcatctctaccatgcaaaacttgtgctcttggggatacaggaagactttccagagaagtacacaggacaggaatgtgttaggaaaccagtcagttcccaggtcctcgatcaggtcacagtgacttgtgattctattttgaacataggtcttaaatctttattttgatagcaagggttttaaacttttgatatatgatatacttctgaaaatcaaatttcatattctaaaattaagtatttttgcccttaactaacttgaacataatactataatacattaacatatattattaataataaataggacccctggaagtccaagagagacatgaggcttatttggtatgttaaaatcatacaggaagtgttgttaaataagaaatggtgttacactttctttgagttatatttatatggatatgttgttaatatgtgttccaacattgtatgagattcctaaaaatctgatatggacatccagtgtggttgttgggtcctctatgagcctagggagcactggccggttaccttgcatccattcatgtcagcgttggtagtgtcaggcacccgatggttcttagaagagtacttagctctactctgcagtgtctgaagttgctggatatatacctgctgtataaactgctgactagggcgctgcagtttacttactgtcttctcatggggaccttccccttcaactctttcctcttgggtttcacatcttgggtggggagtttcatcctagtagtttgcctgagaatacaggtgaacccacagaacaaagtggacttcgaaagcatctccttggagtgagactttgcttctttctctttgctagcaccatcttgtaccttatcgtcatgaactttgttggctgaatcattcccatttacttaattgaagagtaagagactggaacaatgctcactttgattttcctggataagagttaagagttcttgagatggcagcttgtttgacacatgaattttcttcaaatttgtgcttactaccaactgatttggtgtggaggagagcccagagaagttccctctctctgtcagaacaactttgtaacatttattaacctgacttctgccttcaattaagtgtaaccttttgccttccaaattaaaaagttccacattactccaaaaataaaaagtgaaaataaaaataaaaggctgatatgtcatggtatatgcagtaaattgctttattctgatttttttttctaaaagccttttgcaaatcctgaagtgctgtgtattcaaggaaattcatgaaagggaccttgacaagtagtcttaaatacaggtttctgataactttggagatcacacctttggactaggtaaaaacatccaaaactcgtctgggcgcagtggctcacgcctgtaatcccagcactttgggaggccaaggcaggcggatcacgaggtcaagagatcgagaccatcctggctaacackgtgaaaccccatctctactaaaaacacaaaaacaaaattagccgggcgtggtggcgggcgcctgtagttccagctacccggcaggctgaggcggaagaatggcgcgaagcggcaagacggagcttgcagtgagccgagatcgcgccactgcactccagcctcaaaaaaaaaaaaaaaaaaaaagtccaaagctctaatgaaaaactgatgcattcatgcagattgctaacccaacatcaaggagaacgagaattacatgggactgagtgaatgaaggattgaaattactattttaaagggtttttgtttgaaacattactgattttttttatgttttgttttccagactcaagaaaatattttttttcttttgagctatttatagcttacagcattggggtaaagtatacttctgtgagcaaaatggaaacatttacctttctttctacctgaattcttcagaawttggaaactattcattagtgttcttattttctggcaatatagttatttgcataagttcaataagaacctattttcggctgtgcgtggtggctcatgcctgtaatcccagcaccttgggagggcgaggccggtggatcacaaggtcaggagtttgagaacagcctggccaagatggtgaaaccccgtctctactaaaactacaaagattaaccaggcgcggtggcaggcgcctgtaatcccagctactcgggaggctgaggcaggagaatagcttgaaccttgggtggcagaggttgcagtgagccgagatcgcaccactgcgctccagcctaggggacaagagcgagactctatctcaaaacaaacaaacaaaaaaacaaaaagcaaacaaacaaaaaaagagcttattttcttttgtaactggacacatggaaacagtggttattttaccaaggctttgactggaatgtcttttttttgagtgcaaccggactgcttcgagggattgaggttgactttatacagccagtagacttggaaaaagacacacctggtaccttgcccacacaattcctttatagcgtttctaactttgcaataagtaaagaatgtcactttctgacaggcccagggacctcaagatattttggagacgttgaaaagagagcaattcacccaattcatacaggttttacaggcacagtctgatggcgaatctttggcttggcttcattgcttcaagagtttgtttttttgacacggaatctcactctgtcacccattctggagtgcagtggtgagatcttggctcactgaaacctctgcttcctggattcaagtgattctcctgcttcagcctcccgagtagctgggattacaggcatgtgttgctacacccagctaattttttgtatttttggtagagatgaggtttcaccatgttgcccagggtggtcttgaactcctgacctcaggtgatccacccacctcagcctcccaaagtgctgggattacaggcgtgagccactgtgcccagcccttgagaggtttcaaaagtcttaatctgagattccttatgaaaaaattccaacaaagccaacttaagagccatccctgtagaaaatatatctatttaaatatcgtctgttttatgccacaatgtttgttttgcgttgcaagccgttatctcctaggcatgggtaatccactttgagaggaaaatccagacatcattgtgcctaatttgctgccacctgtgtctgtgctggatcttaccagggttagctttattttctttcaactggcaaaattctgataaagcatgtagcttcacggtagagcaaaaagtgtaacttaattgaaagtcatgactttcaggagtctaatgatgctaatatattttcttctagagaggtgtctttattgtatgtaattccctgaagaaatgtaaagatttatctaattcctattgctctgacaggcgtgctcaatagaagcattgaagtaaaataaaaataacctttttaatctgtgtatttctcttgcccaccaagatatttaatttttttcttgatctttgcttttgtttatgtgaagatatttatgtctatatcatttctgtatatatcacagaaaagttttcacttgcttgacattttattctacaatgatttttagtttaagtttaaagaatggctacattcagatttattttcacaactatagtcctgctaaactgcctttgttgaaaactcagtttttataataaataaaaaatatcaaagcaaaaaaaaaagagccttcatgataaatcaccattcttactgcactttaagcagataatcatgccagagactaaactgactttgcaaataaattagttttattattattatytttgkgggtaaaagttgggatgactgtagaagagaaaattatatttcagaagaaaattataccatacttgttattagattctagtcttgataattgtttttttgagtttttgttatttgcctacaatttgggctgaatcctgaattccttcctgggtacaagtctccaaactaatgtttcctaatttttctaccatttttctgtcttggaatcaccaagccctgcaggctttagctagacaacttgatataaactttggaagaaataatgacagcaacttaatatatgagcagtgttcatgtcagctgatgtatggattactcagaaggtttacttgaacacctgattcaaactataatccaraaatatctgtaagattgccactgcaatctgaagctacttcagagactctaggaaaattagtttatagacaactccagatgttaatctttgtttttcttttgttttcatggaaatgccttttattaaacatctgattgcttgattcatagaggcctgactttggtggaagcaacaccactgcctgaaatgagatataactgttaaccgtttaattggagcggcctgttctcacgactgcaaractagttcaatggcttataaaataatccacccgctgggcacagtagttcacacctgtaatctcagcactttgggaggctgaggtgggcaaattgcttgagctcaggagttcgagaccagccagagcaacatggtgaaaccctgtctctaccaaaaatataaaaaattagccgggcatagtagcatgtgcctgtggtcccagctcctcgggaggtggatgtgggaggattgcctgagcctgggaggcagagcttgcagtgagctgagattatgacactgcactctagcctgggcaatacagtgagaccccatctcaaaaaaaaaaaaaaaagataatctaccaacccaatttctcaactggggaatgttgggctcctgctctcctgtctctgacctttcattctcccttgaggctagccatcaagactacaacccctcttccccaaagtgggccatagaaacaaaaccccttttccccaaagccaaccataaaacctaaaaatagtactctaacttccaccacccccagcctgtctgtgtaaggccataaagaaattatctsactcactttgtttgactgaaggttataagacccccattccagagagggtccagcaccacacccagaaggaagaaatgcatgctcagagaggcaagaagggtccagacagacaggctgtgctggatttccctgctcagtctattagcattagaccataccttttttgtccaatcatatttmtacgtggctctccatactttgtttaacctaacctragggggctcagggttttggcctgggcattgtctgttggggaatagagtgagtcatccccagctcatgggtttgcatccagttcttgttgtaaaaggcccaaagcctgttggatggcaaccctgagccatcgtggaaggggggttccagtttcacaaatagatactcagacagccaaactaccatctacttggtgccaacgtttgcactgtggtcaaagacttacctagcacagactgaacaaatcttcccatctgtcacataaatgtccccaagcaatgttgaagcacatgccaggatcggccttgctaggtcctgcttggtagataagcaaatggcttccttgtggtgtttttattctattttgtctcattaacactacaactttgtgttatctacttgataatctgtaattgtaaatacatacaggattatgtaatttgtgtaaatacataatgacagacttctgaaaactggtattttttacttggtgtccatttgaagctgttttaggttctgtggcacatgaaccaatggcatttaaaaagcatactctccttgctcttaaaaaaacaaacaaaacaaaacaaaaactgtccattaaaatttttgtmtttttgtaaagacagggtttcaccataaaaatggacagtttcccttatatctttgggtcttcgttctgtaggctctcgtgtcacataaaattatgatcarataaatttgtatgacttttctcctattaatctgccccttgtcaatgattttgagcaaccttctgaagaaagtgatggggaagtattccctttgctgccacaaggtatatatcagataagtcagtctattttcttgaacatatatcacattcataggaaaaacactttttccaaaagattactgtcttcccaaatacccacgttctccattttttttttttttttttagagatggggtctcactgtgttrtccaggctagtctcaagcttctggactcaagcaatcctctcacctcagcttcccaaagtgctgtgattacagacataagccatcacgcccggcyccattttctcctttgggtgtatgtatattgctcattgtcaggcatcaaccatttctcttctctgagatggagtctcactctgtcacccaggctggagtgcagtggcgcaatcttggctcactgcaagctctgcctccctggttcacgccattctcctgcctcagcctcccgagtagctgggactacaggtgcccaccactacgcccggctaatttttttgtatttcttttttggtagagacggggtttcaccgtgttagacaggatggtctcaatctcctgacctcgtgatccgcccgcctcggcctcccaaagtgctgggattacaggtgtgagccactgcgcccagccctcttctaattttttatatttatcatgtatttactagaactggtttattttcgtgagcatatgttgtggattctactataaataatgcacttaataatcattaataaaacttaaatcctttccgtcttgattgtggccttttctttttgctattaatttcctcagcataggttaacctgaactcttaaaagctatttaggtactggtataaaacaaaattttctccaaagcaatccagtatataatatctggattttaaaaaagcagcctcatttaattaggattaatttctcctttcagaagttaagtgattctgtttctgtaaaacgcaaaattataagcttaattgttttccacacaggaaatgaaattcctaatctttttatccagaatcttcatgtgtttgtctctctgtccatctgtcactcctttttaaggtacctggagatgacctaraggcttgccacgcttagggtttcctccctgtgcagaagaagatgggaagtgcaaatgaggacsaggggtggggagggaagagggagtcaggtgattcagcaagtgcaggagyccacagactaagctcaggaatttgcactttgtctgctcgcagagtgagtttcatcgtggtgtgtatatattgagatatgcaacagactccactggaatgtcagaagaacttatgtttatttttcctctaacatgtgggaaagattaaactgtatttgtatttaactcacatagattggcacgtgctcattctgtgtgtcaccctgccacgctgtcacaaacttcgagcagggtcctgaggggagaggagggcatagctcctgctcccagggggttgcctgtgtagccctgcgcattcattctcttccagagggttgtgatttgtggcggtctgtgtgagcctggttaaggagagttacagattatgtcatctggtgttaactgataatctttgcaaaagggacattggctttaagagatgtctgcaaaaaaaactctaaacaaacataaataaaaatttaaaaggataaagccagaataataatgaaaatattagtaatgtaaaacaaggaaatgtgtcatgtttttcatgataactaatattttttcaatttttttttttttttaagacagtctcactctgtcaccaggctggagtcagtagtgcgatcttggcycactgcaacctccacctcccaggttcacacaattctcatgtctcagcctcctgagtagctgggtttacaggcactcgccaccatgcccagctaatttttgtatttttagtaaagacagggttttaccatgttggccaggctggtctcaaactcctgacctcaggtgatcggccgccttggcctcccaaagtgctgggattacaggcgtgtgccactgtgcctggccccagttcttattataagttctccattaaccatatcatgagattaaaaaaacaacaatgatttcatcggaactgacaaatagtgggtgacacaattttgatcatcaagaagactttaaaagaaggatttgtatcactgtcattactgattacttggcccttgtgtatactgggcctttagctagggctggtacaataaaataaccatagttagaaagatattttaaaggattacttatttcatgtttatctcacccttttatccctatttttgggcatgatttattattattaggtttttaaataaataatgaaataagcatgttaggtttgcatgctgctttggttaacattgctatataaccaaccaccccaaactttgtggccttaaaacaataatttatttatttatttatttatttatttatttatttatttatttatttttgagacagagtctcgctatgtcacccaggctggagtgcagcggcatgatctcggctcactgcaacctccacctcctgggttcaagtgatcctcctgcctcagcctcccgtagagctgggattacaggcacccgccatcaagcccagctaatttttcctttatttttagtagagacggggtttcaccatgttggccaggttggtctcgaactcctgatctcaggtgatatgcctgctttggcctcccaaagtgctgggattacaggtgtgagccactgtgcatggccaacaataatttatttttatctctcatggtctctagattgcctgggcccggctgagcagtctgagtcagccttatggtctctcatgtgtttttaatcagtcatgaggggccggcatcatctgaaggcttgactgggctggatgtttaagacagccactcacagggctgacagtgatgctggatgttgcactgttgactaatgagcctgcacgtggctcctccatgtgatttgggctatttatagctggggtgactgggttctaggtggggtagttccaagatccttccaagaggaagaaagcagaaactgcctggccagttagtgtatatgcttagtcttagaacagtgtcacttccatatttctccatagtccattaatcaaagcagttacaggaagcagacagacaggaagggaaaacacaatgcaacagaaggagagattgaagtgttggcagctgcaagccaagaaacacctgggttaccagaagctagaagaagaaaggtaggattctcccctacaggttccaaaggaagctgggcctgtccacacctcacctctggaactatgagacaatcactttctgtgggtttaagctacccagtttgtggcactttgttactaccgtcctaggcaaatgatacagtaactacatacacagtacatagaattgctcattttacttcgttgaatgggacttggcattgaataagcccaaatgagaattcttttgtcaagatttttttatggctcacttttccagagacgtgacatggcaggagtaaggggagggtttggcaggtaggaattatactcatctgtcattgtcttcccaataccaaccaggaagcatgtaaataatagctgtgcagtttgttttctgaaccaaactgggccttattttttttaaagaaactttattaaacaaacaaaaacctagaaayactagatgtatatttttaaggtttctctcacataatatcctaatcatcagtataccgtaatccaagggctacatataactgaaaaataaatgggtcttaaaaaaattaaaacatggtatataacactagctaacatgtactgagcagttactaagtgctaagtactgctaagtcctttatagatatcttcatgttgagtgtcgtcactgcccattacttactctgagtttaaatatgagactcaaaagaggttagtaatttgccaaaagtcatagggcttataagtgatagaaccaggataacgaatctcaaccaagggacttcaatgcccaaaccggtgctcagactgtagccccatgtagttagctatttacatttgaaaaaatttttaatgtttattattttttttaagacagggtcttgctctgtcacctaggctggagtggagtggtgtgatcttggctcactgcaacctccacctcctgggctcaagtgatcctctcatctcagcctcccaagtagctgggaccacaggtgtatggcaccacgcccaactaatttgttgtgttcttggtagaggtgagtttcaccatgttgcccaggctggtcttgaactcctgagctcaagtgacctgcccacttgcctcaccctcctaaagtggggggattacaggtgtgagccaccatgcccggcccagctatttacatttaaatataaattaaaatgaaacaagattaaaaattcggtttctcaatcacactaaccacacttgaagtgctcagtagctacatgtggcttagtggctacctggcagatatagaacgtttccatcagcacagaaagttytactggaaagcattgatccaatctctttgaacagtcacaatgcatataaagtccttattatgactgtacaagggaagacaacgagtagaggaaggcagaaaataggaaaaaaggaagaagaaagatttagggtgagggagagcagttctatgaagaaaagaagctcatatctaggagtggagtggaccctgagaacatgttagtctattatattctaaactttggcagttaaaattccaaagtatattaagtacatgctttctaaaatattagagagctgcagttcaacagatttttaactctccacagcatgtccggcactgggtgaggtgggatggctaggtgaataatataggcattgtcatgtgcgttcgtgtgaagagaccaccaaacaggctttgtgtgagcaataaagctttttaatcacctgggtacaggcgggccgagtctgaaaagagagtcagcaaagggtggtgggattataattagttcttagaggtttgggataggcggtggagtaggaacaattttttgtgggcaggggatggatcttacaaagtacattctcaagggcgaggagaatattacaaagtaccttaagggcagggaaggatattacaaagtaccttctcaagggtggggagggtgtatcatacaaagtgcattcacaagggtggggaaatatcacaaagtacattatcgcaagggcagggagggtgtattgtcacaaagtcaattgatcggttagggtggggcaggaacaaatcacaacagtggaatgtcatcagttaaggcaggaacctgctattttcacttttgttgatcttcagttgcttcaggccatctggatgtatacgtgcaggtcacaggggatatgatggattagcttgggctcagaggcctgacagacatgaacttcccatcataaaattagaagagcattaatcaaatgattagaataaaatattaccattattttgaaatggcaagcattgtatgtaaataaacagcagaggaacccactgtagcctagacagggttcagagacgttcctgccaaggacatggcacagggactgaacaaggaaggatgacagtgcctggcaaaggcagggaatgttacaggtatttgggcacctgtgagaaggcctgatgtccgaaaggactgaaataaattaaatgtgtggggggagagagaaagaaagagcctagcaaaaggtgagctggagagtcagaggcagaaggcagaatctgggatgggctgggagcttgccaatcattttgtcaaatgggtgatgtgaagccttgaaggttttttgaccaagaggagatgtcttcagatttgcgtttgagacattttcactggttgtcatgctaagaatggcttaaagagaagcaaggctggggtcagaggagctgcttggaagctgtttggtactaggatgcggataacatggttggagaaatggcaactgtcagggtatttggagcaagaatggatagacattggtgatcatcacttggatgcatttgagggacaactgctatgtttctactagagcaactacatagagcaggagtaagcaacttacagtccacagaccacatttgctctgtcccgtttttcaaatacagtttaatggaaacagagccatgcccgttctttcacctattctgcatggctgacatcaggcatggttctaagtaatatacataagtttcatatattaatgctcatctatcccagttgacaaacatgaagtgttgctattgtctcattttacagcggagaaaactgacatagagattctctttcgcacccatagcttcagttaccacctctatgccaatgattcaataatacctctaatccagacctcttctctgagcttcagacaggcagatctctcacagccagtcttggagacacttcagaaatcataggtcccaaaccagactcctcctcatcccctcaaacacattctttttcaacattccttttttcttagtgaacatcaccaaatagataagcaagtcagatccaaggaggcctccttggcacttctctcatccttgtcccaccttatatcatctatttttctttttctttttttttgagatggtgtctcactgtgtcacccaggcaagtgcagtggtgtgatcctggcccactgcagcctcaacctcaccaagttcaggtaatcctctcaccttaatcccgtgagtagctgggactacaggcacatgccaccgagcccggctaatttttgtatttttaccagagacagggttttgccatgttgcccaggctgccaccttatctccattcttgctgaaatctggctgtttctctccacttctattaccaaccaccagccaaatctgacttattaaaaggatcatctcgtatgtgggttctgtaatagcttcttcaaaatccattcctctccacccagaccctcttccaatctccaaactgcagccaataccttcaattctgtcaccgctcctgcatactccacctaatccttaacctttcaatggtttctcttgcccctaggttaagctaaattgaaaactgctaaagctacagcttcttagtgtaactagtaagtacagtgactactatgtctggtttacttcagctgttgctgactaatagcacttcttgaatgaagaaattatattaccstactgtagggaaaaatttgtacttcaatggaaaactgaattatttagagcaaacctttaaggttatctgattctgattccatgggccctttcattgggtcttacattgtttcattgtttttgagttattttacagatgactgatagaaatgcaaaataattattgcatgcagtcatgcaagtaaaatctgaaggtcagggttcaattaacttctctcccctactgtggaagaagccaatttcatttgcatattcatttcaatatttctgacctataaacatgcctgttctttgaaccagtttttatatctgcctggtaacttcattaaatgatttaaataaactctataatttagtttattttatacctgtatgacagtcaggcttttaccttatttttgctttttaaaattattctttagctctccctaaggcactacttggctggccctttggctactcactagcccaagctccatcctcttctgtctaccgcagccccaggctctcttttggccctttgttccagccctcctcagagaagttcttttgtcctggaactcactttcataccaggtgctcttcatcccttcttcctttagtaaatttctttaatctttcagatttctgctcaaggatcacttgctgaaagcctttccaggcctttctgagtcaatacaatccattattagaggctcttagagcacaggcagcacttgttataattttacatctgtctgtgggattccttaacactttctaacacaattaacacttttctctctggctgggggcaatgcatgataacaggatgatggtatgctctcaaccctcccccagcaactagcccagtgcttcgaacatggtggatagatacaccgtttttattttagacagatttttgagtagcaagtacctactgctcaggagacagatggactgaaaaaatatatttgggagtcatcagcacataggtgcagccatgaaaatgcacgagaagcaaaaccattggcaggaacaaaatgaaggctattagagaccttatttaggtggaataattggacagaagcccttaatggggaggaaatagaagcagttaatacagatggaggccgggcgccgtggctcacgcctgtaatcctagcactttgggaggctgagataggtgggtggcttgagtccaggagtttgagaccagcctgggcaacatagcaaaacccggtctctacaaaaaatacaaaaattagcccggcgtggtggcgcaggcctgtagtcccggctactsgggaggctgagatgggagaattgcttgaaccggggaggcggatgttgcaattagaygagatcgcgccactgcactccagcctgggcgacagagcgagactccgtctcaaaacaacaaggacaaaacttatcttataagcgaccctggacttccagggacactcgccgctctatggtggtacgtgacctgcctggactctgtggtctttggagcttgggaccccaccccagcgtaagaggcctttctgtgccttgtataaaggagaggaaaagtgtaggttttctgagttgataagattagagctacagtatattatcagtagcgttgtatgaaaccatttaaaaaaccaaaccggatttaaccgctttcacccagaataaactgccctccccctctttccaagatcaagtcagccccagttaccacttcctattaatttaaaaaccaggaaggctcataatttaggctgacgttgccccaggcgaacactgcatataagacaatagctattccaatcctcctttccctttctaaaccgaatagtacttctaacatcacttttccagtcctctttctaaatattgcgatcacgagcctacatcggaaaactatgaaaacagtatgattggagctcttgatggtctgctttgcctgaaaacgatgaaaggcattgagatctttgggcagaaatggcccttagggaatgcgagcctggtagccccataacaccccgagttacaaattcggtttgggtaggtggcgcagggaaatctaaaagctggattcacgttctcccccttcagtttgcacatagcggtcagtggcagacaagagcagacgcacaaatgtcaatccccgcccgcaaactctcgagggcagaaacwgctttttgtcagttggatttggagtcggtggaaaagctgccctaatgtagtttctccgaggtttccttagccttgaccgaggggcgcttcccggccattcacctagaggttgtttaataaacaaggatgctcgcgaaatatctgcgcttggaaaggcgctcgttcgtggcgcgcattctcgggcctccgcaagcgaccccggtgacagggacaaccgcttcggttttagcgactgcagacagactgggacgagacggttggaggctcctccccaagggatgctggaggggttgcgtcgtaccctgcgcctggccctggcgcgcggccccaggtcgtggtacccagcgccctatgggccgtgcgccggggcttggccacaccgcctgctttcgcttccagccgcgcgctccgtgccactgccgctctctgcagccccgcgtccccgcagcctccccatggccagcccgcttcgctccgctgcggcccttgcccgccaggtacctcgaacccgggcgtttgcggaaggggggaggattggaacccgggtctcggtagctcgcgggcctggccgggcgccttgtcgccgtttcctgcaccatcctccttcgccttgccctccattccgcctccagcgaggcgtcttcccttccccgcatccctgcccgaaatctggagtcccagcctgcaatctccacctcttcgaggttcccgctgcccaggtctagcaccctcatgggtaacccgctccggagcgtggcgaggaccgccacgggggacgtgagggtagctatggactcgctctgagggaggaggcgggagctgaatctctgggctgccagaacccacagccacatcctacgtgactytgccaccccaaaatattttgaccgcagccttctgcctccttggatctcttccttccccacccccacccccgtagttatttagcagattacgcattaaaacaaatgtctgcaggttttcccaattagtcccgcttccctgtgtctttatcttttaaattgcccactaataccatgaggtttaaggtgtggggtggatgctgcggcatcggaggaccctgctggtggaggaaatggttcacgcccgtccccgttccctttgcaggcttgctattgtgcgtctgtgattgacaagaccacgaggctgagcgcgccctggagatttttctataaatggcttaacaccccagtctagactatttgctcggatataagggagacaattgtttttttgttctttgccggcgaaccctggctctgtagggctgacctggaatttaaccagtcttccytgagccggcggaggaggacaaaaaccgccgcgaccccggcagkgtgggaagtgcagsgcagcgctcccaagacacgcttgttggaggttcgggcctgggtgcttggttgtctgagcctcyttttttgtgtttgcctgggtcctggagaggagcgcacggtatcatggtgagygtcaygtaggttaccccgggtcccgcttacccacctgcatttacttaatggtggtttaattcttctttaaggattgcagtaacggatgctccgcagagtgtaccggagaaggaggatcaaaagaggtggtggggacttttaaggtaagttgcttgccagaggcttagtgtctaaagcaacgttcaactgaataaatccatttcttgttgagattcggggaaattttcactgtgtgggttacccagttcctaggttgtgttgccagacttttaaaattccactcttagaggaaaaaaagccatttagagagtgacagtacattcatcacaacaaaaattatctagcagctaattgctgattttattttgagtcatatatttttcttgaaaaatagtcaatgcgtaaatattaaactagttgtttatcagattccataatacgtacaaaccttcagtctacttgtagaaaaagttaaactgtgatttttctctttcagtagcacataacactctacagtgaaagtgttgcattttcttcttttctatctgaattgcggggtttatatagtaaatagctcatacttcaaacagtgagaaacaaagcacgttgaaaactgtacaaatacaaatgtaagatgtaatattattttttctataagtctatctcctaccctccctcctcrtggaggttttagcttcttctttttatgcctagtgctgctcttctgcctgtttgagtcactgtcaattgtcatcagacaattgacacagagtgtcctaatgatctcacatcctggcggttcagagagggaaggaaacttgactcatcagtttctcacacattgagctctctcacagtgtgctggagactgtgccatgcattggacatccaaaggtgaattcaagattaggtctctacttgcaaggaatttttattttatttttctttttccttctcttgctgtcatcttagcaaggattttttaaaaagcaaaattagaatattgcaatttcttttctgttttttgagacagggtctcgctctgtcacccaggctggagtgcagtggcacgatctcrgctcactgcaatctctgcctcccaggttcaagtgattctcctgcctcagcctcctgagtagctgagattacaggcatgtgccatcacgcccagctaattttgtatttttagtagagatggggttatcaccatgttagccaggctggtctcgaactcctggcctcatgcaatccacctcccaaagtgctgggattgcaggcgtgagccaccaagcctagcctgaagaattctttgcaaagaaaaatatcaactcaaatttaaataatcttttcctttctttttcttttttttgagacagagtcttgttctgttgcccagactgaagtgcagtggcaccatcaattaggtatcactttcagccttgatctctcagactcaagtgatcctcttagcctctcaagtacctgagactatcggcttgcatgccatcaggcccaactaatttcgtcattttttgtagagatgggatctccctgtgttgcccagactgrtctccaactcctgggcttgtgcaaccctcccacctcggcctcccaaaatgctgggtcacaggcataagccacaatgcctggccataaataatcttttttatttgttaatttagatttctgtatattaggttttatttaggggaattgcctgtttacactcatgtatttacacatcaaaacatgagttatggtggatgtattcacagcacatatgtaataaggcatgtgtaaaaatgatattgataatttagggaataaaaatggtagattttatagaccatcttygtttttgatatacttttctctgtctcaaaaaacaaaaacaaaaacaaacaaacaaacaaaatatatatatatagcctacattgttgttaactataatcaccctactctgctatgaacagtagactttatcgcttctatctaactgtatgtttgtactcattaaccaacctctcttcctccacctacacccttcccaccccctgccatcttctgatatctatcattctatgagtactctcttcctccatgagatcaacttttttttttagctctcacgtatgagtgagaacatgcaatatttgtttttctgggtttttttktttttctgtgtttggcttatttcgcttaccataatgacttccagttccatccatgttgctacaaatgacacgattttactcttttttaatggctgagtagtattccattgtgtatatgcaccacattttatttgttcattgatggacacttaggtgattccatgtcttgactattgtgaatagtgctgtaataaacatgggactgcagatatccctttgatatactgatttcctttcctttggaaaatacccagtagtaggattgttggtttatatggtcattctacttttagttttttttttggaaagcttcataccattttccacagtagataaactaatttacattcttaccaacagtgtataagcgttctcttttctctgtatcctcatcagcatctgttattttttgtctttctaataataaccattctaactgtggttgcttttgacatatttctctacctttttgttaatctacatcatttataacatttcatatggccttttgggtctctcttgggtagttttcgtatttcttctcccctccccatttatgatgcagtcatattacatgaggatgcagttttgcagcagggcctagcaatgagatacgttgttacacatcctggcgaatctttctgtggactctaggatcctcttcatttgcaagaggtcagccatctatttcttccaattcctccagcttcacatatctccacagaatgcaacactgcaaatctgcagttctcttcatgatcctctttattagattttaaaagagtatctccaaaagatgaacatagtgcctaaggctttccaaatggagtaagaataatgcacaagaacctagaataaagttattaaatgtctgatacagttgtaatacagacttgatttttgaaaaatgtggccaatgaagagaagagcaaatgtgctatacgatggtgagcaaaaggtgttgacaggcctggcatggtgactcacccctgtaatcccagcactttgggaggctgaggtgggtggatcatttgaggtcaggagtttgagactagcctggccaacatggtgaaaccctgtttgtattaaaaatacaaaaattagccaggtgcgatgacacrtgcctgtaatcccagctacctgggaggctgaggcttgagacttgcttgaaccggggaggcggaggttgcagcgagccgagattgtgccactgcactccagcctgggcaacagagcaaaaaaaaaaaaaaaaaaaaaaaaaagtgttgactgaaccctggctgaaacagttttcaggtgctttcaacaaatttacacttccctgccctgagcctccctatttcagaacaaatgattacccaactgcaaactttgaattaggaagttgtttttaatatgccctgtttttctcaatatttcttgccatttcacaatcagttattgtggcattccaattcttccacaaacatatgatgtgaaacatcctgacttcgatgtcatcagggaatgtggagcattggaaagagacagattaattatgcagaagaaagtatcatttgacaaaatattatttttatttatctttggaaaggaaatctagaaaaagaaaatactttttaaagaacactgataaaaattgtttataaaatttgtttcctttaggaaacaaatcgttcccttaaaactacatttcatatctgccccaaacgagtcacatgtcttcagctaatattgcttgtttacgtttgaactttattcaattctatcacctagtaatttagtattcttaggtaatttctctttgagctcaggttaaaagttgttatttttagttttcagagttgcagaatttttttttcaagtagagaaaagttcatgatgagattctgaagccacctaatcgtatattactttgaaaaactggatatatgccgggcgcggtagctcacacctgtaatcccagcactttcagaggccgaggtgggtgggtcacctgaggtcaggagttcgagaccagcctggtcaacatggtgaaaccccatctctaccaaaaatacaaaacttagccgggtgttgtggcacatgcctgtagtcccagctactcaggaggctgaagcaggagaatcacttgaacctgggaggcggaggttgcagtgagcccagatcacatcactgctcttccgcctgggtgacagagtgagactccatctaaaagaaaaagcaaaacaaaacaaaactggatacagggcagtgcttaggtacaaatcagaaagttagaggttgctattcatatcattaagaaataatgtgtcttacgaaagaatgtagcagtttactgaaatagaagtcatacctagaaatgtaataatttatctttaattgtcagaaatttaactgatattatgaagttctaattataagaacacttatttgaggttaaaaattaccttattctatccctgctttgccgctaatttgatctctctggattagtgggttattgtgggtcctatgggtattttaaggagaggtctcagaaaactaaaaattatatatactggatcataatcattcttgtcacccactctcatctttctgtttttgttttgtgttttactacccttccccttttactaagtagtcttagtagaagaaaatttgcattaagtttgtcgtactgtattgatatggctccaaatgtttcttagcccagggtcctccccattcactgataaaagctaactaaggtaaatcacaggtgtttattgtgcaagaatactgtgaaactattcatgtaataaaaagtttgtgttagaatttcactctctttaaatcctggacatcttctgtgagtgtatctgaaagcagccagacatcttcagtatttaagaaaccctttactattctgtgtgctaggcactgtgttagctttggaattcaactgtgaatactctagccagacttcttgtctaaatagtccagaataggggttgctaaactttctttctttttttttgagatggagttccactcttattgcccaggctggagtgcactggtgtgtctctgctgactgcaacctctgcctcccaggttcaagcagttctcctgcctcagcctcccaagtagctgggattacaggcgcccaccactacactcagttaatttttgtatttttagtagagacagggttgtgctgtttgccaggttgatctcaaactcctgacctttggtgatccacccgcctcggcctcccaaagtgttgggattcagggtgtgccactgtgcccggcctgctaaactttcttaaatggctagatgataaatattttaggcttgagggccatcaggtttctgttacaactagttggctgtgctgccactgaagatacaagaatggcgtgactatgttccaataacattttaatttcaaaacaggccagctggctgcatttggtctgcaagtaaagtctgcctgaccccctacctagtccagaggacaacgggagagaaaagggattcaaagataaaaataatttagctggaatatatttctttaaataaacttattatacttagtaaaaagtcttaaattaacgtttttacttgaattaaatagtggtaaaacaggctgggcacagtggctcatgcctgtaatcttagaactttgggaggtcgaggcaggcagattgcttaagcccaggagttcgagaccagcctgggcaacatagtgagtccctatctctaaaaaaaatacaaaataataataataatggtagaacaaagtcaattttttattgaaacttggcattttattggcatattacaaagtagcattactagactagcctgaacattacagtaatattctgtccttaatgccttttgtgtcactgtaatatgagctttctgtttgttttggaatatgttttcagcctgaatattattctaaaaatacaatttactatcattcataatatatcaaatgactcacgtagctgcaaggcagtgaattaaacagaattagatcattttaaaaataatgataagagctgatgatgtaaagtgaaggtctgtatttaatttgggagggaaaagactttttttgtatattcaaagagatggagtttgacatcccttcacaacctgttacaggttgaacttgcccctgtttttttaactgatcaaaaagttccttctcttgtgtttctttttttcttctcttttctcttcttttcttttcttttttttttttctgagacagagtcttgctctgtctcccaggctggagtgcagtggtgcgatcttgactctctgcaacctccgcctcccgggttcaagtgattttcctgcctcagcctcctgagtagctgcgactacaggtgcatgccaccacgcctggctaatttttagtatttttagtagagacggggtttcaccatgttagctaggatggtctcaatctccaaaycttgtgatctgcatgcctcggcttcccaaagtgctggtctcctgtgtttttgtcagcattccacagatgctataaagttagtggtggtatcgcatgcaatttgtacgcttaatgtttggccatttgcagtgggcaaactggctatgtcgggagctggtgagatgctgcttgtggggagttgtttcctaktactctgatttatctttgtttaaataagagttcctttgttcactgtttcctccacacagaacagaggatttatatcttagtgttcattctcaactttcctgttttcaaagaggaaaacatttgcttcactttgctcatttcttctccagtgcacccagaggattttgaaggcttatgccaacaattctttggggcagttggagtgtaaccattgctaaatagcagttcagtacttaatgacattcattttagtttaacaaatcattgtgagtgttgccattttttattagggaaaacatctctttcatctttcccaaatactcaacatgagtcctatggtgagagtgaaaaagggttgtattctttttttgcatcatcttaccccatctgctattttgtccctcttctatatatcactgaaatttggttctgatattctattaggcagtgtacattgcagagattatgaataactggccgaattctgaatgcaggcatgatttgttcagctcagagtgttaaatttctgtgttagctgctaacctttaaaagtcaattgatttcctttttttttttcccctctgtataatctagccagcgaatgctcagtagcttttctgtaaatagtgatgatttttcttccccaggctaaagacctaatagtcacaccagctaccattttaaaggaaaaaccagaccccaataatctggtttttggaactgtgttcacggatcatatgctgacggtggagtggtcctcagagtttggatgggagaaacctcatatcaagcctcttcagaacctgtcattgcaccctggctcatcagctttgcactatgcagtggaagtaagtacatgggaattaaagagagtgacatgcttgcacttcactgtgggtactaagtagcttctcctgctaaaatagctcttgggcagtatgggctttatcatatttaccagaggaagccgaaaatgtctttaaaarttttcctrtagacagttggattgaagataaatcttagcagctaatttttcagataatcttgcattttctgtgacgtcaataaaaaaattatttaaagcaaatagaaaggacagctggtgggaaaattggcaattaaaaagccagcactgttgataatttaataagtcacctttcttcttagatcttctaataattgagaaagggtcattgagaacaatattatgatttgattttaatgctaactccacatttttatgaccagtaataatgtctagttatgcatgttaagggacatgtaattaaatgtcctccttcagccatgagttgaaataattttaagcataaaatgtttaaagaattctttctctggtccttttcagggtgcacaattaaccagatgcacagtatacttcccattgtcttgattctcattgtattttacttttgaatgatttggacatctttcccagaataataggggtgctggaaataataatagtcttcctattaagtgctaaaatatggtaatagtaaaatattaatagattaatgataaaataacaacttttgtttactgaattcctgcaatacgttctgtattatgttccatatatgaatcatctcatttaattaccttaagtgagaaggcatgtgattaagcattcaggctttgaagtcagacatcctgggctcaaattcggtctcatttgctccataggaacctttatgacttgaggaatttaatcatttgtgctttaatttctttatctataaaattggggtagttataatatctatcttacagtgatctcataagtataaaataaagtaatttatctaagcatatagagtcatatctggtgcatagcgagagcccagttgttagcaataataattaactcttgaagcagtggtctcatccattataaaaggaggctcagaagagttgtttcttgactaatattacacagcagtaagggtggagctaaggttccaatgagaagcttctttctgttatatagcccctacatgtatacaccaaaattactaggatgcttttgcaattaactccttcaaaattataaattcatataattttggaaagatattcactgtccatatgtatccacaaaatgttgaatttaggaatctaagtttctgttcccagctcttcctgttatgtcaatttgaatgagttctttcattatttgccacaagccctcaccatgtcataaggtataataaagaacaggtgaaatgaagtgcttttatttatttatttttcagacagattcttgctctgtcacccaggctggagtgcagtggcacgatcgtggctcactgcagcctcaaactcctgggctcaagcaaacctcgtacctcagcctcctgagtagctgggaccacagacacatgtcaccatgtctggctaatttttacatattttgttgagactgggttttgccatgttgcccaggctggtctcaaactcctgggctcaagcaatcctcttgccttggcttcttcaagtgctgggatgacagccatgagccactgctcctggctatgtgcttttaaatttgaaaggaataatatgcccaagcccaggtcactggttctcaaacttaatgtgcatcagaatcagctggctacatctccagagtttctcatttctaacaagtgtccagatcatgttaattttgtcgctccagggaccacattttgggaattgctggcctatgggaagtaaatgagaaatgatttaatgtcatttttggaagttaaaaaagattttggtggtcactggtttttgaaaactctttgaaggctgggtggggtggttcacatctgtaatttcagcagtttcggggagatggggttcttgggaaatgagccctccacccatgggatctgatgctatttccacgtagataatgtcagagtcgttcaaaccagagtgactccatcctgaataggggctgggtaaaataaggctgagacctactgggctgcaacatgatgasaccctgactctattgaaacaaaacaaaacaaaacaaaacaaaacaaaacaaaaaacggccaggcgaggtggctcacgcctgtaataccagcactttgggaggccaaggcgggcggatcacgaggtcaggagatcgagaccatcctggctaacayggtgaaaccccatctctactaaaaatagaaaaaaaaaaaaaattagccgggcgtggtggcaggcgcctgtagtccaagctacttaggaggctgaggcaggaaaatgacgtgaacccaggaggcggagtttgcagtgagccgagatcacgccgctgcactccacactgggtgacagagcaagactccatctcaaaaaaaaaaaacaaaaacctctttggccatctatttagatgagttggaatgctactttgattggttttgccaatttagatttttgtaattagggtagtttaaaaaaactctcaaattactgttatcctttgttaaaaaccaaaatcttttattattagtcttctgcttacaatataagtaaaataaatgttttgtattaataactggattgtatattgcatggttaccactatgtaacaaaattaatagcttaaaattacaagcgtcattttaaaattatttttcatgtttctggggttgactaggatggctaagtggtttttgcttggggtccgtcacacggttgctgtcagtggctggggttagagtcagctcacaggcttcctaactcrtatggtgctggagggagtgtctcttagcatgctaatgcttcataatttgtgtataatgaacagtgaggatgaccagaggtcactttcattgccatctgggctgcaaaactcaaggagttgaaggctcttccggcattacttgttctccatgtggtctcctcaggatggcagtcacagagtaggcagccttcttatgtgctgacctagggcccaaaatctgtatgtgtcagttgactgagcccagatggaagctctattgctgtttacgccctagcctcaaaactactctttcaagaaaaattctccaaccgagtttttcctctactctcacaccaccacaacaatagtcaacataggagacttctatgatcaaaggtgtagggatttctccccaccaccaagcagtgaaccccagctgggtgtcctccaattcaattctcacactgttattacgggaaaggtgtcccaatccagwccccaagaggttcttggatgttgcacaagaaagaatttggggagagtccacaaagtaaaataaaatttattaagaaagtaaaggaaaaaaagaatggctactccgtagacagaggagctccgagggctgctggttggctattttaatggttatttcttgatcatttgctaaagaaggggtagattattcataaattttccagaaaagggatgggcaattcctggaactgagggttcctcccctttttagaccttgtaggttaacttcccaccattgccatggcctctgtaaattgtcgtgacactggtaggagtgtctgttagcatgctaatgcattataattagcttataatgagcagcgaggacggccagacatccctttcattgccatatgggatttggcaggttttggctggcttctttaccacatcttgttttatcagtggggtctttgtaacctgtatgttgtgccgacctcctatctcatcctgtgacctagaatactaacctcctgagaatgcagcccagtaggtttcagccttattttacccagcccctaatcaggatggagtcgctctggtccaaacacctctgacattatccacctggaaatagtgtcagatcccatgggttaagggctcattccccaagaccctaaccaccctcacctggcccagacacaagtcacaagtcctgtcctctggaatgtctgactgagaggcatcaagttggagttcccatgaccccctcttctggtttgattaatttactggagcagctcacaaaactcagggaaacacttaggtttagtggtttattataaaggatactgcaaagtgtatagatgaagcgatgtgtagggtgaggtatcgggggatrgagtgcagggcttccatgccctcccggggtgtgccaccctttaggaaccttcatgtgttctgctatccggaagctcactgaactcattcttttgggtttttatggaagcttcacgtcaatattccttcccctggggtatgaggcaggaccttcaccggagagggtcttttattttatttcattatttttaaaatataagatggggtcttgctatgtagcctagggtggtattgaattcctgggcccaagtaagcctcccgcctctgcctccgaaagtgctgggactacaggcatgagccacccagcccctttggagaggatcttaagactcacagttagaaaggagggcaggagaaggtcagagagattctgcttcctgcccctgaggcctaacacacccagcattataacaaaagactgtaacaagggctatgggagttaccagccaggaactgtaaatcacacagtattatttctgccttactcttatcagtcttgatggttacaaaggcctgtccaagttcaaaaggaggaaaaaagcactccacttcttgatgaggaaggtcagggttctggaagagcatgggggactggaaatattgttcggccatttcatggaaaatacagtctgtaatagacatcagtgataaatggggagatatggtggatgtattgttttcctctgagtgccaaattgggttctaagatttcacaggccagatattattgaagtggctacgttgtctggggtatataccttggggttcgtcattttgtgccaggaaaatttaggacaaggactcacacgaggagtttaggagtggaggtttaataggcagaagagaaacagaaacagttctttctgtagggagagagggatcttcgagggaaaagaccatccagcagcagatgagctggattttatagtcaggtttgaggaggaagtgtctgatttacttagggctaacaggttggtttgatcaggtatgacgtttacatagcacaccgggaagtctggttgccccaccctaatccttttatgcaaatggactttcctagttgattggagctatcttgtctgctccttactgtacaggtggctgacaaagagaagggaagatggagccgccatcttgaacatgattgacgcagctgtggatatctatgtctgcagcttgattttacaggctgctcttctttagaaaggggctgcttttcattaaaacaaaaaccttactgaggactcttgtaccctcactatctgcaggtgatttcttaactcctgtatcattattatagtgtcataggaatctaggaagtgtgattgccttctggagagaacttcagggtccctggattttctcactaatcatattcatttcattccctgtttacctgtttaataaatgttgagtggctactatgtgcccagggctgtgcaaggtgcctggaataggatggcaagcaaaccaaccatgaccttgctctcaaagaattgttttctttctttcttttttttctgagacaaggtcttgctctgtcgcccaggctggagtgcagtggcctgatctcagctcactgcaacttccacctcctggcttcaacagattctcctccctcagcctcccaggtagctgggattataggtgcccaccaccatgcccggctaatttttgtatttttagtagagacagggtttcatcatgttggccaggctagtctcaaactcctgacctcaagtgatccgcctgcctcagtgccgagattacaggcatgagccactgcacctggcctgttttctgtcttttttttttaacccccacatggaaagttaggcagggatttaatttcaaagagtttcttcccaaatattgtggtgaaacatctagtccatttatgtttcaggctttttcatagatattactgtttctcttagactgacagacttaggacatcacatgattgaatgtcaacctgacttttaagttcaataatagtttcattttttaaatgcaaaattaaataggagtaatatccttgaacatgtttctccttcactcatcggacctattgagtctagaatccattttattttgagagctccaactacatgtggtttctgttaatatctgaaagtaatttttaatatctgaaagtttcaaatagtgataatatttgaaggtttcaaatagtggaggagagacgcaaactgcgagtagggaacgcggattgaaggaaatgaaaagttgataataggcacttcattttcagattataacaaatatttagtgaaataaagcataattttaaaaaatggataagacatgtatgtactatttaatgtgtactaataaatgaatgctcatatttgccatccagataaagaaatagaacagttgaacatcacagaagccctcgcgtgtcccattcagatcacaaactctatctttctactggtaaccattattcttacttttgtgataacctttctttgctttcctttatggagtgtgtagattcttaacactatagttttgcctctttttgaacttcatgtaaatgaaaaaatgtatatattttgtgtttgtgtgcatgtgtgtgtgtgtgcttgcacacgtgtgaataccccttattgtttgagcttagtattatgtaagatctaaccaggaaggaccaacctaacatttgtggggcctgggacctaagtatagacagagatgacatggtccactccatatctgttcccatcccagttctgccctgtgctacaaggggtcttccagacactgcataggtacccataccacctgcaggcagatgacctttgcctgtcctttggagttaggcctgggtaccctactagtggtgtctgctcttgggatgataaacccgaggggcttatcagctttatatatatatatatatatatatatatatattttttttwttttttttttttttttttttagctagcatctctctcgttcttccaggctggagagcagtggtgtgatcttggctcactgtaatctccacctcctgggttcaagcgattctcctgcctcagcctcccaagtagctgagattacaggcacgtgccactatgcctggctaatttttgtatttttagtagagactgggtttcaccatgttggcatgtgagccactatgcccggcctcttttttttttttttttaagagacagggtcttactatgttgcccaggctggtgttgaactcctggcctcaatagatcctctgtccttggtctcccaaagtgctggctcagtcattatgttctttactgccatccattgcagtataaaaagaataacagttttccctcagaatattcttggtgaaacagtaacaattattaattttattaaatcttggctcttgagcaaatgtcattttaatattctgtgtgataaaatagcaatgtcacataaagtgcttttacatacttaagtactatggttgtctgaagaaaaaggagttgtgtgattgtcttgagtttgtaagtggaactacttttttcatcgagcaccgtttttacttgaaataacaaagtatgaatatgaatgcagatttggccatttggcagatttttatttatttatttgagacaaggtcttgctgtgtcacccagactggggtgcagctcactgcagcctttacctcctgggctcaagtgatcctcctgcctcagcctccttagttgctgggaccacaggtgtgcagcaccatgctcagctaatttttaaattttttgtggagacaaggtctgaccatgttgcccaggctggtctcgaactcctgggctccagcaatcctctcgcttcagcttctcaaagtgctggaattacaggcgtgagccacggttcccagctcgccttttcatatgtttattgggttgctaaatatgttcttatttgaagtgcccacttgttcaagttttttgttcacttttttattgctgtctttataattttttgatgacaagaaatatgtttaaattaaaggcagttttgtcaatctgccttatgtttggaatttgttgtgtctttaaagactcttttcctgcccttatattataaagatatcttatagtattgatattgtcattcacagttaggtctttaatcctagaagttgatttttgtatgaagtaagggcccaatttatttttttccacctatgtatacccagttttcccagcaccatttaaacgggcggtactttcccctctgatatgtcatgatgacacctttgtcatgtacacatgagtttgcttctggatctctatttgtgttcagttgttttacttgtctgcataaatgccacagtcttggtttctcagtcattataatgagccttgcctgctaggaagggtccttctactttgttctccaagagtgccttggatattcttggtcattttctttccatataatttttagatttggtttatcaagtcgataaacttttgtcatgcagttttttaaaagaaaataaagtgccctaatgtgattttttttaatttggattacattgaatacataaatcagtttggggaaaatcaacatctttataatattgaggctttttatccatgagcatgaaattgctttctacattaataacttggtaaagttttatattttccttatggatctttcacttcttttgttagatttttctccacctaagtactgtatcttttaattctactgtaaatagtgtttttattttttaactgctgctattacataggaatataattttgcatctggccagcttgcctaaacagatgatttcaaaatattatctgtcagattttctgtgttctctatctctgtaatcatatcatctatgttttatgatctatgacagttatattttttcatctccaagctgatattttaaatttcattattcttgctttatactggttgtacatattcagttagagtgatkrcagtaggcaatttgcgatgttcccaatttgataaggaaagcttttacattttaccattaagtataacgtttgcgagcttattatagctatcctttgtcacttagggaagttatctttgttttttagttatctaggaaactaaaaaatcagaaaagttagtttgattttatcagatacatctgctacatctaatgagatgatcatatagtttttttcctcccataaactgtgaatataatgaatcacattaattgatttttttaaatgttaaaccaatctccatttctgggataaattcaacttagtcatgttgtattagccttttgtatatcttatatctataatactgaatgagattatcatactctttacatgtatttgaagccatgtcattaagtgcatacaatttttattaaatttttaattgacaaataattgtatttatttatggggtacgatgtagtgttttgatatatgtttacattgtagagtgactaaatcaagctaattagcrtactcatcactgmayatatttatcatttcttgtggtgagaacatttgraatttaatcwcttagcaattttgaaatatatgatacattattattaactacagtcaccatgctgtgcgataggtctcaaaaacttattcctcctaattgaaattttgttccctttgaccaacatcttccaattccccaacccctagcctcctctggtaaccaccattctactctctacttccattagtttgactttttcagtccacatatgagtgaaatcgtgcagtatttgtctttctgtacttgtcttgtttcacttagcataatgtccaacrggttccccatgtcattgtaaatgayggaattttcttttttatagctaaataacattccatcatgtatacataccacattttctttatcgattcatctgttgatggacagttaggttgcttctgtatcctggctattgtgaataatgctacaataaacatgagagcacagatacctcatgctgatttcaattcctttggataagggtccccaaaccccaggctatggaacagcagtggtatgtgtggcctgttaggtactggatcgcactgtaggaggtgagcagctgcgagtgagcattaccacctgagctccatctcatctcagatcagtggcagcattaggttctcataggagtgtgaaccctattgtgaactgtgcattgcaggaatctaggtggtgcactttttatgagaatctaatgcttgatgatctgaggtagaatgattgcactctgcaagactccccacgctcatccctgtggaaaaattatcttccacaaaactggtccctggtgccaaaaaggttggggactgctgcttttggatatatacccagaagtgggattgctgaagcatatggtagtttwattttaattttaatttaatttagtttaattaatttatttttagcacctaggctggaatgcagcagtgcaatcatagctcactgcagcttccaattcctgacctcaagccatcctcccaactcagcctcccaaatttctggaactacaggaatgagccatctcactcagccctatttttagtgttgggaagaatctcaaaaagtaatgactgtactaatttacaccrctaccctcagtatacaagggttccatatcctcactaatacttatcttttatctttttgatagtagccattctaagtatgtatagttttaaaattatgaagtttaaattgaaccttaggaagttgctactctgtcaccaggctggagtgcagcagcgtgatcttggttcaccacaatctccgcctcctgggtttaagcaattctcctggctcagcctcccaagtagctgggactacaggcacatgctaccatgcctggctcatttttatatttttggtagagatgggtttcaccatgttgtccaggctggtctcgaactcctgacctcaagtgatccaacagccttggcctcccaacgtgttgggattacagacgtgagccatcacacccagccttgaagttgccttttttatcttcagtagtgcttcttggcttaaattcttttgttttataaatagtaatggaagcttgccagttttattttagaaagtatttgcaggccaggtgcagtggctcatgcctgtaatcccagcactttgggaggccgaggcaggcacatcacttgagcccaggagttcgagaccagcctaggcaacatggcaaaacctcgtctctacaaaaaatacaaaaaattaacttgggcgtggtggtgcgcgcctgtagtcccagctactctggaggctgaggtgggaggattgcttgaacccagggggtagaggttgcagtgagccaagatcttgccactgaacttcattcagcctgggtgacagagaaaaacaactctgtctcaaaaaaaaaaaataaataataaaaaataaagtatttgcatgatatatctttttctgtctttttgattcagatattgtcagctgagtccaatctaacaaacttatattttaaccgaagctttagtactgttatatttaataaactaataatatatttgcacttaaatacaacatctaattttatgctttttaattatacatgatttgtatttctttttttcccatgtaagtttttagggtatacatctttaaaggccttacttttcattatcgttcagtttaacttattttctaatttccatttttcttctgtgacctatggtttagttagtggtggatttattttccaaaatatggatggtgtccagtcaaacttttggtattgatttctggcttatcttgtgtttggaaaatatgtgaattctacagctggtctgtgtaagagttctctgtatcagttagggaagtttgttcttcctgttgttcatatcttgcatatctttactaaggtttagcctgtttgttctataaattacttagagaagctgtgttaaattttcycactaaaattattgatttttgtctttctctgtatttatcagtatgtatctactgaagtcttttcaaatccctgatcagtggtttgttcrggacagcactttgattgagggaggtgacgtggcttaacatagtatggtcttgagctgcctsgtttctgtgatttagggactgaaccagctctggtcacatctggattatctactatccagcattcaaatgaaccagattacatgaaaggatatgggggtactctttgggggccacggtgccacaaggcctttggtttcgatctccattgcctagggaattaacctgtgctgtgtgattctagatgttttcttcctgctcccttaaataacacctaaatgtgttattcagcagtgtggctcctgctaagcagaggagaactcggaattcctaccaaattctgataataaaataactttcctccacctcaaccattgtttttaccagtcctgtcaactgttagctttcctggatttaatgatctcaagttgaggtcaatgtcaacagctttatgggatgaataagatgaacgcccataggaaagtcagtctcttgaacacgggttgttttcttttggttaccctctaagattttttctctttgatctccagttatttgaaggattgaaggcatttcgaggagtagataataaaattcgactgtttcagccaaacctcaacatggatagaatgtatcgctctgctgtgagggcaactctgccggtatgtaagtgtaggagtttcttttgtgtttcttttaatgtaacgggtcacggtgttgaccaccaaataaataatttctgaatagttagataaatattcagtacaaaccatatgaacattaacattatttctgatctactttagttaggtaaaaatacaagaaaatggccgggcacggtggttcactcctataatcccagcactctgggagactgaggtgggtggatcacttgaaaccaggaattggagacaagcctggccaacatggtgaaacaccatctctgcaaaaaatacaaaaattagccgggtttggtggcacatgcctgtggtcccatcggtgtggctgaggcatgagaattgcttgaacctggcaggtggaggctgcagtgagccaagataatcacatcactgccctccagcctaagccgcaaagtgagactctgtaaaaaaaaaaaaacaaaaaacaaaaaacccaagaaaataatatcatttggcaattccacaattttttaaaatcagtgtctgtgggggattcatatgcaagtgagagatgaaagagtaaggaagaaaaatgtatctcaacctaaaataatatttgaagaccacatgaaattaatattgaaaatggaaaatatggtgtgcagcacaggtattttgcggatattttgcctaattgctttagatgctagcaagatatagtaacttaattattttgatattttatcttaagtaatgttttgagataaaaagatatcaaaatggtttctcatggccattgaatcgtggctgtcacaatgtttcttatggagcagaaatcattgtaagatgggttagattttttttttgagagagagtctcactctgtcacccaagctatagtgcagtggcacaatcttggctcactacaacctccacctccggggttcaagtgattcttgtgcctcagcctccttagtatctgggattacaagtgcacgcagccatgcccagcttaatttttttaaaaattatttttagtggagacatgatttcaccatgttagccaggctggacttgaacttctggcctcaagtgatctgcctgcctcagcctcccaaagttctgggattacaggcatgagccaccgtgcccagcttcagggatttagcccaacctatgcattcaggaagcctgaggacggctaaatccaagtgttcttcattcctctgcctatttttgtaacccgcatttcacccatctcctttggaggccataatatagtagcagaggggaaattaaggtaaattctttggactagggcatagtttcgctcttcttctcattacagctagatcactggggaaaagtctttaaaatggggctggaaggaaagggaagtaatatttgttagacatcaattttgctaccaaactgtgttatgtagtttcacattccttatctgtgtaatcacagcagtaaggcgttgctaagaagattatttgttgtacagtttattagtgcctttgtacagagaagaaaacttgagtccagagagattaaatgacttgtctgaagtcacaaagagcaaaaggacagggcaagaaattagatccaggtgtttttattcctggtcaagttctcttctcactgaattctgtctctagacagcaataccaggggctgaggcaggtgctacagggttcacctatatgattggcagtcccaatttctataacattactacattattattgctgttacaggtcaatatttaaatagacaaattctgacttcatgagctttactcagatgcttatgactgactcatttctaccttaggtgacccatcacatctctgaaagtatgtttctctactttgcaagtgagcagagactaaattattttatgaagtatcacccatctagtagatgtaatttttttttctttagaaataaagtgctctttgcttttgcccattttcctattgggttatctatctcttcattgactttggggatatccaaatatatataccagttaaaattctttgttgatcatgctaccaataacttcacccagtttgttgctttacatcttttgaagaacggaagtctttaagtttcaaatagtcacattttatccatttttttccttcatgatttgtgttttacatctcctacttaagaatcctttcctaccttaaggtcacagagatattttgtactttttaaataaagtcttagtattttgtcacatttaagtatatcatctaattagaattgattggggggtatggtaagatgtagggatctaatcttatctttcacatgtggatagctcgtcatcccatcacaatttttggggggaaaatcagaaaaaattgtttggttttattattactttaaaattttttttattggtaccataaattatacatatttatgaggtacactgatgttttcatgcatkcatataatgtgtaatgattaggacaaataagaaagaaataaataaaaattaggataattaggatatccatcacctcaaacatttcttatttttttgtgttgggattattaattttttaacagtttaaatgcttcagtgaggatcatttattattgccacattgtgagaaaattctgtcatttattatgtttttcattctttcaggtatttgacaaagaagagctcttagagtgtattcaacagcttgtgaaattggatcaagaatgggtcccatattcaacatctgctagtctgtatattcgtcctacattcattggaactgaggtgcaaactgactcyttattytggggtactttgctgggcaagttattattgtttattgttgtttgaaacttctagcatatagtttgcagtagccccccagtagcatcattaatgacttcttccttctgattgtcaagattagaggtagcaaacattttctgtgaagcgccaatcagtaaatattttttggctttgtggccatatagtttctaataagaaattagatccctacctcttaccataccccaaaatcaattataattcgattatatacttaaatgtgacaaaatactaagacgtttattaagaaatacaaaatatctctgtgaccttaggtaggaaatgattttttttttttgaggtctctctctggttttttttttttgcccacgttgtcgcttaggctggggtgcagtgatgcaatcacggctgactgcagctttgacctcctgggctcaagtgatcctcctgcctcagcttcccaagtagctagtactacaggcatgtgctaccatgcctagctaatttttaaattttttgtagagatgatgtctcactctgttgtcctggctggtctcaaactcctggcctctagcaatcctcccaccttggcctcccaaagtcctgggattacaggcatgagccacttcacctgaccggagaggattcttaaactctgccattttagtactaaagcagccayagacagcacataaatgagtaaatgcagtgctgtttgccttgcccaattaagactagtcattattttctaagtttacaagtgcagtgcctcccattgtggcagtacttctctgaggtagaaatggttttaaaatttaggggagggagagctgctaattttcattttcatgaggtcttgggattacttggcatggagtgagaatggaggttccccttcccacatagaaaaatggtgaaaataaagttcacagtgggagttaaggaaggaaattgaagagctgggatggtaggtttaaataacatgaccttatgatttcctggtgggtcacagtctcttggttgggtgcccttgtgaataaaggcatggattgggcatgcctggaggggccaaggccttttgagcggacgagtatgtttatatgaagaccctgtcacctgtctctggtatctgctaggcagctgtggcttgagagtgtgatattgagggataattgatggaaggagattgaatgtggctggcaggtaaagagatagggaacatatggagatatttagaataagagagtgtgagatagagcgcttttgctatagcctagccattctgttctctactaagtgttgcggggttaccrggttttctactaggctgtatgaatgcaaaaggtagagagatatatagggccatggaataaataccgaagtgttttctttggtatccttgatacctttcgaaagccgtgtaaggatctagataatgaatttcgtgaattgcagtctctctgacaagttttaaagaataggaacaattttaaaaagtcatctacttccataagttttttgacattttaagataattgaatttttttttttcagcttttaagttccagggtacatgtgcaggtaggtgtgttatataggtaaatgtaagccatggtggtttgctgtacaaatcaacccatcacctaggtattaagcccagcatccattagctattcttcctgatgctcttcctcctcccgccccttccgacagaccctagtatgtgctgctccctgcatgtgcccatgtgttctcattgttcagctcccacttataagagaacatgcagtgtttggttttcttttaatattatttttaactttatgataggaaggagtactttttaaagttggttgaaacattgttactgatctcaaagcactaccttccagttattctgagatactttttcagtctaagatctgatactcctattcctggtttgttgagagkttttgtcatgaatggatgttggattttgtcaattgctttttttgaatctcttgacatgattatgtggttttgtactttattacattattaatgaatgaattatatcaatttatttttggatgttaaatcaaccttattttcctaagctaaatcctacttggtcattgtgaataatccatttttttatcttgctatattcagtttgctaatattttaagaatttttgtttcactgttcatgaaatatattgatctagttttcatttttcttttctttcttttttttttttttttttacatctccctcctcttcctcttgatctagttttctaatacagctgcactccaacttacgatggtcctacttaggagtttttgactgtatgatgtttgaaaacaatatgagtttagtagaaacttactttgagtacacataccattctgtttttttgcttttagtacagtattcaataaattatgtgagataaccaatactttattataaaataatacacttttagatgattctgccctaccataggctaatgtaattgttctgagcacatttaagataggataagctaagatacgatggatgtttggtaggttaggtatattaaatgcattttcaccttaaggatattttcaacttaggatgagtttattgagttgtaaccccatcacaagttgaggaacatctatgtatctaattccatgattcagtaaattctttagactgccaaaatcctgtaatctagagttagacaagatcttaaatcaggttttgtggtccatcttgtagtcatgatcattctcactattagggaattcttaactttttgcatttgaatcaccgaggtgttatttaaaatacacatatggaatccaagctccagagactctgagtagatctggtgagtgattgtgatgcctgcccacattcaagaaccttagtacaaaagccctgctgaatggttctctttcactatacactctatcaacttatgtacttgatcacactttggacctcaaaatcaataatttttaaaaatctacttcctaagttgtgaggtacgaattgaaggaaataatgaatactatttggggagtcaacattatttattaacgaataccatttggggagccgacattatttatatttggttggtatatttgtatcaactatcattttctaattaatggtrtaggcagaataaaccatcacttgtgattcagaaaggaacatgatacaaataacatccaataatgtatatggatttaaatagatctgccccctacagatgttacgcaattcatgttggtaatgatcattcattaggttttcgtggtggctacatttgatatgtgaagtactggctggaagactggtgccagtagcttcaggtttgctgggattctttcatcagagatgactagctttacttatctttttatgttgcatgtttctatgatgggcctatcctgtcattgtcttcatagtataattgcaagctcaactctgtcagttatgtgatttttttttttttttttggtcctgtcttgcttttggctgacttctatatgtttttatttcatgtccttttcatagttagattaactgggtcttatgtccaagagatattttgatttctttgaatgaataaatctatgttaggctactgtattaggttttatagacacctagttgatcacttgtgtccagtctctattccctggtatggtagttgctgtgtttatagaacattgaggattctacaatggacacattggtgttgggccccagcccagacccaaatcgaaatttctagagccaggatcagagactctgcattcaacaaastctccagagatttcataaccacttttaaaggactcaccatcccaaaccttgttaaggaatgaaatatatgtctgccagtaatttcagtgctttaagtcattgaaagctgaacttttaatggcaccaaagtggaaatatttatataattgaaagctaaacttcatcctaatggcagtgttgagttcacttccataggccctgatataacagtctaatattattgtttttcacataaaataagattcagtcactgccatataattagggagtggctctgctattggatggacttaaaatatttcattatgtttgccaagctctgtctctttacatgttttataattaactgatccttcatttttattttgttttattttatttttgagatagagtctcgcttggttgcccaggctggagtgcaatggtgcaatcttggctcattgcaacctctgcttcccaggttcaagtgattctcctgcctcagcctcctgattagcggggactacaggtgcgtgccaccatgcccagctaatttttgtacttttagtagagacggggtttcaccatgttggccaggctggtcccaaactcctgacctcaggtgttctgcccacctcggcctcccaaagtgctggattacaggcatgagccaccatgcccggcctccttcatttttaataatcttcatagatacatacttgttgtactaatgtttttgtgcagttcctcatgataaataattaaatcaattactaaaatccttatagatttatgatgataataaatggaagtgtgtattattgaaacatgtttaattaactgttcatatataaccagtgagtagggattggcaattaaaaataccaggctaccagtgcatggaaatttgaagaaaacaacaacctgaaattcagaatactccaaaatctgaaactttttgagcactgacatgactaaaaatgctcattggagcatttcagatttcattttttcagattagggatgctgaattggtaagcataatgcagattaatccaaaatctgaaaaaaatcctaaatcaaaaacagttttggtcagaagctttgtggataagggatagtccaagctttttggactgaagctttttggataaggtatagcctataatacataaatacataatacaggataatcactgacctgaatgtatagcatcagtatggtacacaaatatttaaatccatgtactttgttggatattatgttatataaacttcttgtaaaaagtttagagagtaaaatcattcacattaccaaaagatttctcatatttataaaaaggattatagcagcattttaatcagtatctcctaaagtatttatttatgggttgttaaatctaaaagagaaactacagtctggagggctctaaactactgctgattacatatcagttgggaattaagagaaaatctcagatcataatatttaaataaaaacatttacatgaatgatttctaagttttcactttactagacaagaaactaaaattatatgactgtcatgttcaatattggatacttaacaacactacatccaaggaagccaggttttgctgattttaacctcgtcctgttgagtaactccatgcaggtacagtggtacraacacatgtggacacacagacccagacctttatttcctcggggattctggtaagtgtagaggtgtcttgaccatagtcaatagcagaaatatgcacaaccacaagctctgaaattccatttgattgttgctcttagccttccactttttaggcatatgtcagtcccatttcatcccacccactctctccatttgggaggtggtagagtgagacaatactgaactataccagggctgagaataagtgtctttgaaaagggtcgaatctgtgatgctagagacagccctggaaactgtcaggagttagcccaaccaggactgtgaccagatcccaggctgtccaccacagatttgcaggctacctgcagatgtgactttttcaaatgtactcaaagacaagctgactttggctaatgcagaaattaattaattcctctttttcagtaaactttatcctcctacacttagattgtctgtaagtacatctctggagttgagctcaactagaaagaagctgtctgcatttagttaataccagcattggatgcacacaatataatttgaataatgtagagcaacattttaatcatctctcataagcagtttccccatttgcaacttcctgggaaatcttacattatgaaatgttcattagaactcccaytttaaaaccctgctgccattttgtgagtgggcagaagaaaggctggagatgagatttgtctgtctcaaatgattcactccttcatttctggttcactccacagggagcttaaggacatgtgcgtttcatagacatgcctttcttttccttttatcaccttgtwaaatcttaagattgaacatacaattcagcctgtaatcatatcaattcccatgaaaaatattttccttattcactgcctctatttgtgcttatacatctgatcatctttttcctttactttacaattagtttctatgaacagaagaatctgaaagatttaaagactagttagcacagcagcaatttataaatcattaatttgggtactgtctatacatttaatgtgtyctttttcatagtcctatgtgaaatacatatacatatatatatattccactgtttataaacaatattcagttttatttgcataactcaatatattttatattaacagctccgtttttagtgtcttaagacatcgagtctgtttttagagatacagtctatttgccttgattttagcctgttataatcagcttattattatctggccactcttaccagtgagtatcatcttgaggctgttcttgctcatttcaacttgtcacaggggatgttttttactctttggagtttaggtacaccaggttattaattatgctcctgattcatggtacttccatcatggggcatataaggtccctgtctttgttttattcccttctatcttcattcaccactctcatttcctctctctccactagaaatmattctcaggaatcaaattaatattattctggcttatatgtgtttttaaaaatctcatcgctttttatacatgtaattttaatttatgtaagagactttgtcctacagatttcattgtgtttcttctctttttcgcccagcactgtgtgttccatttctatccagtctactatgtgtacatcaagtccatcatttctaactgttgcatagttcatgatgcgaggcatcttccacattgtatcccaattccctaactggaatcccagttccctgctacctcacacaatgctccagtgaacagctggaaaatcatacaacccaaggaattattgaaagtgattatatcccagcaaaaggccyaggcccatcttacacttccaccccaagaaggtactgctacttttcgggaatggcctggtctccttggcgaaattggcatttgatctgttctcatcactgtcgtctggcatcagaagtgaccccacttgtcaggcactgtactcagtgctttccatgcactaactctgataacaatcttttttttttctttttttgagacagagtcttgctctgttgcccaggctggagtgcagttgtgtgatctcagctcactgcaacctccacctcccaaattcaagcgattctcctgcctcagcctccccagtagctgggactacaggcgtgcaccactacacctggctaatttttgtatttttagtagagatggggtttcaccatgttggccaggctggtcttgaaatcctgacctcaggtgatccacttgacctcccaaagtgctggaattgcaggcaagagccactgagcttggcctgataacaatcttgtgagcaggtgcttatgcagtattttagggatgtgaaagtaaggtccaaagcggtgaaataagagcctgtattctcttaacctccatcccgcaacatcttttatgtgtcagtccctgcactaagtctagggatactgtgctgagcaaaaactatcttcttgctttcacagagctcagtgtctggcagggggtcagactttcataatataaacccactaaatgagtgcatattgatggcggtcactgctgtgaagaagtgggaatggttagcatggaaacatagccccartgggggcractaagttctttcccatctcattctactatgtctactttcatctctacttttttcttttctgagctatcagctttcttgctctcaactatatttgatgtatttaaccagattttatatattgtattatgtattttataacatgtatatatatcatataacatacacatatacatacatacacacagccaattaagtctcaagttcaattacaatgcttctaagtttaggactattcattttcattttggcagagaaattatctggtaaaaaattcaagtagaaccaaaggtatacaatagatgggaagtttccttttcactctcacactctcatttccatccagggttctacaattcatctccttccaagcaattcctattgccagcttttcttataccctttcagaaatacacacacacacacacacacatatatacacacacacacacacacccttacatgtgtttgtacattatctctctttttacaaaattggcagtgattctttgtcctgtttctgccactactcaaaaattttaaaacaaattacacacctataaacatacaatttaaagaaaagagtgaaagtgaaaatctaaggacccagcacatggttaagatgagagcatgatgggttcaatggaaagcctttgtgtacctttctcctttgcctccgttccctctccaatagagtcaaccacgttggaggttatagcacttccttctttatgtccccccatctcccatctggtatggtattctcttttactgcagatggacattttggcagacatatgtagttgcttctctttggtatttacctaggagttgaagtgctgggtcacagggtgtatgtatatttcactttagtagatactgctgttgtaggactttctccttagtttagctaaagatggggtccttgtcccaaggccatgaaaaattaggctcgcagacaatttgaaaggtgagaataatggaacttattgggaaaaaagggaaacagggactccccacaaagccagggtcctgctagcatgcttcctgccttgcagattgaatcccaggtaccacccaggaagaggaggggccaggctcctccccactgtgaatggtgtgaccgtctgtggctccccagtgtgcactcctcccagtgtgcaggccggttggagtttctctggggtcttcttcccacttggctgtctcactgccaaactcccaaagtgcttataccagtttactctcccatcagtggtgtatgtatttgcttcatttctttgccaatactgatactgtcttattaactttcctcattctaatgtatacagtcttgtgttatttgtggtttaatttccctgagaaccaattatgttgagtaccttttcataggtttaccagctacagaagtcctcttgtgaagtgcctttgcaagtcttttgtctttttaattttttgcatctttgtatattctaggtataaatcctttgatacatatatcacaaataacttcctagtctatggcaaatcctatgttggataaacgtactgcaaatagtttcccagtctgtggctagcttctgtgtctgtgtcttgctttgtcactttcttactgatatcttttgatgaacagaagtacttagttttaaagtagttaaagttttctttatgttttatactttttatgcattttaaagaaattttttgttactccaaggtcatacaggttaaataaattcttactccaagaacattcttttaaagttttgctttttttcatttaaatgaaatccatatgaaagtgaactttgttatcaagtaacatatacaatttcttttatttttctgcacggagaccaagttgtcccatcaccatttattgagtggtctatcctttcctcactgattacagtgccagttttgatatgtcatgtttccatagatgaagaatattttggggctctctatctgtaccttcctttttaaaaaatataaatagtggtgatactatgaacaattttgtttgtattattgttttttgcacttaaaatttgtcttggagatcttttcattttggcacatacggatacacccctatttttttttccattttcctagatgtggggtatccattggacatatgtaccgtactgaatttaatatagaatgtcataaattacaagatgtaacattattttatacactgagatggagaatcaaactgcaacgcagtacttccctgatcatcctgagtgattcaygagttagttatactagcctcttatttctttgaggtgtacgttttctgagggaatctgccatttctcctgccatgagttgcattgcttggctcgtgataggcatttttatttttgcatgtaattttgtaacaaatgctaacactgctttatcttctttttgtttttgtttattgagacggagtcttgctctgtttcccaggctggagtgcagtggtgcaatctcggctcactgcaacctctgtctcccaggttcaagcgattctcctgcctcagcctcctgagtagctgggattacaggcatgtgccaccatgctcggctactttttgtattttttgtagagatggggtttcaccatgttggtcaggcttgtcttgaactcctgacctcaggtgatctgccccactcagcctcccaaagtgctgggattacaggtgtgagccaccagccagctttatctttttaaaggtttcttcctattgtgggtttcattagagggcttggttgttgctttgcaagaaaacattgacttgcttttgtttaatagtcttataaatatttgtttcactaacatcaaatacatgccatgctcctgcttttgagcttttctgtgcagtaacttttcttctcagtgctaaatcataagtttttaaagacatttaacatggcacactcaacatgtgtcaccaatgcccatagccactggaagtatcatcagtgtcaacagctatgacgtttggcaatgacagctttgccataactgctgcttagccaataacaattgtggaatgctgagtccagatctcaaacatgttaaaggtaaaaaaaaaaaaaaaaaaaagatattttcgagtctgtaaaacatggtagcgtatccggaattggtgggttcttggtctcactgacttcaagaatgaagccatggaccctcgcggtaagtgttacagttcttaaaggtgtcgtgtctggagtttgttccttctgatgttcagatgtgttcggagtttcttccttctggtaggttcgtggtctcgttggctcaggagtgaagctgcggacctttgcggtgagtgttgcagctcttaaggcggcatgtctggagttgttcgttccttgcggtgggttcgtggtctcgctggcttcaggagtgaagctgcagaccttcccagtgagtgttacagctcataaaggcagtgtggacccaaagagtgagcagcagcaagatttactgcaaagagcgagagaacaaagcttccacagtatggaaggggaccccagcaggttgccactgctggctcaggcagcctgcttttattctcttatctggccccacccacatcctgctgattggtccattttacagagagctgattggtctgttttgtcagggtgctgattggtgcatttacaatccctgagctagacrcaaaagttctccacctccccactggattagctagataaagagtgttgattgatgtatttacaaaccctgagctagacacagagtgctgactggtgcatttacaaaccttgagctagatacagagcgccgattggtgtatttacaatctcttagccagacgtaaagattctccaagtccccactagactcaggagcccagctggcttcacccagtgtatcttgcaccakggctgcaggtggagctgcctgccagtcccgcgccgtgcacccgcactcctcagccctcgggctgttgrtgggaccaggcactgtggagtgggggtggcactcgtcagggagactcaggccgcacaggatcccacagcggtggcggggggcgggaggctcaggcatggcaggctgcaggtcccgagccctgccctgcagggaggcagctaaggccyggcgagaaatctggcccggcgagaaatctagcgcggcgccggtgggccagcactgctgggggacccggtgcaccctccgcagctgctggcctgggtgctaagcccctcactgcccggggctggcagggccrgccggtcgctccgaatgyggggcctgccaagcccactcccaccsggaactccagctggcccacaagcaccatgcgcagcccgggttcccgcccatgcctctccctccacacctccctgcaarctgagggagccagctccggccttggccagcccagagaatggctcccacagtgcagcggcaggctgaagggctcctcaagcgcggtcagaatgggcgccgaggccgaggaggcaccgagagcgagtgagggctgggagggctgccagcactgtcatctctcagtagcataatttatataaccagtctcttgttgattaaccattatattattgatacaacaaatataagaactgttactagtaaattgagtaaagcaggaaaattaaatttggtctcttactgatcaaccattattagattgttgataacaacggttataatgttgatcaaccgttatattgttgatacaattatatttgatgtatttaaccagattttatatattatattctatattttataacatgtatatgtatcatataacatacacatatacatacacacacacagccaatataatttcactctcagtttcttgttaatcaactattatattgttgatacaacaaatataagaactgttactagtaaattgaataaagcaggaaaattacatttgggagccttaaagatgtaggttttcttcaagaaatttatgttatagttatatcccctgttgcatgtgaagacatacattcaaggatacttactgcagctcacacaatttgctgataggttggatgtgggtgtgagagaagagatgctgttttccttttgggcgatggcaactggatagtaatcagttactaagatggagaagaatgagaaagaagtctttttttgtttgtttgttggagtgatatgggtagaataaagagttaaaacagtcatgcatgtaggtactatagatgtgaaagtctattattcaggggagagtttggaatttaagggatagattcttgtctttaagcataaaaatgcctttgaaggtgagaaactagattacatctttaaggggagaactgtagatagagatgaaaagaaggcaaggactaacccctggggcaggtcagcatttagaagaaagggagtttgtaaaatgctaagctgtctgagaagtagcagcctgcaaggtagaaagaaaaacaagagaggtttagtggactggaaaccaagtgaacctggaaaccacaagcagctgtggcaaatcctgccacagtgagatgaggcctgagaactgagtattggatttgtcaatgtggaaggccttggtgatcttgataagcatgtgttagtagggtggtggggttgcagtgtttgggatttgagagagaatgagagaatgggtagctgtgatgctgaatatgtata[450 bp omitted]gcctagtcaactgagccaaactggatataaccacaaggtcaaaggcaggagccagtgaggagatcttggttttgaggtcattcctggtgcgataataaccatcctgtagcattttcttgtcacttagagaaggcattagcaaactttttttgtaatggtcttaatagtaaatatttttgactttgtaggctatatagctactcacctctgcttttatagtacaaaagcagccatagacaattcataaataaatgaacatgttccaataaaagcaataaaaacaggcagcagtctgaagtttgtcgactcctgatttggaatcattccagaaagtgaaataaaagcatggcttcttttttttttttgagacaaggtcctgctctgtcacccaggctggagtacagtggtgtcatcatagctcactacagctttgacctgctgggctcaagtaatcctcccacctcagcctcctgagtgtctaggattacaggcatgtgacatcacacctggctgatttttaaattttttgtattgatggggtcttgctatgttgccaaggctcacctcaaactcctggtctcaagtgattctcctgccccaggattcccaaagtgctggaattaaaggtgggggccactgtgcccagccaaagcatggcctttctaagggtgactcactgtagcacctcctgagtactttcctatcaagtatcctggaccactttttaaataattcattctaaaatccatatttaggattgattccaaatttgccaacctgtatttcccaaataactggcatgataattcttgtctttttcccaaatgctcattttccactcttcaaacgttgagtgttgactgaagttctgtggtcatgtttacagtcatttttatgctctttgtattgtacatatggaatgtatttaccatttctgttagcaatgatttcttgcaaaaacaataacacttgctagttttgcgtgcttaaaaatatcgagccctggcgctctctacatattatctaatgtaatccttatattaaccctgtgagtagtcattatcacttcttttacacaggaggaagttagagaagagtgttaagtgttcttttagtcttttccactttgtctttagttttctcttagctgttcttttaaattctaaggtcattcttatctaaaaacttaaaagagttgatcagcctttttatcaagtgttaaatttataccatcttttttctttgaacagggctggcaaataaacctggatttatcccttagccctgttacagcaagtctcagaaaatttggacttcagcttccccagtgatacattttcaaatgcctatgtatggattgccyattagtttattggctagaactaaaggaaatcaggcaagagacaaaggacattttctctagggtgtcagtcaatgcaaaatgttaggactagcatcakatttttttttttttacaaatgaaaataattgaagtgtggtagaagttcctctagttctggcagtcctaaatattgttaactgaagaatgatggggctcataaatttggaaaggagagagaggggaaaagagaacgggaatttatgctgagcagggtggctaagtatatatattcaacaggctataggaggagctattagtattcacgaaggggtggcacacacatacatagtaggctaacgtgtatgcagcatgcatcacaagtcactttggggtggagccttaacatttaatgtattacagttagggcctatacatcaaaaggtgaagcagaggacacgaaagccctctgtgttcagcctctgtagactggccagaaccactctgtggtcagaggtctcttatcaggaaagaattcttgttgttgtgttgaaactgcaaaagggaggggcagtgtcaggcaggtggttgataccagtctttcagaagcactggtttctgtttaacttttagagaagaaagcttaattggagtgttactggaaagggataccagtctagaccacaagagaggattcttggatctcacacaagaaagaattcagggtgagtccacagagtaagatcaaatcaagtttattagagaagtagagaaagaaaagaatggctgctccataagcagagcagcactgaaggcttctggttggctatttttatggttatttcttgattatatgctaagcaaggggtggattattcatgarttttcctggaaaggggtggggaattcccrgaactgagggtttctctttcttttagaccatatagggtaagttctggatgttgccatggcatttgtaaactgccatggcactggtgggaatgtcttttagcatgctaatgcattataaatagcctaagataagctgtgaggatgaccagaggtcaatttcctcaccatcttagttttggctggcttctttactgcttcctgttttttcagtgggttctttgtgacctgtatctgtcttgtaatgtcctatctcatcctgtaactaagaatgcctgacctcttaggaatggagcacaggtggtctcagctcattttatctatcccctattcaagatggagttgctctggtttaaatagttctgacatattttccccaatacccccaaagggacccttaatcccaaaatttgcagacagatgaagatccatcttctgtagcttcttctggctgaatacaggtgatgatatttttgcgtaactattcagggtagagaggagctcagtgagaaagcatcagtatggtgaaggccattcctaactcccgagttctcacaaaaggtgatatctggaagattaataagtrttcaatttaagaaaacgttgagtagtcttatcctgcattgctacacaaagagtaccacagcaatatattctacaacagtaaagcaaaataagtataattatcccaactaaactaaataataagcctttccatgaactaggcagttgttggaaccaagcttatatggggttgctagccaattccaacacatgttcagaattaaaatactgatccagatatttatgttacccttctgtttcttctgagcagcagctagagatcactggttggttcataggaacaaacagggtcaatctaaatggcagaaaaaactcgaaacaatgaatgggactagagttgaataacaagtataccatagtttctgaaacataatttttctctctccagtctcccatttctattgaaaacaaatcatggtaggactgatttgtttgcacagtaagctttagtcttattatgcttggcctggttatttgtataaagcatagcaataataattatttgccacgtaggctttttaaaaattgactttgatgtaactttgttccataagaaatctcagattagactttctaaagccttgagctgagacacagatttatctgtgcctgcaaatacttgtatgagttgtgtgaattctccttttgagatcccaagataactggagctcctaggcctgtcagaaagtgacattctttacttaccacaggtcaggaaccctgtaaaggaattgaatagacaaggtatgaggccagcttttcccagaggctttcatcagttctgtaagtcaactttgattccttaaagcaatctgtttatatttgaaagaatgccattccagtcaaagccctggtaaaacaggcagtgtctctaattgtgtcctgttacaaaggaaaacagatttttattgcacatatgcaaattactatgctgccataagttaagaatactcacaaatagttttcaaattcttgagaaatcaggtagaaagaaatatgctccaaagttttctcataggagtataatttactcaatttttaacaactgtaaatagctcaaaaaaaaaggtttcttgactctgaaaaatgaaacaaaggatcagcaacattttaagcaaaaagtcactagaaggttattttgttcttttattagtttagtccatgctgttaattcctgtttgctcaatatttatgaacatattggtttcccaagggagactcttgaaagtttttttcctctctatcttaatggcacactttacaaaatttttcagaaacctgcatttaagagccctctatctgattataaaccatcttttaaagaggatcaaaacaagacaacaattttctgtggataacataaagtcttaggaaagccgtggttaaagacacaattgactagaaattttggttacttctgtggcatacaacaattttacataacagttataattattactgataacataaactaagtcatatcagaatttaggagtttcccataattttggagcacataccaataacatatttatacaaatacaacycaaagaaagctaaacaccatttcatatttgacagtgcttcctgtatgattttaatataccaagtaagccaaatatgtcatttttggacttaaggggacctcatatctaaagtattgaccagatcaggaaaaggcataatatagaatttgattttggaaagtttgtcaaatatcaaagatttaaaacacttgatattataaaatcgaatcccaggtcactgtaaagtcatttatttagccaaaatgataatacaaagattttccaaaagcaaaatcctttttttttttttttttttttgagacgagtctggctctgtcgcccagctggagttcagtggcgccatctcggctcactgcaagctccgtctcccgggttcacaccattctcctgcctcagcctccggggtagctgggactacaggcacccgccactacgcttggctaatttttttgtgtttttagtagagacggggtttcaccatgttagccaggatggtctccatcttctgacctcgtgatccacccgcctcagcctcccaaagtgctggtattacaggcgtgagccactgcgcccagcaagcaaaatcctttactcattgatagagggaagacagctttccaaacaatgtctcactttttcttctttattttgttgtttattcaaaaggcaaacaaaaatcttccatgatcttttaatattacatgaaaattttgttcaagagagaaagccaaatttcatctttgcattaatgaatgtcaaatccaattcttaagaaaaccttgtagacaaattattcaatcttaatcaattttaccatgagataagattctcataaaccttttgtagtcctttacaatttttttttgttgttgttaaagagcagattaatgctctaagaaaaccctgttgtgcttttattccaatgttctatttatggaaaaactgaataataccctttaactttagctaatattttaacacacagaatttcttttacaagattaattttcactgacctcccacaacttactcaaacctttagctttatcctatgtaacttaaaacagtcttttaactctgtaaactaggcaataagaccacattcccatgccttcttataatcttttaccaaaaacacattctattttccttacacgccttgcaggtaacactgtttctctggtagcctcaattacatgtgctacaatgttaactcttagcaacttttatatttggtgaaaagtctgataaataagtggttttaattatgtaccaggtgtggagcctaggacgccagacagaagtgcagataaggtctgagtctttccagcatagctagggggcatggccaactccacatgtccccaggccctacctagaatctaatggctccaaagcaggtgagttgaacaattatcaagttaaagaagcagtttatggcattgaagcattcagcaaatctaatttaatctgacctaatttagaccagatgtctaaattttgaagacatttttattttaccaatatatttgattctctttatttcccaaagattattaaagtcccatgaattaaaaggtgttaaagtttttatttttctgacaaaatattcaatttaagtgcttatttttcaagccaattaattagagctcttttctatgcatatcacacatacaacacacaaaaatacacagacagaagacccagtagctgttaattttttcatttgccagcttttaagaatcttaattggattactggcttcagggtggagcaacgtgtggggacagagccgggaaaacatgcagtttctggggcctaataaacaggtgcagttagaaggcaaaacagattccccaaaattacagatctcatttttatattggattctggatcccaaaaagagggaatcagcccatcccctctgggagttttggaaggtgtagaagaatgtttccataccttctaggtggccaagagcatgcttctctgatccaaacgtgcacagagtggggtattcccctataactgctattagccttcccttaaagcatatttcctgcctagttattacacaccaaggttaaaagctctcccataatgcaaagtaatttctgatacccctacaagtaaaaaacattaggtaacacaatgcaaatcagagcaatgccttggattttgagagggatttgcttgccttcaattcctggggttccatgaggaaaacagatttttcccaaaatggagcctgtggtgctccctcagttttttctaaggaagcccaggctgttagaaatgatcttaggtcctctcaatgtgggcatcaagagtggcaagaaaacaaaatgagaaaaacaattcagttgactgagaagaaaaaacttttatctagaaaaaaatcaatataaaacctgccagatagatagatagatagataatcttggacatcacttttaattaagctgacttttaaccaaatctcttattatcagactctagccaggacaaacagctaatatttctggcttttgaactttaccaaaagtaacctcccaggtgaaaccaataagccttaactaaggttatgatttaaccacaggtgtgggaggtattttcaaagaggtggtaagcagtttttacaagatctggaacctccaaacatagctcagagaaaggaagattcaagacagggagtcagaagttgttcatgaggggaagataattaataaatggcaaaggtcacatagatatcaaaccagaaaggactcattcccgaagctaggaattgaatccaggccaccactgtgaaatagcaaagccttagttactgagctgcagtactgcacagtctccattgctcctccgagaaggagcctagagcagccaattttgagcttgcaaaggcttttaactgctcaagataatttttaggactaattgacaggaaccccaaaattcacaccctctggatggcagagatcaggagaaagtacccccacgtggttacaaggtcaagctttcaaggacataaaacaagacgagagggaaacttcatccagtttttgtttcagggacctgcagaaaagtttgtaactgaccagtttgcgggccagcttgaagaccagatttgtaggattcctaggcctgcattctatcctgtggctagctagggctgccataatagaatattacagactaggcagcttcaaccacaggtgtttattttctcactgctccaaagtctagaagtccaagatgagggtgcctgtaaagctgatttctggtaagagctctcctggcttgtagatggccaccttctccctatgtcctctctgggcctttcctctatctggccaagggagctatctctggtgtcttttcctcttcttataaggacagcaggcctatggattaaggcctcactttcatgtcttcatttaagtttaattacctctttaaaggcccgatgtccaaatacagtcacaccgtgggttaggatttcaacataggaattttagggacacaattcaacccataataggagggcattggaaggagagtgttccaggcagaggaagtagtgcagtagagcatatggaagtaggaaagtgaggagcaatggaaggggttcagtatggtttgagcgtggggtgtgtagagggtgaaggctatttcacccagtgcagtaagctctatcatccacaccggggttttacagtgggagaaaggagggtgtttatttgcaggtcaagaagcaaacagaatcagggagctcatgcttaagacctgaactccacagtggcttacatgtaaggtgcagargttacaggcaaaggcatcaatcaacacatggaagccatatattggtttggcctaaaaaggtgggatatcctgaagtaggggcttacaggttacaggtaaatccaaatattttctgatttgcacattgtttaaggaaggggatatttgtctaaagatgggatcagcaggccaggtgtggtggctcatgcttgtaacctcagcactttgaaaggctgaagaaggagggtaacttgaggccaggatttcaagaccagcctagtcaacatgrcaagactctgtctctaaaaaaaataaaaaagaaaaaaagaaaaagaaaaaaaataaagatggaatcagcagaaaggaatgttaggtctggcccatgggcggacttcctccagacttctcagaaagaaatttaagacaaagaatggtgccaggcgtggtagttcacgcctgtaatcccagcactttgggaggctgaggagggtggatcacttgaggtcagggatttgagaccagcctggccaacatggtgaaaccccatctctactaaaaatacaaaaactagccgggtgtggtggtgcacscctgtaatcccagctcctcaggaggctgaggcaggagaatcgcttgaacctgggaggtggaggttgcagtgagccaagattgcgccactgcactccaccctgggcaagagagcgagacttgagactccatctaaaaaaacaaaatggaaaacaaagaatggtgataattcagtcctcaattccttttcttttttttttctttctttttttttttttttaactgctcctgcggagcagggctacctcatagccagtatgtccagagttgtctcagttccctcgttatctgtggtctggaggatccatatgatggtgatccaggttctgaaaaacaactctggaacatctgttaagatgttatctttagtttctataggaaaccaaacatcttctgactctgacctccttggtgattattttaagctactgtttccctttttgcttatcgagttgctcatttacttctcaaggctagcaggatgactggactttctcttgaaggaactcaagctgttcctttatttttatgctcaggggcggggggcactcagcaggtccctaagaggtatccctgctgtgtctcactatgggtgaaggctcagcgggaagaaagctagataccagttggaactctcttaaagtaaggagatcttgggtactttattaatatttttttcaagctttggtaaagtatgaaataactctggattaagaggagaagaactagaacttaataaccatgacatttgggcaaattgtttgaagcctcagtttcctcaacctaaaaataggaattataactttttgaattgttctgttgtatgagataatgacagtgaaatattttggagccaaaaagcaatgcatactattgggggttattattattttttgatctttcagcaagccagctatagtagcttttcctatataaacacagtatgaattcagtgccctcgctttactgaccctcacagcattcaagccctgtatggaccgctgagctctcccttgaagcaccccttagtccagtattctttactattttcccctttaacaatttaaacttctttcaaaacaactggcagtagttttttaaaaaagaaaacaggctactcttcaaattaaaaaaaaattgtcttgctttaggaaaaatgttcttctgtcttttccaattatcttatttcttctgcctctcatctgccttgcctaggcagaattattctcaagcctgcacatgctgctgtgcctctctggcttctaggccaaaacataggctaatagtactcttctcagctcactgagctctttcctgccgtcattcaaatcacctctgaaatcctgccttttgataaagtaatttctgactgatcagaggaaagtgatgattttctctgtgacatgtctttttattttccatcacactcagtgtcttgtccttctrtgcaacatatccatgtatttaaaaacccttgtatatgtatttgccatgtatttgtgaggtatagctcgtgaagtaaaaaaagtctttatttttttaaacacatcatcatttcagcttcaaagtcaatgtggtctcttgagaagttaaatatgctgcatttgaaattttatgtttctcatttttcatgtttttttttaaagccccttttaattcctcatgtatttgaatattccaggaagctagtagagtaaaaagccaaagtgttaaagtgtttataaggaatgtgactcatcgaaattgactcacacaattcatcagctattgtcatccatatgttctcattatttacgtggcttttgctttatttaatcagatgactgaacttatcatcgtgggattttgcttgtagttgtttaatattatataataaaatactcttgtgtgaaacaagttaattgactttttttaattaaaaaaaatttatgtgagagtcaggagttacatgtgcaagtttgttacatgggtatatgttgtgatacaaagattttagcttctaaggatctcattgcccaagtagtgaacgtagtacactataggtagtatttctaaacacttttcccctcccsctcttttggaatccctagtgtttattgttcccatctttgtgtctatatgtayctaatgcttagctctcacttataagtgcggacgtgtgatattttggttttctgtttctgtgttaattcatttaggatagagagactccagctgcagctgtgttgctacaaatgacatgagttcattcttttttatggctgcatagtattccatggtttatatgtatcacattttctttattcagtccaccattgatggtcacctgggttgattccatgtctttgttrttgtggacagggctgtgataaacatatgagtgcagttacctttttttgtataacagttcataataaaatactcttaacagtagcacagaatttagattgcttttcaggctagaagggataattgaaacatagaaaaaaataatgactcctaagcatagaaacagacccaatcataaagctctcttcctctctttctgcctagtgttagatcttattcattgtcttaaagcactgtgaccattttcagtgaaatcacagttttattcatgaaaagacaatgaattggtgtaagtaatcatttgaggatgaaggtgactagtctgtgatcaacaccagtacttgaagtacttgtaaaacatgaattgaccttggttaaattgcagaaaataaagtattagtatacataaacacattttctctcagcattgaaaagttatagtctataatttacctgcttgctaagaataaaaatattacttagaggtttatcaagaccttttttctacaaatggatttaatgtacagaattattccattttctatctgtgctctgtatactaccacctagtggaataaaatgcaaatttacctgtcaaaatcaggagaagaaaatgaaccaggggaaatttatttcaggaaaaaattttcataacacgttattgttacttcttttagtataatgtagtttgcataaaatacattagtttggagtgaaaaaagtcccagccatttttgtgatagctattaaaatgctattagtttgtccacaaataagctattctattcagaaacttagaagctaggtaaattattgagatgatgccagcatattatatctctaaattatgttaagaagcttctctaaattcctcatcactagggtgtattagtccattttcacactgctataaagaactacctgagactgggtaatttatgaagaaaagaggtttaattgactcacagttctgcaggcttaacaggaagcatgactgggagacctcaggaaacatacagtggaagaaggtgaaagggaagcaaggaccttctcatggcagcaggagagggagagcacaggggaagtgccacacacttttaaaccatcagatctcaggagaactcactcactctcacaagcacagcagggaggaaattcacccccacgatcctatcatctcacactgggcccctcctccaatttgacatgagatatgggcagggacacaaatccaaaccgtatcataggatttgttaaaaaaatctaacatgttctgcttcaaggcacccatgaaatgaaggtgtcatttcttaactgagaggttaaataaaagtgcagagataagatggttaagttttatcgtagctgggaagaaaagcrggtgtgtgtattatgcttaggtttttcctcccaaacaatgaaacccaaaaaggcaaatgaagctttaaggcgctttatcctttactggtaggatggtcctcctttaatcttcagtctccgttaaagaacaaacacaagctaacaatcaaaacctgttgttgcttgctgacggatttctctaacatagtcttccatcaaccatcataggtttgttgtggccacccaggccctttggtcgtcatgttcccatggaatgctaatgaaattaccttcccatttcctaaggtgacatgcctttcagatggcattggtgtgtgcttgtgtaaacacatttttttgtgctcatgaatattttacctgcctgattttggtgatctgagtgttgagcagtgggtgagggatggtggggcaatgggtagtaaggggaagtttaattgaagttcagataaaaatatccctccagaaacattacaaagccacaaaatcagctgaagttgagtcttctattgtaaagattctctttcttctcctgacagatccccattcctatccaggtagaccaggctctagtgaagattggacacaagtggtttatatcccgaagctcttaacctaaragtcctgccttgtttttttacttcatgtggtcttgaattgctgaggatagcccagtgatcatttctaccttaatatgtagccttcaaaacgttgggtctctcagttttcttccttaataaacaatgaaccctaattatttataactgctcttgtgatggaggaattggcatgattttgcattgtgggcttctggctttacagtgtttgtgggaaagatggtcttctatctttgttatttataagtcattcattccctgtttttttgaagatattgttaaataaaaaaacttcagctgaattaaatttaaaagtttttaattgagcaaagaaccattctcaattcgggcagccttcccatccagagtagtccctgtgacttcagtgcagccacatggtggaagaggatttatggacagaggaaggaaagtgacatacaggaaacagaaaagagattcagaaacagctgaattggttataactcagcgtttgccttatttgaacatggtttgaacagttggccacgtttgattggccaaaactcagtaattggcacaagagtaggctaccatctgtttataatgtccacttaggttatagttcatgatgtgcaaagaaacctttaagctgagcttaaaatgtaatgaggcagctgtaggctaaacttgatttaacagtacttatccctctgttgaaattgcactcttgctacctgctagttgatgtgggcaggtgtgctaatgacacattcgcctgcacctaccacctgctgaagaccctgccatgtcctgaagcagtcacttaggctatgaaacagaaggatgagttagagaagtaaatattatattttaccccccaaagcctaaaaccatgtctaggttctcccctttctcaattcccaatcatgcaaccttgaaaggtgttatatagatagttgttagaaatatgtctgtcctccaaaaccctactaacacgcaaaaatggacaaatctagcttttttgctaaaatcctaacaactcagaaagcaaagcaaaatgaaatgtatgtactccattctcaggatttccttcttaaaaaccactaggctttgtgtaactcaattttaaaagtatggtaatagctcctgtaattcgatggcttcttctgggagacagatataaatctattctagactttaagactggtgtccacattttaagttacagttgtatgtacttctactttgttgcagccttctcttggagtcaagaagcctaccaaagccctgctctttgtactcttgagcccagtgggaccttatttttcaagtggaacctttaatccagtgtccctgtgggccaatcccaagtatgtaagagcctggaaaggtggaactggggactgcaagatgggagggtaagtaaatctgtgtctctgtctaaaggaaagacaccttcatgaccatttagttagtgccatttcacttcagtatgaacacatataatacttttcaaactttaatgctcattgtgtttcatggttaattttcagtttaatctttcagcaagccagctgtagtagcttttcctatataaacgcagtatgaattcagtgccctcgcttttagatgtgctagtttaaaggatagcccatggccctttgtaagggagaaacactggatatgatatctagggaagaactgaagtaagaaactacaacaagcatcacatcggtgctttggataaacttcccctgggcgctggtctctggctgcaggctgacggctggcattaaaaagcatctggtcctgggacccaggctctcagttggctccagggagtcatgtctggggaaggtgcccgcttcactgaagtgctgtcttcattgccacagattgtggccacacctgctgccaactggctgcgggacagccctgctttggctctgtcaggccagtctcataggccatatgtagctggcaggaaataaaagagcatttgaaaagtgttggacgatttcaggggtggacttggccatgagttgggaatgcccctatgggtgaacgagaataactggtttaagcagcatgggttcttgctttgcatgtatcaaatggtgctgtttgcatactcagggcagcagctgtcctagaaggtgactccatggcagtcttgtgggccctggtaggacatttaggtccaggaggcaggggagagtcacatgacgtgctgctggggtattagaggcaatgaccactggctttgacccctctgtagtcttgctgtatttcctttttcttttctctcctcacctacccaaattaaaaaagaacggttataaaagtcatccccactggcaactttagcaactgcattccctcaatgggtagagaaatccaaatggagtgcattaaaactaggaagtctattctccttctggcttagagcacaccttcctgtgtcctaggctagccaggttgaaaactcctttttttgactcttgatttctttttttactggttcaaacttcttcgcagagcatgtgcctatgtaccactgcataccatatatataccatatatagagagtaaataaacagtcttgatgaaaagtaataaggaaaaagtttccctgtttaaaatattgctttctagctcccccacctgtttaggaaaaagataacctggggacacagaaattgcagggcaatctttattaaccggtatttgggcaggttgtaatttattttgtaaacaatgatttaatgcactattgcagaatacatgatcactgtaggccagttaaaaattaatgttttcagtaccacacagagtgaaccctaatgtaaactgtggacttgtggaccacactaatgcaagatgataataagaagaaaaactgagagggtgttcgggaaggggtataataggggaattctgttaccttttgctcaatttctctgtgaatctaaaagtactctaaaataataaaatctattataaaaatatttgattcattaggctcaggtggactatgatccatggaaattgacttgaaatctcttaggaaaggaagagaccggagaagaaagtattgaactcataaattaaaaatggcaagagggaaggtggtaaccaaaaggatgggcatttaacctatatgcctatcacttccaaaaagttctagggccgtctcctcctatgcttctgacctggagaggtacaaggggaacaaaatattccgcatttaatattatcctgttgagttggcaaagacatttggagtcaactttagttttgtgtattattacatctgtaaacctaattaagtcaacagttacccttgacacctgtagtcaactggtattattaaataactattgagtctcataaagtcaagaactttctgctttctatctaagtgaatctagggcagagactgagcatcaggattctttagcatgcagccaagcttgagaagcactgagctagagaaaggtcttgcactgtagaaacagctttagttccaggtgattccttggttaatttgggaggaataaggctttctgtcactctctctctctttctctctttttctctctctcttgcacatgcacacgtgcacacacacacacaaattatctctcttagttttttcttttttccttgcattctgattctgcatttaagagtacaagctttgaagtcagaaagacctggcttaaaaacctaactgtcataatggtgcgtaaatgtcgttatagatttgtccaaacccatagaatgtacaccaggaatgaacactaatgaaaactctagacttcaggtgataatggtatgtcaatgtggttcattaatttcagcaaatgtaccactctggtgtgaggcattggtaatggtagaaactattcatttggatggggagaaagggatatgggaaatctttgtacttgcctttcagttttggtgggaacctaaaactgctctgaaaaaaacctgaagtctttaaaaacaaaccaacctaattgccttgggcatgttacttaactgctctatgtatcagtttcctcatttttaaagttgaggcaataataccttgcacagattaagtgagataatagaaagtgcctaggatagtacttggcatatagaaagctctcagcaaatgcagtatgataacctaatggttaaaagcttgggtttaggagtcaaatgtctgggagttacacacttaactatctgtgagatcttctacaactgaatcctctctccaagtcttccaaagaacaataaagtctagggttgtttttagatgactcaatgaaataatgtagttaagtacttagtacccagtctggcaggtatgggttgcatatctcttatctgaaatgcttgggaccagatgtgttttggatttcaaattttggagtatttctctttgggcatccctaatccaaaaaattcgaaatccaaattgagcatcatgttggcaccgaaaaagttttagattttagagcatttcaaagttttaaattagggatcctcaacctgtagtaaactctcacagtcactgatgttgtgaggttttctcactttctcatttcatttcctggactctctttatcttagaagaaatcagttaaattttacataatagaatttattcttttggagggatgtatttaatatgtctattctcccagataacctatttaaaaccatattgaaatgtttctatgtcaacagctttcttactttttcatttttctgtttcctccaagaacatgtttctcttatgaatattggcagcacatgggcgggaacccaactatattaccatggtatcagttatcctgtggacattaataatacagcttacacctgtgagagaactctgggaaaattaaaacttgtttgggggaataaagaccatctacagaatataataatacatcaatcaatcaattaaaacttaaacataaaaaacccttttcttttcagtgcattgaaatagtcactgtctttaatcctctttccttgctcagtgcttcatgaagctgaggagccatggttttaattcagctacactttcagaaatgtgtatgcatttgtatttagaagcttctttgaaaggctaaatattcatcctgtaagaattctctatgtgttttttaatacagtctaaagggcattttgtatatgaaaaaataatttattttcaggtagggtaaaacttcactgcttcactacttcgtagttgtgtctacgaatgagaaaaaattcaaataaaatagttattattattagtttttagagatgcagtcttgctgtgttgcccaggctggtctgggacttctggcctcaagccatcctcctgcctcggtgtcctgagtcactgggattacaggcatgagccaccacaccccactgaaatagttattttttaaaaaacttaatttcattaggatgtaacagtctcatgtaactcatcctttggcttttattgttattatttattttttccaagcaacccaatgagatatataaagcagatatttttatctgccagataattaaatgagggaaaaataaggactaacttgcttaagttcacatataccaaatagtrgaaatgcaagagctgtcctcaggtctgttaacaacaaacctgtggtctttctaccagacgtcccctgcaatctggtttatactcattattaaaaagcatttgtaatttaactcagttatctatttactatcagttatgaataaggattatttgactttttatggtcattaaacaatagcttcctatctgttgtctttgtctttttaatttttatttattttattgtttttttaatagcttcctatctgtataccagacttgcttcatctccacattgaccaagaatttatattttgtcatctgtatttagaagcatatgttttaagcgtcttttaatggctctttttttttttttgctgggaggggacagtctcgctctgtctcctaggctggagtgcagtggcaccatctcagctcactgcaacctccgcctccctggtgcgagtggtgctcctgcctcagcctcccgagtaggtgggattacaggcgtggtccaccaaacccagctagttttttatatttttggtagagacagggtttcaccatgttagccaggctggtctggaactcctgacctcaagtaacttgcccacctcagcctcccaaagtgctgagattacaggtatgagccactgtgcctggcccttttaaggactctttttttttttttttttttttttgagacagtctcactctgtcgctcagactggagtgcagtggcgcgatctcggctcactgcaagctccacctcccgggttcacgccattctcctgcctcagcctcccgagtagctgggactacaggcgccagccaccacgcccggataatttttagtatttttagtagagacgaggtttcaccgtgttagccaggatggtctcaatctcctgacctcatgatccggccgtctcgcctcccaaagtgctgggattacaggcgtgagccaccgcgcctggcccttttaaggactcttaacattaccttggtgtgagtcaacctcatcgtgctccaatcgcaatcaccatagtatgatgtctattttccacagcttactggaatatttcagctattagtcaatattctttcagttgcaagtcagaaaaccaacttgaaattattatttatttatttatttwtttttttgagacggaattttgctcttgttgcccaggctggagtgccatggcacaatctcggctcactgcaacctccgcctcccgagttcaagcaattctcctgcctcagcctccagagtagctgggattacagrcatgggccaccactcccggctaatttttttgttatttttagtagagacggggtttctccatgttggtcaggatggtctcaaactcccaacctcaggtgatctgcccacctcagcctcccaaagtgctgggattacaggcatgagccaccgtgcccggcctggaaatgatcttaagcagacaagggcttatgaaactaggatgctaggggctaaagcaattatttccaagtttcttgtgtcctttgcacatccccctttttcttcccttcttcctctgcctctggtcagagcttctggctccatgttggcctagggctctcccacttcagmcgctttcttctgtgaagtgtggtgatcatggacacagccgaccccagttttacagcataccaagtaagcaaccccagaagggagaaaatgcctgtatttcaggttatagacattaaaatgagtgaatgcacccaaaaaaggaatcatgtgactgtcttaggttatatgcccaccctttaactcagctgcagcagggcaagatgctatattgtcatcagttgtggtagggcaagatgctatattatcagtccaagcagaatgacatagctctatagaaagactatgtttttataagagtatggaatatagtgcagatgaaaacagtagatatacactaacatgtggctctaatgtttaatttttattttttttgagacagagtctcactgtgtcacccaggctggagtgcagtggtgctatcttggctcactgcaacytttgcctcccgagttaaaatgattctcctccctcagcctccctagcagctgagattataggcacccrccaccacgcccagctaattcttgtattttcagtagagacatggtttcaccatgttggccgggctggtctcgaactcctgacctcagtgatccgcccatcttaggctcctaaagtgctaggatacagacataagccaccgcgcctggcctcatgctcaacttttatttagacaacagtacaaattgtaattttacccagatgtaaaagagtctaagagacctaaatagatattttgtggtagattacattaatgtaatgtaatgtaggagttttacattactacatttgtagttgttttagttgtttttcattgtttgtttctgtgtatttctggggatttcatggtgcaacaggaggactagagtttattcccgatccctgactgtcttacggcagtacttctcagacctactgagttatacaaccaggggtgtagggaggcaagcagtcatcacatttatttgaggactctcatgttttgtctaaaatattcatccytattttataatatactccataattttcccatataagtttagataaaagatgataccttaaaagtattataacactaaattgtcattccgggaaaatgtgctgtgttcctttcattttaaataatctgagatgaatggtgcaggctgagaaaaataggcttttgaaatactttttggtcaacatcgagacttttaacatttgtcctatcttttaggggaatttagacattgggcattatgtattccttggatacattaaaaggtgttagataagagcgctcacacttgctgctcttctattgcaacttgacagaagttacttctctaaaccttagtttctcatctgaacaatggaaataatgatagtgtctatctcatagtattggtgtgagatttaaatgaaataattcatgtaaaattgcttggtgtgtggaaacatagtaacttttaactgttctcattaacttggctatttacctgtgttcttctatcattacatttcaagttaaaatttcaaggtttcacgttgttctctctccaatgaatgcagttaaatcacttagattttctaatgagttttcctttaatgttatgcagttgactagagagtgtatatatattaagaacataataccttcactatgtccacatgtgaattaagagcttgaggctatcagagggtagaagatgagggagtggggatgaagtatgtttgtaaccygtgtattttctctttcttaaaggaattacggctcatctctttttgcccaatgtgaagcagtagataatgggtgtcagcaggtcctgtggctctatggagaggaccatcagatcactgaagtgggaactatgaatctttttctttactggataaatgaagatggaggtaatccactcagatttcactgtgtgcatttctcagtcattttcaacaggaccagaaagacaagagctagaaacttagtacaagggagtaagkagcacagttccaaaggctaagtaaggactactgtgcttttgctgcccaaatagacacaagtttcttttttttctttctttcttttttaaagaggtggagtctcactatgtcacccaggctgcagtgcaatggtgtgatctcagctcactgcaccctggttcaagcaattctcctgcctcagcctcccgagtagctgggattgcaggagcctgccaccatgcccagctaatttttgtatttttttttttagtagagatagggtttcaccatgttggtcaggctggtcttgaactcctgacctcaggtgatccaccggccttggcctcccaaagtgctgggattacaggtgtgagccactgcacccggccgagtttcgatttaaagaagctctagaggttttttgtttttcgttttttgtttttctggctctagatgtactgattattgagatactgagatgtcacattaagggatttaagttaccatgattggaagatttgcttccttatcccttctgcagttccccaacaattttcctatctgaacaccttgcattgagacacaggtctcagatcaggtcaatggtcattcaccatataccgtatataaaatgctagagtaataaatgcagtgtactgattctactggaaggattttgtgtactctctggctgtaattgttttaacaattgttgccttttctacatattttgaaaatgtatcacaatctctccaaatttactctagaactcaatctgattaaagagcaccattttaaaagataaatcaatgtatcttgggattgtaactagatcctggttcattcaagacaatttcatatatccactatagatatcaatatttctctattatctttaatatcctgagtackcattacttttctttgctgtttttttttattagttggcagagaccataggggttcagtgaagtgttggcaacgtgtatgatattgaattaaatggccaacggtgggagaaaaacaggcatttatttctattagaattttgataatcataccaaatttagaagcgtatttttagacttgtttacattcttaggttgttcatttcacagtagtaattatagagactagaaatataaatgatgtttccaaatacttatgaagtctcagtgttagtagtttcaattaaattttttaaaatgcagtttatatttgaaagtagctacagtagcctctcttgctctaatgttatttggctacaaaaagaggaaaatggtaatttagatgtggctgaattcagagctaagtactaattttagtgttagttgcagagactaacaagatgagtcttatactgcagtcagaggtagaataaacagaagatatggtgagtamgccttgtcctgggcttggccattggtagtccttggcatatgaaaaaccagatacagatcattctcatccttccattcctgctgtttgtacttggcactgtttgaaaataaaatttatacaggaatatttatgatttataaatttgagttactgtatgtgacatataacaaaagctacacttggaagattgtagccagtgttgacctctgcacttagaagataataggccgattcaacccttcttcccatctgcccactcttacccccaccccaaactccaccaaaaaaccacacagctcaaaacaaaaacagttacatcattcagaggtggtaccatcattatttttatggatgggagatgtcagaatttaagtacactctgaatcagagctacatgatttaaccagaaacaccagaaactgtcctggtggaaaattgttctttatccaaacaataatcatgaaacatttccaccawggcttttaaaggtcagaatagaaatgagtgagtttgtcttctgcctcttgcaaaatatacaagaccttaagactgttagttactattcagattatggttgcctgggataactttagttttaatatactccttcactttggggatgttcatctaacagaacaaataaaattcagaataaggagaaaggaaatagaatawatatttgaagtaaatagaatgttaggaaaaacctttgggctaaaaaaaaagacatgcaattctgaagtaactttgatttatatcatatgattttaagaaaatacaatgaacaaacgagttgaaaatcagcacaatactgattttcacaaacgttaccgataggaggtataaacagagttctttcggtaatagcctgccgtcttttcatgagcgcccacacacactgctcctgttggttgagatggctggtgcaggaaggtggatggggtggtggatagtgtgtgttcaaagcacagtgctgtgcacagtcactatgtgtggcactcagcttgtaactcatgggagttttgatttcagtaacagcacccatggtggcaagatcacacatcatcactctgttgatgagtaatttaacccatacgcttgctattcaccatttgaacaaagcattgtatcatatcctggaccctggagataccctgaaaaataagacccaggccttgtggttgagttcacagtcactttgggaaaacaaccacagcagtgaatctcggtattgctcaggccacatcatgagtcttctcggacacgtcaggcgtgtatacggactcgacttggagcactcttcctcagatgtctgtaccgcttgctctttgacatcctccaaatctttgcttacaaatcccattctcagtctggctttccttgagctcttaatcaaaatcataaactccatttcccatttctcctcagcattccagcattctccattgcttttccttctttrtttccccctgtgtagtctaacatactatcaacacaataaatgtttacctgtgtctattagaaagtaagcagggagatatgtcagttttgttcactgctgtattcatagagcttaaaacggtaaacagcactcaatatgtatttgtagaataaatggctaattgtgctgatggtgtttagggcacttatgcagacctacattcctggtttccattagtgtttgactttgggaagtcacagatgaatcctgctgttattgcttctaaattcctcatctcctaaaaatgacttctttgtcaaaaacaagctgcatttgtaggttctgttttcctcatgttgggcaatctggagtgatttctggctcttgtaagtatgtttgtggttgcagaggaaaatgaatatttctcacccaaatgttgtcatgtcatcatctctgtctggcaaccagagaagcagatgttctgttccttgacctcaggctagtggttacagttctgggtgttaaacatgtttcacaaaacagcacttgcacatgcggggctgctgttttcatttaacttcatgtagtctcagggctcagcaagctttaggaaaggtccggtttgggggcactggaagtgtgtgtgtgtgtgtacatatatatacacacacaaatagatccatacatttatgtatctagttggctagctattgcaaaacacatgtttattttgagatcatcaacacttctaaacatgacaaagagtagccctaagaacattgccaagaacaaattttctcctttccagaaagcaattttcagcagatgattttcagaaacaaaattcaaaaaagccatactgctgtatcctagcaaagataacttattcgtttattttttactcaaaaacatttattatatacactctgggctaggcacaatgcccagttttgaggatagaaggatgaagatagagtttggtattccagatagagcttgattgttgggcatgtctgatgtaaccccagtggagtgggcgagcctagaaccaccatgtattgagggagagggtggtggcctcagtgtcaggactcactagattcagactcctgggtgtcagaagtggggaggaaagggagatgctgagtgccagagggtactgtaaggagagcttgtgcagctgatggatcatgcatgatgcctgtgaacaattgtcctactagacctcacagtagttagggatgtctgcagtcatctcacagtagagcagtagctcagctttggagttttgtttcttgaatgtcttcttttttaaccgtacacgtgcttgagctcactctgataagcccattacatttgaatctcagagggcaaaggcagcatctccatacttgttgctgatgctccaccaggtttgaaaatcactaaagatagactgttaggctgggtgcggtggctcacatctgtaatctcagcactttgggaggccgaggtgggcagatcatctgagctcaggagttcgagaccagcctgaccaacatggtgaaaccccgtctctactaaaaatacaaaaattagccaggcgtggtggcgcgtacctgtaatcccagctactcaggaggctgaggcaggagaatcacttgaccccgggaggcagagggtgcagtgagctgagatggtgccactgcactccagcctgggtaacctaaaaaaaaaaaaaaaaaaaaaaaattagactttccaagggcagcgtggaagcagtgaccagcctgagtaggcacgcacacttcttggggatagcctcctccatagcattcttagaaggtttggtaatgaccagtttttctgagtaagaccctatctacattattctaattagtaaccacctttcatctgctaaggtaaattttcacttcagaatattcctcttaagaccatgcaataactcttactgtttgttggtggaaaaccatctcattattttactggttaagggtaaactgaagatgattagataacttccctcccttccttccttccttccttccttccttccttctctttcttccttccttccttccctccccccttcctcccttccttctgtttcttccttccttccttcctttctccctccctccctccctctctctttctttccttctctctttcttttctttctttttttctttctttctttcttttttctttcttccttccttcgttccttccttcctccctccctctctctctttctttctgttttctttctttctttctttctttctttctttctttctttctttctttctctctttcttttctttctttctttctctttctctttccctccttccttcctttctttctctctctctccttccttccttcctctttcttccttccttccttctttccttccttccttctttccttccttccttctttcttctttttttaaataagggtctacctgaagtgtgaactgatttgggaaatttgatcatgcagaacagtaaaattttctttatgtttgttgctagcaaaattgtgatggttttttaaaaaaatggctattgataataaggcatgcctaatgtagtgaaagtttgaaaatgtcccaatttctgattgacagaagaagaactggcaactcctccactagatggcatcattcttccaggagtgacaaggcggtgcattctggacctggcacatcagtgggtgggtgcctttgatatgaacaacttttgtaagcctgaaataaaaaataatcaaaataagcccagcctagtgttgaaataatatcctgtggttccaaccaatgttatctartctttaaattctaacgtgaatgaaaagtattcttctagaagggctttcttggcaagactattaaartaagtattgttgatagcaagggcagagagaaaccagtttagcaagatgtcatagtggagaagtattctagtagtagtctcagtctaccaggtatctcccaccaacttttgtctggttcatacytgatgtgcttccatccagacattccttaacttcccaagtctgtgttgcttccaaatggcaatgatacttcttcctttcctttatttataccagtgtaaccatgcttgccgtagaaatgaaataatttcaytgacatataaatgtttactaatataacattattggtttgactgccttctttttctctctgtcctacccccatcctccaaaattcatatacatgcctattttaaaatcagaacatgcaagcaaatgtaaagttgttttcagtagactttcaaattcgtgtgacacaggcaagcatattaaacaatttggtggaccgggtgcagtggttcatgcctataattctagcattttgggaggccaaggcaggaggatcacttaagcccaggaattcgagaccagcctgggcaacatagtgagaccccgaatctacaaaaaaatcaaaaacattagctgaacatggtggtacatgcctgtagtcccagctacttggaggggctgaggtgggaggatggcataagatctggaggtcaaggtcgcagtgagctatgatcaagccactgcactacagcctgaatacagggtgagaccatgtctctaaaagtaaattaaataaataaataaataaataaataaataaataaataaataaaataaaatttaaaaaggtttggttttggaaatgacgtaatgtattcaagacaaattattgaatgaattgggtgtctggtaaaggttcttggatggaacttttgacccaggtgttaaaatggtctccaaagaacatgaaaaggctttgagcttactgtggtcaaagagtactagtagtaataggacaaatgtttagaaacacacacgttatctaggagcataccagcatggtttctctggaaaagactttcaaaatagatgaaatgtgctataaataattctacaaaaccctgaagtagacaagacccaactgctacatgctggctggcgcattgggcatgacatttacaaaccgttggtataattttcaaacagcttgccctgtcctaaatatgtttgcaattggaaagatatttttgaagctcagtaatttttgttttattaaagaaaaatatcaaccaagtacagaaggttcgacgacaagttgcaagtggaaatactttcccacactaatgatttgctagcatgaaaaataggttattatggaggaaattttttcttgacttcatagctgtaatttattttaaaagctattttaaaacatgagacgtgaaatgccaagaggcatgtagggggtcaccactatttgccagataggggaaattgtccaaagataagtaagggtgagcagagcaaaaacaattctgcttatttacaaaagagttttcttttcttttctttttcaggacacagaactcagcttgttttcaattaatttgcctgattttctgcagttcatttacttttgaacaacataattgcaattgtagactgagagaaattgaaactttcaaagagccatatttctattgcagatatattttcctgctcttccaaatctacttacagcatgagttcttcttttaaatattcaaatattttgaatattgccaagagctttgatttccatttttatctcttgtgggtttataaattaagaaaaaatactcatcttatttttttaaacctctctatttttattgccctttattcaaataacttgttgacaaactttgaacttgaaccactgaggtaaaagaacaagaattaaacagatagtttaaacacatagcttaaaaggatctttttcccatttcctatccttgagcaaagaatatattcaaacactttggcagaagtcaatgakgttataccactaattccatgatgaaaatcaactgaatgtgatactgaaagagaaggaagagaattgtcactgtaaagtcaactgttagtcatattaggaaaaaaaatacatacaatacaatttctcaaataaagtccaaatatacattcaacgtttaaaaataatgagtatttcagatatttgaactcagtctgttctttattccataaaagatataggtaagccgtgcacagtggctcacaactataatcccagcactttggcactttgggaggctgaggtgggaggatcacatgagcccagcctgggcaacatagggagacccctatctttacaaaataaaatataaaatataaaacctagttgggcatggcagcatacacctgtagtcccaggtgctcaggagactgagacaggaggatcacttgggcctgggaggtcgaggctgcaatgagccaagattatgccactgcattccagcctgggtgacagggcaagaccctgtcttaaaaaaaaaaaaaaaagaaagagacaaacgtagaaagartaccaaatttggagccaatcagatcagacctgggttcaaattgagtttctgtcacttacttcctttgtggccctggagatgcccttcaacctccttgaaccttagtttcctcatctgtaaaatggggatgatagtactcacccttaaaattacagaacttggcataatagcgggtgcttgataaatggtagctataattattaatattatataatacattgttctcctttatggtaaagtaggttttaagacactgatttttttgttttgttttgtttttggagacagagtctcactccgtcacccaggctggactgcagtgacgtgatcttggttcactgcaacctctgcctcctgagttcaagcgattctcctgcctcagcctcctgagtagctgggattacaggcacccgccaccatgcctggctaatttttgtatttttagtagagacagggttttaccaggttggccaggctggtctcaaactcctgacctcaagtaatctgcctgcctcagcctccccaaatgcagagattacaggcatgagccaccgtgcccggcctaagacactgttaacacggagcatgcatcaagcagcatttgggatgcatcaattttgtgagactttatacaagttaacaaataagaaggcaaaaaagaaggcatatgttaaagtataccatgtgtcttgtggtgataatcttatattttatattctgataatctcatatataaatctgtgaccttgaagtaggttacttaacacctcgatgtgttcaccagtaagatggtgtgccacttccagctttcccttaaaggatgattgtgaccttgtctaagtgcaatcagaatgttaagcagaacagtaagtattgcaattgttttgcatgccttttcctttaaaatatacttgttattttttatattccatgcagggtgaatttaaggtgtcagagagatacctcaccatggatgacttgacaacagccctgraggggaacagagtgagagagatgtttrgctctggtacagcctgtgttgtttgcccagtttctgatatactgtacaaaggcgaggtaygacaagtatttcctcrtttcctatcatttccaatcacattaaattacatttaatttaagtgtatgaataaaattgtatctggacccagacccaagatgcaaaagttttgtcgttgttgttgtttttctttattttaaagagatggagtctcgctgtgttgcccaggctggagtgcagtggctattcactggtgtgatcatagctcactgcagcctcaaactcctgggctcacgcaatccttctgcttcagcctcctgagttgctgggattacaggagtgcgccaccgcaccatgctaggtcttttttkttgttgtttttgttttttaacttggcactacaaaaaaaataactgggacagtttatccagatgaaactgtattagcatatatctactatgtttccagtgatttcatgtaagcttaaacatggtgggaagttagttttgtccttggacacgtgtaagatctgtcttacctacatgtygggattggagctatgccgacagtcttctactcttctctcttccttcctaccagctcactagggaaggctctataggtagttacatttcagtttctggttaaccaaaagtacttccaaactactggattaggaatggcaaatagttatggaaaatgcattcgagtggtcaatcccttgawttttttttactattaatgctgttatcattaatagtaagtagaccactttacaagaattattcattggcaaacctggtgcatttactaaaatcttacaaaaggaatttgaggatttggttggaagaaatgttctcctcttagtaaattagtctgattttatatgtgccatacttttgttttcttgtcaaattgttttgcttttcactttataacaaagctccaatacttatgattaacattggyatctaactttataacttaaaggcatgtaagtattagtcttataatgtgaactggcttaagttattcatattatagcagatccttgaacaacacagggattaggggtgtcaacccccatgcagttgaaaaatccacatacaactttttttgtttgtttgtttttttaaacggggtctttctctgtcacctgtactggagtgcaggggcacaatctcggctcactgcaacctccgcctcccaagctcaagcgatcctcccacctcagtctcccaagtagctgggaccacaggtgtgcaccaccacacccagctaattttagyattttttgtagagacggggtttcaagatgtttcacaggctggtctcaaactcttgagttcaagtgattcacctgccttgacctcccaaagtgctggtattacaggcgtgagtcaccatgcccggcccacatgtaacttttgacttcccaaaaacttaactactagtagcctgctgttcaccggaagccttatcaacaacaaaaacagtcgattggcacatattttgtatgttatgtatgttatatatgtattcttacaataaagtaagttacgaaaatcatggggaagggaaaatatatttactattcattacatggaagtggatcatcataaaggtcttcatcctcattgtccatcatgttgagtaggctgaggaggaggaggaggaggagggattggtcttgctgttttaggagtggcagaggcagaagaaagtccacgtataagtgaacttgtgtagttcaaacccrtgttgttcaagtgtcaaccgtaaatgcaaactccactggttttcaaattttactttagagttattttccctcagctgattggagttttgctcaactcctctgactttaataatggctgcttcatttgttgaggttttagaacttgcttttaagggattgctcttgacataattgcatcaacagatagactgtttcatgggagaagaattgttctgtttcatgtcaatacttacattgataataatgcatcaaggtaatgtgatccatccactgaagttgtcattaggccagattttttttaagttgaattattatttcacttctagaaataagaagtttataaagtttagcataattttaatgatccaggcttaggaagcatttacagccaaaaagtaagtatatataattatcatattatactaaagggyataatatgaaaagtgtttgagagcacagactatctcctaaaatcaaactatcaaaacctgcaagccagcaaggcatgagtaggcatgactcagatacaaattagaagcatgaaatctctttcagccatgcatttaatcatgctatccaatattgtggaggtagtggcccctggaagtttaccttgggccagagataggtatagaagccccttttatgaagtcatagacttgctttaatttatgctcccagaatgacttgcattaaactgtggcaaaatatctttgmgttctcatattagccagagggttaatatgtagaagacaatcattcatccttacagattctcagaatcttggaagaggtarggttctttaagtttagccactattttaggtaactgtagctcctccttggttcttcaaatgatcctgaaggctggtatacaaaccagttatgccctaaaattaattggtaggtaggcaatgtataacctrtcattggctagtttttattcaaattttggatatgaaagtctttggcataaggtgctagcactcagagtcagtaggttttagtgctattccttaayttcagtggaattgccttagtatagcagaattgcttgagtgtcttatctgttatcaccatatacatgagtaccctcaaattatctcatttccctttcttttgtasacaatacacattccaactatggagaatggtcctaagctggcaagccgcatcttgagcaaattaactgatatccaggtaaagcttttcttttcttttcttttctttyctttycttttcttttttttatgtcaccttatttctgtcagagcttrcaactaaattatatttcaatgaagaggattaaataatacaatttgagatcaataagttaaatttaaggaagatattcccaacacaatgtgtgggcatgagcaaagcagaaatgggaaagaagatgtatgttttaaaaaaagaaagaaaatattgttcaggactccacattacttaacatwaaaaaatagatgtaatttttggtaacatttaaaaatctcattaagaaggataacataacttttgttaaaaaaaggaagaaaaaatttgaaagtagaagcaacttcaggaagaaaattacagtgcatgtgattccaacactgagatataatcactgttaattttttatgtctttttatttttgagctggagtttcactcttgttgcccaggctggagtacratggcacgatcttggctcactgcaacctctgcctcccgggttcaagcaattttcctacctcagcctccygagtagctgggattataggtgtgcgccaccatgcccagctaatttttgtgtttttagtagagatgggatttcaccatgttggccaggctggtcttgaactcctgacctaargtaatccacctgccttggcctcctaaattgttgggattacaggcatgaaccactgtgccctgccattttttgatgtcttaaccttcaatattttgtaagcatttatatactttatttatttatttacttatttatttttgagactaagtctcgctgtgtcacccaggctggagaacagtggcatgatctcagctcactacaacctccacctcctgggttcaagygattcttctgcctcagcctcccgagtagctgggattacaggtctcatgccaccgttcccggctaatttttgtatttttagtagagatgaggttttgccctgttggccaggctggtcttgaactcttgacctcaggtgatccacccgccttggcttcccaaagtgctgggattacagccgtgagccaccatgcccagccagtatacttttagatagttattttttcctaacaaaatgggatcataktgtacataattttgttacatgttttttcactgaataaatgctttgcttttttatatcaataagtagttttctccaacaccatttataaagtttaattgaattccattatrttgatgtaccataatttttttaaaaaattatattattgaacatttatgttgttggcaatttttttttcactagtatggacagtacatcctcgattacttcctaaggataaatctgggatcaaagagtatacacgtctattttttcatactgctaactttgttttgcctattttttttctgagcaataatctacagtaatgcctcatcaggcagttaagcaggcatgctaaataycagataacactgggctactcagaaaagagattatcctgtaatttgcaagcatttcacaagttagaagactttgttgaagccagttactatccttgtcaattagtaaaaatatccaagagggcctgagacttacattgaaragtaaaataaagtttgatcatttgagtgatgtcggatggcattaagtcatgaaactaagtgaaacttaaaggtggctgagaatgcaacaggcctccagagagcaatggaggtccttgggtagtgataaaaatggcatttctggctgggtgcagtggctcacacctataatcccaacactatgggaggccaagacaggaggatcgcttgaggccaggtgttcaagactagcctaggcaacatagtgagaaccttcctctaaaaaaagggaaataaaataaaaataaaagtttaaaagagagtttaaaaggcagttttaaaagagacttactcagcaagttttctgccaaatttacagtattaaaaagaaagaaagtgtgtttttgtttctgtttgtttttttgagacagagtcttactctgttgctcaggctggggtgcagtggtgcaatctcagctcactgcaacccctgcctcctgggttcaagtgattcttgtgcctcagcctcccacacagcagggattacgggcatgcaccatcatgcctggctaatttttgtatttttagtagagtcgaggtttcgccatgttggccaggctggtctcaaactcctagcctcaagtgatttgcccaccttagcctcccaaagtgctgagattacaggcatgagccaccgcaccctggccttgattgtggttttttaatcaatgagctgccatacttctgctctccagcaaaggttttctatgagaattttctgtaagctaagtaaaggaatatcttaatattggaagaaataaaatttagtcagagttgttttctacctttgtacacagcaacacttacaagtaatttgaagagtagctaataaaaatttctgcatggatggcttaggcattttaatttttttaaggttgcctgagtaaatctgaaaataataaattattacagttttgctcaaataaagaacacaaatagaacaaaaaatacataactggctagattacatgaaagcctttttccaaaacagaggtttagaggccagggcaaataggcaggaaaaataaataaagggcatccaaattggaaaagaagaagttaaattagctttcttagcagatgacattatcttacacctagaaaaacctaaagactccctcaaaaaacctgtagaactgataaatgaattcagtaaagttgcaggatataaaatcaacatataaaaatcagtagaatttatatatgctaacagtgaacaatctgaaaaagaaatcaagaaagcaatcccatttataatagccacaaaaagtataaaatacctaggaatcaatctaaccaaagacatgagagatctatacaaggaaaagtataaaactatgatttaaaaaattgaagaaaacacacaaaggtggaaagatattccatattcatggattggaagaattaattttgttaaaatgactatactacacaaagcaatttacagattcaatgcaatccctattaaaatactgatgactttcttcacagaaatagaaaaaacaatcctaaaatgtatatggagctaaaaagaccccaaatagccaaagcaatcttgagcaaaaagaacaaagttagaatcaccacactaccttacttcaaaatttattataaaactataataaccaaaacagcatagtacwgatataaaaacagacatagtagaccagtgggacagaatagagaacccagatrcctaagtccacatgtttacaaccaactcatctttgacaaaggtgccaagaactgtaacggggaagacagtcttttcaataaatggtkctgggaaaattggataattatatgcagaagaatgaaactagattcgcttctcttaccatacacagaaatcaaatgaaagtatattaatgacttgaatcttagacctgaaactatgaaattacttgaagaaaacattaaggaaatgcttcaggacattggtctaagcaaagatctcattctgtcactcaggctggagtgtagtggcatgaacctggctcattgtggcattgacctcctgggctcaagcaattctcccaccttggctttccatgtagctagaaccacaggtgcatgccaccacattccactaatttttaaattttttgtagagatggagtctcaccatcttgcccaggctggtctcgaactcctgaactcaagggatcctcctgtctcagcctcccaaagtgctgagattactagcataagccactgtccctggccagcgaagatttcttatgtaagacctgaaaaagcataggctatcaaagcaaaaataggcaattgggattatgtcaagctggaaagcttctccacagcaaagaaaacaatccacaaagggaatagattacccaaagaatggatgaaaatatttgcaaactatcaatctgacaagggattaataaccagagtctataaggagctcaaacaactgtataggaaaaatctagtaatctggttttaaaatgggcatgagacctgattagaaaactcaacagaaaaaaaaatttgattaaaaatggatwaaagatctgaatggacatttctcaaaagaagacagacaaatggccagaaggtacatgaaaaaatgcgcaacatcactaattatcagagaaatgcaaaacaaaaccacaatgtaaaatccacttgccctagttaaaatggcttgtattaaaamaaaaaaaaaaacaggcaataacagatgctgggaggatgtggagaaagggaaccatcatatattgttggttgaaatrtaaatagtacagccactatggagaacagtatggagggtcctccaaaaataaaagtagaactagaacttccgtgtgatccagcaattctaccaccgggtatatatccaaaagaaaaaaattagtatatcaaagagatatctgcactcccatgtttattgcaatagtattcacaatagccaagatatggaattaacctaaatgtctgtcaacagataaatggataaagagaatgtggcataaagatatatatatatatacacacacacacacacacacacacacaatgtggtactattcagccataaaaaagaatgaaatcctgtcatttgcagcaacatgtatggaactggaggccattttgttaagtgaaataagccagggaccgaaagacaaacatcacatgttctcatgcaggtgctaaaaaagtagatcctatgaagacagagagtagattagaggttaccagaggccgagaaggggagtgggaagtagaggataaaggaaaaaaacaagaatataaatgtatttattaccattaaactgaacatttaaaaattgtaaagatggtaaattatatatgtgtattttatcttaattaaaattttaaaaatcaggagtttagaaatttttaagagaagtgtgcccatagtgataagaaagaaagacccttttggaaaattttcttgaacaaattatacagtattttcttaaacaaattgtacattctgtagcagttaatacaccaaataagatttcagggttacctcttggagattgtatgaaataaaaacatttaggtgggcatgatggctcattcctgtaatcctaaaactttgggaggctgatgcaggaacaatacttgaggctagtacttcaagaccagcctaggcaacatagtaagacccagtctccacaaaacaaccaaaaaaattagcaagtgtggtggcacacacctgtagttccagctactcaggaggctgaggcaggaggaacacttgaggccaggaatgtgagactgcagtgggctatgattgtgccacagcactccactccagccttcactgtagaaagagaccctgtctcgaaaggaaggagggagggagggagggagggagggagggagggaatgaaggaaggaaggaaggaaggaaggaaggaaggaaatgtaaactcatttgatttggctgtaaaggattaatagaaaaggaaaacgtagtcactaggctgagaaaaattgaactctattgaattggtataaagatctaagtggrggtgtttggcagacatgatcatgaagctttcactgaggaaggaaactctaggaggcaaaagcagaaatgcaactcatcaaaattgaaatggtgacaaaatatgtgcattcaaacctgaaagtgactgaaagagaagcccaaacacrcaattttggggtaagatgggaaaccattaccaaagttctcagaaagagcatttttaaaagtaagattatagaagccaaaaggatatgtagtagtctgttctcacactgctgtaacgaactacctgagactgggtagtttgtaaagaaaagaggttttattgacgctcagttctgcaggccatacaggagacatggctggggaggcctcaggaaacttacagtcatggcggaaggcaaaggggaagccagtacatattacatggtgggaacaggaggaggagagkgagggtgggaggtgccactcactttttaaaacaaacagatctccttagaactcactcactatcatgagaacagcaagrgggaggtttgctcccatgatgcaattacctgacaccaggcccttcctccaacatgggggattacaattccacatgagatttgggtggggacacaaattcaaaccatatcagaatgttagtgactaaagtaaatgttcttgattaactctttaatgtgtatattgagtgcaagccatatgcaggggctattctaggtactggtggtttactcaagaaaaagggggcaaaaaaatgaagaaggtggccaggcatggtggcttacgcctgtaatcccaacactttgggacactgagacgtgagaattgcttgagcccaggagtttgagatcagcctggtaacatggcaaatccctgtctctacaaaaaaatgcaaacaaacaaacaaattaatcgggcatggtgtcacatgtctgtagtcccagctacaggttgaggtgggaagatgccttaagcctagggaggttgaggctgcagtcagccatgatagcaccactgcactccagcctgggcaacagagtgagaccccatctgaaaaaaaaagaagtcaaaacaaatgaaaaaaaaaaaaagtcaaaacaaatattcagtgtaaatgtgagaccatgtaaaaaagtttaaaagtaaaatatatagtttaagcagaggatgggagacggggaaaaaaccttttctccctaactttatatactccctctataaattagtgcttatggccaataagaaatgaataatttcttttttcaccgttggtagtaaagtataatggtagttaacacaaaaaactaaatgatatattcagaacctcatactaaacaaagaaacaaaggcatgcaatcacaggacaggtggaaacagtggttctgaactaaccacaaaccagaactaccaaatgtgctacaaattgtttagtaacaaaggaccatcccttcagaatygaagagcacgtctcagttatctcatgcctatgtgcatggaacttaaagtctcaaaattactcttacaagatggcaaattgaggctgtcagctaagctcctagattgtctgtttctccaagaaaaataaatttcagtaattattaaggaaaaagcatagaattgcatcatgttttacatttcattacttttggcatgacatgggagcatggatgttttctacaaagtgctctgataaattgaagaagaggccaacaacagccaccgaaaaaaccttcaagattcttgccagtatggctcaggggaaaaattccctcataaccacagatttgacttttcaacttctgtacttctgcatatgagtaataatctctgaggttaagtattcatcccatttagctaattgtccacataactccctgggtcttagattgctctataaatacctcctaagagaagaatttttcaaatgacagtttcgtttttcctttttcttcttttaaagcaacaaagaaaagcacgtctgtgtttatatttaaccaaacttaaacttggagagcattggccgtgttgtcgacgtgtttcttttctctactgttaaattccttactgttccagttactcaccatcatactcacctttgcctctgccacttggggtcctctgttctgcagttgtgttctgctctctgatgcctccaggttttgctgcaccttctagaaattgctcacctggataaggccttggctgtcctttatgactcatctcgttcagaagccttttgaatctctcttgaagaatattccctttgctcagtccaaatacacattcactcacttgaatgctgcttcttcctccagtttcacagtgctggggatgatcccgtaaggcctttaaattacattataattagtcatgcacttctctctgctctggggctgtttgaatcgttcactctytttatacctccagtgttcagcacagagcctagggtataatgcgtatgcagtaatgtttcttgaaggagtgaatgggcaagtgaaacaccaaacaaatactaaagagcaaaacatgtattgctcttgtatattaacacattccgagaagagatgggaggaaggtcttgaataatatcaaattatttcttaagagatcttgatttagatttttttcaaaatgagatacatgttgacactgctgtcaacaaataatcacataaaagctagagcctggcttttaagtatcagggggagcatgtgtgaataatcagcattgctgctgttgaagctccataaagtgggaagcagcgactgcaaagatccagagatggacatctgaagcataggaaaggggcagcttgaatgagataggagcaggatctgtattgattgcaggtcaccagatagaattaaaaaaatctatgttctcactagtggctacagttttcaaggacaaatgactattagtggttattgtatttttcttgttttcaatggagcagctccatgacttagttacataagaagttaaaggctccacccccttccctaccaatgtcttaagctgtcctccgtgtgcatacaaactttgtttccagactgccctcgtgtgactcagtccctggaccagcttcccagccccttctgtttccagcacatcctcctccacgtgttacaggattacaaagctttgcacagcctttcaatagggtttagagcaagaatgacagattgctacctggtaggcagcactgactatakttttattggcgttgcgtagagtgactgcatgacaygcaggttgtgcttttgttttgccaggaatttaaaggcatttagcaaaggccgtatgaaattatctgccttatgtacctcgaatgtgaggtaatgaacttgtcattagtcgtgttttagtttagtgttctcgctggaatttgcaaaagattaaaattctgcacatttcattaagtcttccacatgggctcaaaataccatcccgcaggctcgacctgacttgccacgttgctttgacaccatctctgattccagtgaacaaaactaagtaagtgtgacttacagccgccctaccaaacattgaaggtgtgagcctgcactgttgttttgtaatgacaatgacaagagtataatgacaagagtataatgacatcctagtccatgaagacatgttttctcttttccctccctctatgtatacttactcactcttaaggaaataatataatttctatttctgcttaaatctgccatctctacttagaattattttcccttgaaaaattaaattgcattatccatcagccaaatggaaaatctgattactaaatgcctacttctagacattatgaattacctgtaatatcacatttcttgggcacttctcagaatgctatgattttacataaaagcataaattacagaatgagaagagtaaagcttagtgcatattatgcaggttcgcagagtgatatgtggcctacgactgtcattgtaatcaaaattgatttttgatcatttataaaactaaaacaactaattgaaagcaaatttactttaactgatgaaattcaagatgaagtgacagtagtcatgaatcacagttctgtagatctgctaaaatgccaatgatctgttattaatggtgaaagtgtttaatatattaatgggaatccaagtaaggaaaataaaacacatattttgcccttaccttaagtcatgttgacatcatacataaatcaggtagaatttgaagatgtttcatccagcattcatcatgaagcaacagagtcaatagcgggcagttacagtctgtaggcaatgctttctggtgtggattatgcaaaaaacttacagtcatttggcttcctttattcccctttgcatgtaaactaccaggtggtaggtagacccattcttggctgccagtatttttaccacttggatagattctgctctctgaggtctttaagacaaacacagcacatgtacattgtgatataggagaaagaacatcagacagaggcagagaactgggcttgtcaaaattaagggtgacctagagccttagtgtccttatatgtaagatgagaagcttggattaaaattcattgctccttacacttgatttttatgcagcagaactttcttcaaaagagatcactcctggaatcccaatatacaaaatggataaaagtaggattgttctgaagtaaagaagtaaaatccagagccccacttatttgagtcatctcctaccttttagatggttattaacattgtttctagttcagaaattctggtgttttatattaatttaaactaaagttaaattaggactagaagagccatttcgtgtgaaaatagacatagtctgagtgatttaggcaaacccatagtgacagatttagtggcctgatacactggcttggaaagatctgttccaagtcagtctcaatacacaaggctcggtgaacacatggagagcagtcttggtggtggtcaagaacatggaatttgctgtgagagagagcttggttagggtctgggctcttccatctgttaactgcaaacttgagcaagttattcaatctccctaatattcagttttctcattcataaaatggattgataatggtaccttctatgtacagttactgtgggtattaaatgaggtaataagcctgtaaaactcctggcatgatgacattggcctacattaattgctcacagagtgagaacttattataaacacaggcatttttgttgaatgactgactgattgaatgaatgaatatagaactagctttctatttgtgatgtatggaatatctctatttcatttaatttcattttgaatattaaaattcaggcttgcttttaaaccaaagtatttgctgatgcaaagaatgaaattctgactatgatacagttacataacttttgaagaaataagaaaaatgctaacacagcatgaacaactttgatttagagaacagagtctctgttaaaatccatgggacttgtcaacttcatatttttgtttatgagcataaaacactctttagtgcatgtcrgaatcatttgatgcttgctgaatcacaggttgctggaacccatccccagattctgattcagtctgagatgaggtctgggaatttgcatttttaacttgttgtctggtgatgctgatgctagtggtctgagaatacactttgaggatcactttttcacagtaaaagtcacagtcattaagcaagttaactcaatgagaaatgataatgaaaaggcatgtacctaaatagataaaggacctataccagctatgaatttgagttcagcaataattgtaaaatttgtaattcttttcaggtatttggtttttaaaaaactccctatgtatgcttttatcttatgttttatatggtgtccctcttttcctctctttctctctaatccagtttttaatgtgaacatgtttaatgtgaaaatgttgttcaaagcagaagcgaaccttttgtgtaaccttggcggtattaagtttgtttgtaagctatttctgccctgttagcttctgtactgaaacacgttttcttgcttttgttgcagtatggaagagaagagagcgactggacaattgtgctatcctgaatggaaaatagaggatacaatggaaaatagaggataccaactgtatgctactgggacagactgttgcatttgaattgtgatagatttctttggctacctgtgcataatgtagtttgtagtatcaatgtgttacaagagtgattgtttcttcatgccagagaaaatgaattgcaatcatcaaatggtgtttcataacttggtagtagtaacttaccttaccttacctagaaaaayattaatgtaagccatataacatgggattttcctcaatgattttagtgcctccttttgtacttcactcagatactaaatagtagtttattctttaatataagttacattctgctcctcaamcaaatgcaattttttgtgtgtgtttgaaagctaatttgagaaaatttcataggttacatttcctgcagcctatctttatccacagaaagtgttttcttttttttaaatcaagacttttaaaactggatttcctcccatcactgttttttgaaggtcctccaagtccgtgttaaggtaaatatctgttttcttcctgatgtcacagcctgagcatactctgtgcattaggaagacctgagtgcatttcccaccattgtcctttccacattatgttgtagctggctggctgtcaggcgactacaagactgagggtcttgtgccttatagatctttgtatcccccatggctgacacatagtaggtactcagtaaatggttttataatgaatcagtgaacattttgcttctatagaagtgtaccttctttgtttctatattatgaaacctctttattagaatttgtgattgattctgacagtgtatagatttaccttatattgtctttattttccatgagctactaagtcattagagatactctgaagcatagttagtttaggaaatcacttcatattgattgtattagaattatcttggaattgaagatatatccctagagcaggggaccccaacccccaggccatgggccacacagcaggaagaggtgagtggtgggccattgaggagcttcatctgtatttatggctacttcccatcactcgaattaccacctgaactccacctcttgtcagctcagtggcagcattagattctcatagaagcacaaatcctattgtgaactctgcatgcaagggatctaggctatgcgctccttatgagaatctaatgcctgatgacctgaggtggaacagtttcatcctgaaaccacccttcaccctgcagtctgtggaaaaattgtcttccacaaaactggtccctggtgccaaaaatgttggggaccgctgctctagagagaggtcatgatatcataccaaccaaatggaaatgacaaatgttttatgtcaagtgttaattgcagaaataaatctttttttttttttttttggtagaaaacaaagaggcatactctgatttttatactctgtttttgcaggtgctcttttctttgaatggagatttgatgagcaagtggttaggatgcagggagagctactatgggtgatattttccttgtttaggagctgtgagttaaaattgtatcctttstggtttatctaaggaaagtcaaatcttgacagaaaacatttttccttggaaggtcaactctcagacattgtattttggtttccctcagtcctcataacktccttcttgctgaacatattttattctcttttcagagaaggaaaataaaaaggattctaaaagtttgatgcattggaaaaatttccttgaggcatttagcaacacatagaaaatgggctttgattcttttccaaaacttttagccatagggtcttttatagacagggatagtaaaatgaaaattgagaaatataagatgaaaaggaatgrtaaaaatatcttttagggggcttttaattggtgatctgaaatcttgggagaagctgttcttttcaggcctgaggtgctcttgactgtcgcctgcgcactgtgtaccccgagcaacattctaagggtgtgctttcgccttggctaactcctttgacctcattcttcatatagtagtctaggaaaaagttgcaggtaatttaaactgtctagtggtacatagtaactraatttctattcctatgagaaatgagaattatttatttgccatcaacacattttatactttgcatctccaaatttattgyggcgagacttgtccattgtgaaagttagagaacattatgtttgtatcatttctttcataaaacctcaagagcatttttaagcccttttcatcagacccagtgaaaactaaggatagatgtttaaaaactggaggtctcctgataaggagaacacaatccaccattgtcatttaagtaataagacaggaaattgaccttgacgctttcttgttaaatagatttaacaggaacatctgcacatcttttttccttgtgcactatttgtttaattgcagtggattaatacagcaagagtgccacattataactaggcaattatccattcttcaagacttagttattgtcacactaattgatcgtttaaggcataagatggtctagcattaggaacatgtgaagctaatctgctcaaaaagatcaacaaattaatattgttgctgatatttgcataattggctgcaattatttaatgtttaattgggttgatcaaatgagattcagcaattcacaagtgcattaatataaacagaactggtggcacttaaaatgataatgattaacttatattgcatgttctcttcctttcacttttttcagtktctacatttcagaccgagyttgtcagcttttttgaaaacacatcagtagaaaccaagattttaaaatgaagtgtcaagacraaggcaaaacctgagcagttcctaaaaagatttgctgttagaaattttctttgtggcagtcatytattaaggattcaactcgtgatacaccaaaagaagagttgacttcagagatgtgttccatgctctctagcacaggaatgaataaatttataacacctgctttagcctttgttttcaaaagcacaaaggaaaagtgaaagggaaagagaaacaagtgactgagaagtcttgttaaggaatcaggttttttctacctggtaaacattctctattcttttctcaaaagattgttgtaagaaaaaatgtaagacaaaaaaaaaaaaaaaaaaaaacagaggcagaggcaggcagtagcaagaaagcagagcgtaacatcagctagatggtaacatgcaatgtcagctctcttgaagacatgggaaacctaagttacaccttgggttaaaattcttcaccgtattagttttgttgcttcataaaatttacctaagcaagtggtcttgcttgcctcaaatccaagcagtcttgaacacttggaggcaattaatgagtatatcttagtcaaaagaattgttggagctttttattaaagctgcagtttcagttctgcttttggggaattgtgctatgaaagcagctgccaaaataagctcatttattttcttcaatcccactcagtgctcagtcactatattctgtttccttttttttttttcaagttgcatatttggtttccccttatgattgggaaagatgaattttcagcagaaaacagtgtttgttcactttcaaagagtgatagtttctaaaacatttagagcaataaatattcatcagaggtaccaagtaagccagcagaagagttaagggttagagaaatcccttatttcatgtcttgactctaaaatgatcaaagtacttttccttgtaatgtggatttcttcttatgcggatatgcaaaaacttcagttatacgtagtaatgctagcaggtaattttagtggacattttataacaactgtcactttgttttgccacatgtagagtttgttcagctattttccagatatctccccacaaaaggaggcaaagggtaccagcttttcaatgagcattacctattacttggcaaagatgatgaagactctattaatagttcatttgataaatgttgacataaccaacaatagagattaggaagttagttttaagaaatcaatagcatatagacattaccctcatggagtttgtattctactacttgaactgattgtagctataaaagcatagttagatagctgaatagttagatcataagcaaagaaggccagaacacatctcttatcaagaaatcaatgaatagtttatctcatttttaaagcaactttatccttctttaattccttcctttcttctagtgcaaaactacttaataaggttggtgtttaggttagtgttcacaccattcctcatctggtgtgaattaccttctctttctttactatttactaccaacctagtacatgtgttgactgaattcttttcaaacaatgttgagttatcatggtgcacctaataaattaacaccacagattacagcatccttgctgattttctcagcaaagccagattagatggaaataaacaaagaaaatgatcctagagtgaatttttctagaaaatatctattatgaaccatgctgtttaaagtattagcttgaaggtgatggatccagctattcagaaaataactttcatataaccatgattttgcacagtatgaggtcttaaatgtgtggaaagagataaattttttatcattaccacaaaccccttttaaagattcaaaggtggaagaaagtgatttattttttctcttcagcatacatatataaaagacttgtcagatgtttaatttggggaggttgataatgaaacatatcaacagagtatagtagttatagtagtgtttgtgggtaaataatttcctggggtcagacatatataaacatatttgcttcaaaatgataaaggcatgaaatcagtcttaaaaattgaaatgggggtgatgggggagaaaaagaagaacaaatttgaagtgccctttcaaatctgctggatacaagtattgaagttttaagtcatcttattctgtctgaaagtgtatttttcattctacaatagacccaatcaacaagacgtataacttgagttgcatgatgttcagtttatgtaatctactgttgggatggtaagaattgatgtaggctgtggtgtaagaatgaattaaaatatagtttcactggcttttctctacatatccactatcacaatggctaggtttcctgttgctcactattggattctggagaaaaatttaatgaaagatgatatcagaggaagaataagtggaggtagagaagaaaggagtgatagaggaggggaaaaaaacaaaacatatttttgtgttatccaaaggagctttttccttattctgtcaagcattgagatcttcttcagctttcaatgtagttgctaaatacaaataatgctactaggtagtgactaaatatagcaaacacttcatcagatattagaattaggtcacactattgaggttataatctgaaggttgtgttacatagaaaccactttagattattatcaacttggactaggctttattttataatagcatagtaagtaatatctattgtgtcatttcttcaaccattttattctaagatccatgaagcttcttgaggccaaataaaataataagtttagacaagaagtagattgtgactttttttcccttagagatactatttactatctcctatcctgataggtggaaggtttactgaattggaaattggttgactattagtttttaactaaaatgtgcaataacacattgcagtttcctcaaactagtttcctatgatcattaaactcattctcagggttaagaaaggaatgtaaatttctgcctcaatttgtacttcatcaataagtttttgaagagtgcagatttttagtcaggtcttaaaaataaactcacaaatctggatgcatttctaaattctgcaaatgtttcctggggtgacttaacaaggaataatcccacaatatacctagctacctaatacatggagctggggctcaacccactgtttttaaggatttgcgcttacttgtggctgaggaaaaataagtagttcgaggaagtagtttttaaatgtgagcttatagatagaaacagaatatcaacttaattatgaaattgttagaacctgttctcttgtatctgaatctgattgcaattactattgtactgatagactccagccattgcaagtctcagatatcttagctgtgtagtgattcttgaaattctttttaagaaaaattgagtagaaagaaataaaccctttgtaaatgaggcttggcttttgtgaaagatcatccgcaggctatgttaaaaggattttagctcactaaaagtgtaataatggaaatgtggaaaatatcgtaggtaaargaaactacctcatgctctgaaggttttgtagaagcacaattaaacatctaaaatggctttgttacaccagagccatctggtgtgaagaactctatatttgtatgttgagagggcatggaataattgtattttgctggcaatagacacattctttattatttgcagattcctcatcaaatctgtaattatgcacagtttctgttatcaataaaacaaaagaatcctgtttgtgtggtttcatgaaatcagcattgttgaatgcatgaagtaataatgctaaattaacatttttatgatgtgtcaaggtttctggtcaagggaagtaaatgtaggatagtatttttacaccaaaatgacacagagagaattgagcacaccagaaagaccagaaaccacaccactggatagagattcaatatgtttctttttcaaacatttggacaagaaaaaaatgggcatttaaaaattcttccttcccctggttatggatttatctgtagtaaaacttagctttgtcgtttgagatttgcacagaatggggggagtagattacctcttcccattcattgtcataatggatctacatcactgataaacaccatacttctatatgtggttaactagctttagaataaaagacactttaaaaagtaaaaggcctagagatcttcaatgaagtgtcccttttagccaaaccaggccttgcagaaattgtcctcaaaagcaccaagggagaacaaagccaagtgcagaattacccaagggtcacacattttgtattcattttcttataatttgcccaaatgatttgaagtacagcaaaacctgaagttttgcaaagagttactgtaaactgaacttaaaaatgtcagagtgctcggtgacccacttctccagaccctgtcaacctgtgaaaatattggcctttattcagatctctcaagaagttacgtgcagagtttggaaggtctaggcaaaggttattagtcaagtgttcttacagtgtcaacgctcaactcccacaagcgtgagaargagagacctgtcattcctgagggtgatgacatacatttactggagcttatataatttatcagataagacagcagtctccttcagggtagaaagtgtgttttctacattgatttagtacaaaacaaaaagaaaaggggatatttcaaattttataattatttttctgctaagctgattcagtgtgatttaagcatatttttcaaatcatgaatctgattccatatacatatgtgccttatattgtgataatttatttttaagtgaaatatgctatcatagcctgactttatgtatagtggtgacaacttgcaggatcgcatttctgtaaccaaacggccgacagctgaggtgtagatgcttcctatggtctgtagaataatcactgggcttgttctctagctatgtctgtatgcaatcgcgacagtgttgatcaaaacccatgatcattctctccaaaggtctttgtcactaagccactagggattctgaaaagttcgtgagctgaaacaaataaattgagttggaagattcatgttgactgtttgtatcccaaatgcaatataccagtttttgaagctgaactgattacattaaaaagggatcaagctgcatttgttttaaagatagttacatgaccaaaagttgctcaacatcattggtcattagatatgtgcaatcaaacctgcaatgagatatcacttcaccccagttaaaatggcctatatccaaaatgcaggtaataacaaatgctggtaagggtgcagagaaaagggaaccctcttacactgttgttgggaatgtaaattcatacaaccactatggagaacagtttggaggttcctcagaaaactaaacattgaggtatgatatgatccagcaatcccactgctaggtatgcatccaaaagaaaggaactcattacatcaaaaagatatctgcaattctatttttgttacagcactgtttacaatagctatgatttggaagcaacctaagtgtccatcaatagatgaatggatgaagaaaatgtggtacatgtacacaatggagtactattcagccagaaaaaagaatgagatcctgtcatttgcaacaacttgaatggaactggaggtcattatgctaagtgaaataagccaggcacagaaagacaaactttgcatgttctcacttatttgtgggatctaaaagaactattgaactcatggagatagagcgtagaatggttacaagaggctgggaagggtaatgttggtggggaggacagaggaagtgggaatggttaatgagtacaaaaaaatagaatgaataagacctcctatttgatatcacaacaaagttactatagtcaataataacctaattgtacattttgaaataacttagagaataattggattatttgtaactcaaaggataaacacatgaggggatgcataccccattctccacgaagtgcttatttcacatttcatgcctgtgtcaaaacatctcatgtaccccataaatatatacacctactatgtacccacagaaattaaaaatataaaaaagatagttacataatctagtaaacacttctcat

SEQ ID NO: 93203 - DNA, 178029 bp, Homo sapiens
  misc_feature (1)...(178029): n = A,T,C or G
gtgttggggacaaaatggtgactgagatgaacaagattcctgccctcatggagcttatgttccagtagaggagaccaaaaaaaaaaaagagtaaacaaatgaatttaaaaatagcaaactgtcatgagtattaatggaagaaactcacgcaattaaaattggagtttaaactaagcctctgagagagtgttgattttgcattccaaaacaggtactggactcttgctaattaaagtaaggtacacggaaacagaacatcaacatcatcctagaacttgttagaaatgcagaatctggggctccatcccagaccttccaggtaattcatatgcacatgaaagattgagaagcattatagtaaaaccatatttttagttttcatatagaattatcagtagcatgcccaccaatttgaaattaccccattttccttaaaaggaaaagcctctttcctcttcttctgggttggtgctaggcctcccagaggagcaaatcatgactgatggggagaagaaggcaacacagcttcaaagacctgccccaaatccatcaaaaacagtaagtttgctgggagatttgaatgtttctgttaaaggaataatttgcaattccatcctgagtgggaattctcaagactggatgaaagaagatagagttagaggattcatcccaaaccatgggcatgttggagacaaagatgagcaggttgtacttggcgatgggtttgagaaaggatgtgatttgggagattcttggtggtaagggggttccctgtttcaggtttaggatccctccatcccaacttgaaaaggatgagaagctagtggcagaagagggagaagagggggcattgggtagagctggctctattttttggtcctgggcctaaagcaagagttgatttccctgaactaaggctactaatagcaccactgtaccttgacaagagaaaatgagtgagagagaatgtgggagcagtcagatatcaagtcaagatatcacctgatgagaggcccatgtgaagactgatatgcaggaatttccttatgggaaagtggctgcaaaaaaagagatgggcattggcctgaggaaaaccacccctactggggaagtgtattttaaattgtgggcctgctggaagctctcaaagtgctttagcaaacagggcatctatctttcaaactccacctgggaaatccctctacagccatgtccctacctgatagctcccaaaccagtggctctcaaagtgaggttcccagcagcatcagcatcactggagaagttgttaaaaaagcaaaatctctgctcctcccgcaagacctacagaattagaaagtctgagggtggggcccagccacctgtgctttaacaagccctccagatgattcaaatgtatgttcaagtttggcctaaactatgcagaaaatgtctttttttcttcagtggaggacaagtgtctcatgagcgtggaaatattgttaaatttgagaaattaatacttgaaaccgaagagcaaaaggcataaaagttgcacagtttatagagcaattagaaacatcaaagttgctgaatgatggttgtaatgggaatatagagggatttttgaaagtgaattttgggaaagtaaaaatacaccatctgcagatgtaggataattattccctatgtggtragggcactaagaaaatgtmctgtgaagtagcagaagtgctttaatcatgcaayaaggtggaatctggtgctgcataaacttgccctgatgagcaatattaaatgcctcccattcctctcttgattgtatttgatgctgtccttaggggagtgtaagactggaccagtatctacagatctagtgggatgagagtgatttctcagtagaattcataataataaatgatttctgttttctgagctagcagcttctccatcatcctaactgccgrcccttcactctgtatccaggctggattaattcccagagaatggagtcattttcctgatgggaactcttagcactgattggaaggaggagattagygggcttttcatttttgtcctgatgcaatttgaaaatctcatcaattcaaaggtatcctggagacactgtttctcaattcttgtttcatgtttctcaacctgtatttaacccttggatccaattctttcttctttgtcattctctttcaatgaatatgcattggtatatgttaacttaacacctactgtgtgcaatgcacagtgctagatgacttcacaaacctacattttcatcctatcttctttaacatttgaaaaagaataaactgtaaaatatctttctgctcactcctttaccactatttttcctggtgttggctttgcctcattatgttgcttttcaagtgaagaatttgggattccccatactttaagccatttgcaaaaaagcagattattattagaaagcacagagaacacacaaatatcctttcattgtgggattacagccttaacctatgactttcctggattcatggtttctgttagttatttttctatcgaggacgaggggtgggagtgagttctgcaaaataacagataactgcttccactctttttttttttctttttctttttgagacagagtcttgctctgtcacccaggctggagtgcaatggcgtgatctcggctcgctgcaacctctgcctcccaggttcaagtgattctcctacctcagcctcctgagtagctgggattacaggcacacaccaccacgcccagctaattttactatttttagtagagacagggtttcaccatcttggccaggctggtcttgaactcctgacctcatgatctgccttccttggcctcccaaagtgctgggattacaggcgtgagccaccgtgcccggcctgcttccactctttattgtgctactttgcagagggcaaaatatacctcatatacttgtggaagaaacactgggcccttcagtccttgcagatatagattgtagccaccaggactctggtcagctgtctttcatcaaggcacctgagccacaggggcaataaaaaatggcacgccttaaaaaaaaaaaaaaaaaaaaaagggcacttctccaagctgtgatggcagagatgtccatactgtaaacttaaggagactatgcctaccacctgagaaacagggtgcataaattcccacattcatattttattaaatatagacggaccattgaaacctatgtcaaacagaaactgagattgtagtagttttcaaaaattgggaagcagaatatctgtatctacaaatacagcttctttttagcatcaccagaatcatttcataaaggaatctttaagaggtaggtaatgatatgaacattatttatagagaattcaggacaggaggttgtatgattgtttgagaagacgtacttgctctccaatcgtagtctgcaaattcctagccatctgtatttgtatttctctctcttttttttttttggagacagagtcttgctctgttgcccaggatggagtgcagtggcacgatctgggctcactgcagcctccgcctcccaggttcaagtgattctcttgccttagtctcccaagtagctgggattacaggcacgcaccaccacactcagctaagtttttgtatttttagtagagacgaggtttcaccatgttggccaggctggtctcaaactcctgacctcaagtgatctgcccgccttggcctcccaaaatgctgggattaccagtgtgagccaccatgcctggcctgtattcctctttaacaaggtaacaccatgtctttccttcttcaagttaataggtccttgagaattcatttctgggagtgggttaagtggttctgcagtatacaggttggatacagatactggagtcaggtttacctggttagaatccccttcgcctctgtttttgcagctgtgcgacctcagcaaattgttaccttctctgagctttagtttacccatatgttactgtaggattacatgtgataatacatgtaaagactttagcacatcacctggccaaagggcccaattagtattagatacgatttatattcgttatcaattaaattcctaaaggaattttaattgaatttgtttcacccatttttcttttttgtgcttaatctaatagaacagtttttgtttggggatgctgcatttctccctccccatttcttttcatcactcacctcagccccagaaaaagtgatcctgaaacaactgtggaaatgaagtctgctttgtgttcgtctgttgggaaaagattggatcaccagtcatgctgtggktgtttagcaggctgctggcttctgcccacaataaagaggcatctctgaaggttctgatatttttaaaaagagaagcaaaagggcagttagtggatctcaagggttcgtatgaacgacacatttccctgcccccacaatccctagggctgcctctctttccagggcttcaagttggcccagggtatctggctttctatacttcttgtttttctgggtcatgaactggcagggagcatgcagcactgtgcccttagcattcaggtgtttcacaagcacactgcttctctcttgccctcattagagtcagctgtctccagcatacagagaaggacgtgcagagcctctgtatgcatgtagcatggtgcacctggagaggtgacagaagggcagggcctcctcctaggagccagctccagtagcaatatgtaaatgacttcttggaattgccaggctggtcctggtgagtctggaagatcaccttgctagtgggcccaatgccaacctgacagatggcctgggctgcttgcagcacaaccaggtttaggccatcaagtgtgttccctgaaggcaggtgacccatccaggagtgtcagggaggctgtccagggggacaactaaggctgcaatgtaatttccccagctctgcctacctcctcttccccgcaacttgcagtgctctctaggaagagggaaaaaccagggcttgctttcacccttaaagaaaactctgggtcacataatttttgttgatgtccagtctgttttctacatgacagcccctcacagaagtgaccaaatgtttccatcaaaggaaccagctactgtaaagtttaaaaggataataaaatagtaatgtctatttggggccctagtttagaaaaaccctgtgatctctataaagtattaagaaaatattgaactttcaaattttatgatttcatgtcctctaagaccacagacctcttggcattatttttcttttgttcttttttttttaagcatgaatcttttttttaataagagttagaaagtaaacataaaacattttctctcacttacattcatagtttttaaaagcctagggaaagttaatgtttctgaattcagcctgtggatttgagataaggattcaaggagagaaggcttttaactcagaacagaatctgtttgcagctattgttcaattaatgtaaagtatctggttactgggcatgttgcataatgcatcacagtgcaagccaaacgttttcagtgctgacaacgagctccttgataacaatgaagagtgaggtaatttgttaaatttttttggaagtcccctataacagtcttctcaagactgaatgaatcaacactttccagctcagaccgcaactgagctgtgtgtctgtgtgtgcgcatgatgataagaaatctagaaggaaactgggaaamccacatctcatgccctgtttaagaactagaaaaagtgtcagaagaattaaaattaagcctcacgagagtctgtgggtatggaaagtcaccagctagctaatattaacatagcttgcaacagaacactgttgctagaaataggacagtcgcatcactaccactaagcaatttgcattctgtggaccagcccctgaattcctattgccctttgggcattgcatttctggacgcttctagacagtgttcatacttggctgtctggtttcaccaggaactctacccaaaagaggaaacagcaaggagaacatttgctttgtttgtaggagggaagtkgtcgagctacaaacaaatctttaggcatctgaggaattgctaagtttctaatttcatatggttgctgacaaggaggtgcagacaaggaccctcttgctttcctcactatggatagtctgttgcctccatctagattctcttatttcaaaaaatatcctctccatgcaattaggagatatttatcgacgctgagaaaccaaagagccgaagaacaggtatcattttgtttatattatctttaaaatgaacgggtgcttgttccttgttgcttttacgtcgcttagtgatttcatttgtgctggtttacatgtttataggtacaggtcagatcctgcttgtggctgttcagacttggcaatcagaaagcaagcaggcttgtgagaatttatttaaacttggaacattcagatcctgagattaagcggagttctgtaatgaagccacatgctttctttcttctaaagagctactctatcaaagttaaattttgaattctttgatcattttccaatgcctcagatacaaaatttgacactattaatatctcaacaaagaaagtatcagaccctagaagtacacttgtcttcttgtatttatggttatgtttacatagccagaatttgcaaaacaaaaaacattttataaactataataaccttaaacagatcattaacaagctataaagatcattcagaagcagttggtcatttttgtgtgtgtaaaaggtaggaggtagagcactgccatattcagtctttttagccaatcaaaagctatgatttccagcaggagacactatcacttgggaatataagcatttttaaaactgttaaaatgtctgatcacatctcatttaaaatcatgcagtcatttttatggtgtgagatttatatcattccatttctttgatctccaaaaaagacatttctaaaaatgatttttatgaattttaccaaattgttagaagaagtagcaatatctgatccatttaaatctagtgattcatttaggaagaagtgtggcggtggtatacaaatgtgaaggacaaatgtatagccataccaaagacccagcagtcataaattgcttgtgcattgtgcttgtaactagaactgcaaaactatgcaggagatatcaccagtgtcctgtatttttttctcctttgtgatatgagatgacccacttaataaaacacttccaggaaatgcaagataggtttagcagacagaaaatcctctcatgacaggtttcccaaaaaggcaatgcataatttggaaaataaaaatcattgctactgtttgagaggaaactgcttgtatgccctgctttaataattttacaagggccagaaattcaaacagactctgttcactaagggagctaggctggtccagtttatcttacttaggcaaggtgtcaccattaaaagaccaacttttggtttccaagtttcagcctgcacttgcttttgatgtagaaagctagagaaccaagtggtagggctgtataagtttttgtttgccaatcttttaatgttcacrggcttcttcaggcctcatttattatggaaggaagagaggtggctgaaaggatgggaacacaactgtggaatgtgaattgagtgattttttttttctcagtattgtaagttttcagagatgtggctatattgcttgtgtagttctatggttctttgtttttagtttattgaagaagtattacaaaatgcattcagaagaccattagaatttaacataaaacctctgacttggacagggtgggtagtcccttccccagtgtacaaccatttgggacaacctaggaacagctgggagtgagtattatgctgagttcttaaattcttatataagtgaattgaataattaagagaaataatatatttgatttctttttaaagccaactacagctctgcagacctaatgtctcacagaattagagaaattaggtcagagttcatcataactaaccttgaaagcttgttgggaagttataaaggaggttaataatgtctacaatcttatgacctgcatatttgttgcctctaatccttacattcttgtataactaatccttgatataaaagtgaagggattgagacttagagcccttaagagcccttgcccatgcagctagaaagtaccagaggaagatgtgaatttctatctcatggctttaaattttattcattttaccacgcttgatccctgaacaatctagtaatagcaaaatatcaccctgctaacttttctccttgagagatttctaaaatttcctatattcacatagcactgtcataatttttactgtttaccacatctgtatgattaattcctcaatatttttctgtatttrtacttaaatcacattattagagtttatttagaaaaaaagttcatatcatgactgtaaatggaaaaccattgtcattagccgtaagtaaaaataattaataaaagcaaaacagtattaaattctaggtagatactattgcctgtaaaacctccaagcctgaaacctgctcatttgttaataaggaagattagcttttaagagaaaggttagagcatcctaggagccaactgagaaagtttcctgggtgaggatggaaaggaattaaaaggtagataatgtttttcaatccaaaatgattcagtgttattgaatgtagtgtctgcatgccacttaaaatcttctcccacctcacttagcgctgctaagtaccaaccatgttgacttccacatacttggggaatattataacagaacaccatctgcttctttacttttgcacattyaaatgaactcccccctctagcctagaattctctcctttacttacaacttgccctcctggaggtctcctgtacatccttcaatacttggattaaatgggctcagtgaaaagctttctccagtgctgctgggaagaatgaagtcttccttttccaagatattttgtttgcttcagacacagcccttactacattctatgtagtaaatcatgtgatttcatgtcgatattcgtgcacccatgcacacatgacactggatgttatcttgttctttgttccctgaggcatactggagcctggcagatactggtgtaaaggtgacccacacaacaggcagagggtacacactggattgactgtgacacagacctcctttgttgtttttactaggcctagaagttccccataccccttttctgtggtccaaattatgatcattgttacactcaccttgttcacatatgctttattgtttaaaacttctcctagtgctcttctcgcacttggtgtcatacagacaagaagatgaagatttgacatgagggttgatttgtttggtagctttttctggtggtggtagtgttattcctgtgatacagccatcaataggttggtaggttatttatcaaattgagaacaaatatttcatcctttgcttccctagattctcttgcagcaagtgtttcacaaagccaaatccccacatatgtagaagattaacagcattaatgagatgaagatgctgaaggttgggaaaatttgttaacctttctctcagaattattcaaatggtgtggtagtaacagtggtggtggtgaacgttgggcagcctgagcctaaatggagtctcagatgagtttgagtaggtgtgctgaacgcacgcataagggtgtttggtttcggttattttattttggtctgagggcaacatccagcacctggctcagatgttggtgtctagtttataaggaatgagtgagacttgcaggcaatgttcccctaagtactagagactcagcagcctgatctgtggctcaggtgatcaagcgggacactgagtgtggaagggagaatttgctccacttctgggctgactrtagtctagctttagcctggagatgcctgccaagaaccaaatacctcatgaacccctggggagtactgctcttaggggccagcacccctgggctacatatgggtgctagcaccaaacaatgagaagacagtttgtcagctcatgtgggacagtctactctctctccttgggtgagttcttctattcccatggtttcaaacacctatttgctgaaaactcccaaatgtttatacccagagcacttcagccttgcatccaatcatctacttgatatctccatctgaatgtcttgtgaatgttgcagactgaatgtgtccaaagagaaytccacaagctccaaacatgctcctccccaggtttttccatcaatcaacacaaaagctcaaaccagaaacctgggagtcaccttggcacctctctttttccctttctcccccttacgtccccttcctaatcctttagtaagacttctaaaatagttattgaattctccatcttcacccttctaatcctgccaaccatcttttcttacttgaactattgcaatagttttccaattcgtgtctccatgttcactctggttatcctacaatctgtgtctcctgtagcagtcagaattttctgctttaaatgaaaatcttattttagctcaatgcggggaatatgatattattttgtttgctagtttagtcccagtgctaagcataaatctggcacatagatgataaattaatgtaattgaatggaaaaaggggactttgtaagtattagagaagccgtggggttggagggttcacggggctgaggtgtttttatgcaggtgagggtaagagatggtgaaaatagggttattatccttagtaagcagaggctgttgagatctaggggaaatcatgtagaggaatttattttacagacgtgaaactagtgtcacaaactaagagatttgcccaagctcgcatggctcatctgtgtcagtgctgggattagaatttggttcgcttgactctcattctgttatgtatagtgaacccctaagcagagatgtagaaaaaggccatatgagaaaaaaactctacaggatgggtccagagaataggtgatgcctgagggtcaacttgtcaacttgtcaataacaaataagacgttttgatgagagactgaggcagagcagagcctgctcttttttgccttgtccctcaacttacactgcccttcagcagcctcgccagtctgaatccccacttctatgtgtccctgcaggaggaaagccgagaaggagtcagaaaacacaggccagctaatttaatctacaagaatttgggatgacctgtaccaatgtctcgctctcttgaacagagattttttttttcctgattgagaaataccattcaagggctgatctgacaagtcttgcctgtttaacagtgaatctgcttaaaatgaggagagtggtctttgggcccagggggcatgtactgtagctacattttaattacagagtagaatcaaattttgttttggaagctgttctaaagtttcctttcaatggcttaagaaaatgtttctagttggaacgggatcactggaattttttttctttgctgctctgtttcttaatgaatgctaacctcaaagttgcactgttaaataaatatttgaatttaatttgaattttagaaacttatttctgcattttggctctcatacttactctgaatgatactataaaaattaagaactccccattccaaagaaaactatattgagatttccaaggctaaataaggatttgaggttgctgatgtaggctctgattctctaggtaaaatgatagacgtttcactacaacttgatttaagaaatgtttttagctccataaagtcagtaagttggttatatcttgagtgtataccaaagctattcattgtaaaaagtctttttgaaaagtcatgaaatgctatccattgtcagttcaaatgatatttgaggggaaactaaaagtgcttctccatgtccccttagccccatgcttatgatctttcattggcttccatttgctttttggatacagacaaagctccctaatgtggaggggtttgtgtggtccagctctgattctctccctgctgcatgttgaccttgccccctgtgcttgtgcttgagtagaaaaaatttcagtccttcacaaacaggaggaaaagattttccttgtagaacttaataaatgttatctcatttatacctagtgttccattattggaacaataagcatgtgggagttatttacatcctactgctcaaggccatcgccaaggtctgattgcaaaaattcaaaaaattgtaactttgggcacaaatgggttaagatagaggacagagagtctatgccactcctgtggaggaatttgtataattatatataggtaacattgacagttaaattgtgacaacatgaagttgaactttaatatttctgattattaaatgtgacattaaaagtggaactattttattatggtaatgacaaccttttcctctatctgaagggagaaattttttaaatgagctatgtatttaccaaaaaataaaaagctaccaatggtttttcacattatctacaagatgcctgagagttatcattgatagcttgcataaagataaatggctttctagttgtcagcaaccaccctcatggtctttctctctcccaaatatgtcttcactatctaagaaaatatcaccatcctgatatttaggcagaggcctaggttcatctttggtgctttctgctcccttagtcaatatttaatctatcaccaactccattcaattctacccctaaaaaactcccaaaccggttggtctacttccctctttcaccaccctagcccaaagaccgtcattacttcttgcctgaaatactgtaataccttcctcattggtctcccagtaatccacactacagtcagagaggtcttctgaacactaccacctagccccatgcttatgatctttcactggcttccatttgctttttggatacagacaaagctccctaatgtggaggggtttgtatggtccagctctgattctctccctgctgcatgttgaccttgcccctctgtgttagttagggttctctaaagggacagaactagaggatatttgcatatatgatggggagtttattaggagaattgactcacatgagtcacacgatcacaaggtgaaawcccacaataggccgtttgcaagctgaggatcaaggaagtcagtctgagtctcaaaacctcaaaagtagggaagctgactgtgcagccttcagtctgtagccaaaggcctgagagcccctggtaaatcactggtgttaagtccaagagtccaaaagctgaagaacttggagtccgatgttccagtgcaggaagcatccagcatgggagaaagatgaaggccggaagactcagccagtttcctcatgccactttcttctgcctgctttattctagctgtgctggcagctgattagatggcgcccacccagattgagggtgggtctgcctctccctgtccactgactcaaatgttaatcccctttggcaataccctcatagacacatccaggaacaatactttgcatccttcaatccaatcaagttgacactcaatattaaccatcacaccccctgttctctgaaccctagctatagcacacttcttctatgtatgcaagtttccctgctacttcctggctagggcatctgttccaataatcatctttctatcctccctcagttagtatctactcttccttcagattttaattcaatattaactcctttagagcagccttttctgacttttccaccttgcttcattacatcctttgaaggcacttggtaactgtcctttgctgtatttatcctagyagcaatttcgcatctttctgtgggggctatttgattcccgatgtatyccaggtgactagcaaagtgcctgacagatggaaggcactgaatacaagtttgtggaattagtgaatgtggggagtaggggtgcaatgaattctatcttgagactgaagtacttgaaataatcctggatgttagactttgtgaggaagatacatgactgcttttgtatatgtgtttgtgtatgtgttttgtaagaatcttagggctgtagtaccagaatggctgagtgattaaggtattggacttaagaatcatagggctaattcatgaagaaagataggtatgcatttgggaggttccrgaggaaataaccatgaccaatgggtagaattgcagggagggattatgatatactaataaagatgaactttctaaaaatgaaaggtaaagaaatgaattatcttctgcagagtgcgggggtatgtgacccctccttaggggatgttgtggcaatggtttctgcatcataaaagagaagactgaatgacttattaggttccagctctgatattctagtatamtaggcaatagagagatgaacaattcagatattttagaaataaggagagggcagagggcatagatgtgtagttaggattcccgttttatttggttagtggtaaatactccatagtcttagcatgttgctctagagtctaagaccaaagaagacagaatcaaatgcctttsgtgattagagtagcatgtaattctccgtcaaggtaaaaaacaaaagttacatctagcaaagacctcaagtgaagagctatgtacctgtgactagcttttctaagcctaatcgaccacttaactacttctaatccatagtttgtaagttatctaaccccttccagtataacgataaatagctaaatatacatagcagtcattgataaatgggggtgccaagaaatttcaggttattttgtggcactttaaccactgttgttttttcttcttcttcaatcaagcctcttttaccttcagattttcttcaatgcagtcagtgctggcaacttgccgtttattatggtcccttctgaaggtgttccatccttcttgtccacagcatcacagcagtgaagtgtcagacaagcctaagagacacctggaccctgggttgatttctgagctatttttaatcccttcatttactttaaaatttttctaacctactgtgctctggtgcctttgaaacatgggagtcagtaaatggatgaatatcaaaactgttgctttgtctttgaaataagcacattattagaataagaaattgaattagaaatcacaacaaattacaaattcgaatgacaaatatcacaagcatcaaaaaaatctagaaaataagtgtttttaccaattaaaagttaacagatccatcctaaaatattttgttcctacattgtgggggccacagggtctttaatcacctcctcataaagtgatggtttttaaatactctgtgaagagatagtagaaagataatttggatactgccctaatacagttaatgtatgattatttttcattaaaacaaacataaagtgcaaaacccttttctgtgacagtgtagcttttttaaagattcctaaatttgctatcccattccatgttttagacagttcatctacacttygttagcttttgttcagaatgaaagatgacatatttttgcaccttgtacagacagtcccatgtcttgacagaaaacaaaatgaaaatacccacatatgttgtactgctcatgatttgctgtgaagagagcaggaaaaatgttggaattatttctttcctactcaccctaaaggtggcatattagtaaggctatttcaggagatacaacttaggttatgcattcaagaataaaatattttaaatttgtattaaatgccttatatgtgtcaggcacttgacaaggtgctttacgtatgttgtaatttatttctcataataaccttgcaaagtcagtggtattatccccattttgtgggtgagagaactgaggtttcaagaggtaaagtaacttgctacatagctcataaatgatgactctgagattttagctccaggtttgtctgtttgacctcaaagcccaattcattccctcatacagagatacctcccatagataggattcctttctctccttcttcccttcactccttcctttcttactttttccttccttttttccttgacctcagattttctctcatttatgaggataaaggagttgaaaataaaaccatcataactattgtgtttggaagataccttaaatcttttttagaatgagaaatataggtggaaatacaggtttttgcaaagtttaaagtttattcaatttgggagactttgtttaagaaaaagaatataaaatctgtatcaggtttctcgacatggtgcggtggctcacgcctgtattcccaacactttgagaggctgaggtgggtggatcagttgaggtcaggagttcaaaaccagcctgacaacatggtgaaaccctgtctctactaaaaatacaaaaattagccaggcttggtggcatgcacctgtagtcctagttactcgggaggctgaggcaggaggatcacttgaacctgagaggcagaggttgcagtgagccgagatcacgccactgcactccagcctgggtaacagagtgagaccttatctcaaaagtctgtatcagggttctctaggaggtgaggtatttattatgggaatcggctcatgcaattatggaggcagagaaatcccataatctgctgtctataagcttgagaacccrgaaagacagcaatgtaatttattcagagtcagaaggcgtaagaactgggagcactaatgtctgaaggcaggagaagatcaatgttccagttcagagaaagcaaattcacccttcctctgccttttggtcctatttgggttctcaatggattggatgaggaacgttcatactgatgagggtgaatcttctttactcagtccactaatgcaaatgctaatctcttcccccaaacaccttacagacacacccagatataatgtgtttttttatttttatttatttatttattttaccagctatctgaccatcccttagcccagtaaaattgagacataaaattaacatcacaaaattgtcaacattaaagtagatacgaagtgaatacttatttagaatggaagaagaaatcacaacaaattacaaatctgagtgacaaataccataggcatcacaaaatctaggaaataagtgtttttaccaattaaaaattaatgaatacaccctaaatgttttgttcctacaatgtgggggccacaggatctttaatgacctcctaacacaatgatgatttattttgattttgattttttaattaaaaaaattttttttgagatggagtttcgctctgtcgcccaggctgaagtgcagtggcgccatcttggctcactgcaagctccacctcctgggttcatgtcattctcctgcctcagcctcccgagtagctgggactacaggcgcctgccaccatgcctggctaattttttttttttttttgtatttttagtagagacggagtttcaccgtgttagccaggatggtctcagtctcctgacctcgtgatccctactccttggcctcccaaagtgctgggattataggcatgagccactgtgcccggcctttatttttatttattatacttacttattcactttatttatttatttatttatttatttatttatttatttatttttagtaagagacagggtttcagcatgttggccagcgtggtcccgaactcctggcttcaggtgacctgcctgcctcggcctcccaaagtgctgaaattatgggtgtgagccaccgcacttggctgattttttaaatattctataaagagataatagaaagataattcagatactcccctgacatagttaattgtttttcattagagtctagaaaagttccatcgcctagcttttggctctgtttctcctttactacccacatacttcaggtgctgagcaccataggacatatttatatgaagatttcagcccagtgatttagtacaggtagtagggatattcctgtatgtcatttctccaccaaaacatttagcaataacttaaccatgcacaggcatgactacaaaccacaattatataatccactaaatccaaatgaaatctaagggtatccccatctcaactttctttgagccagatccaagacatacctatggccacttcagtgctacctgataggagtagaattgtgaaggagggatagccagtaaaaagagtgctctcaagccaattgcagttaaaatatattttgcaaatttttaacgaaacataagattatgagaacaatgctagagtctttctcggggccttaaagagggttctgcaagtgagggaccttgaagcttaagctttgttggcttccaagaaaacccagctctggaggaaaggtgtaaccaaaaaaaatggtattacactataatacacaagagtccatgccatatagcgcttcaaaaaatgatgttatatgagatcctattctgagcagcttcagctcccaaactcattgaatgaagtagaggatgttctattcagtatattttataaataatatgttgaagatatagatgttctggtactgctaaaactcaaaggtctcagactcctctgccaccatttatattcaaaaaagaattatttgcaaagggattctttgcaaatacaaatagatctctatactcctatattagtctaattaatattaaacacaccatttactattcttccaagcaraccagttaacacacacacacacagagaaagactgtgttattgctgtttaagatcacatagtggaaaaactaaaacatcactaaagaaagataaagtctttaagaattcattaagatgtaatcaagcttttgcaaactcatgtgttatttgcaattatagtatagtgatatggtttagctgtgttcacacccaaatctcaattaaactgtatctcctagaattcctaggtgttgtgggagggacccagggggaggtaattgaatcatgggggctggtctttcccatgctattctcattatagtgaataagtctcatgagatctgatgggtttatcaggggtttctgcttttgcttcttcctcattttctcttgctgctgccatgtaagaagtgccttttgccttccgccatgattccaaggtctccctagtcatgtggaaatgtaagtccaattaaacctcttttgcttcccagtctcgggcatatctttatcagcagcatgaaaacagactaatatagtaaattggtaccagtagagtggggtgttgctgaaaagatacccgaaaatgtggaagtgactttggaactgggaaacaggcagaggttggaacagtttggagggttcagaagaagacaggaaaatttgggaaagtttggaacttcctaaagacttgttgaatggctttgtccaaaatgctgatagtgatatggacaataaggtccaggctgagatggtctcagatggagatgaggaacttgttgagaaccggagtgaaggtgactcttgttatgttttagcaaagagagtggcagcattttgcctctgccctagagatttgtggaactttgaacttaagaaagatgatttagggtatctgacagaaaaaatttctaagctgcaaacattcaagaggtgacttcatcactgttaaagacattcagttttataagggaagcagagcataaaagtttggaaaacttgcagcctgactatgtgatagaaaaggaaaacccattttctgggaagaaattcaagttggctgcaggaattttcataagtagcaaggagcctaatgataatccccaagaccatggggaaagtatctccaggccatttcagagaccttcacagcagcccctcccatcacaggcctggaggcctgtggtttcgtgggctgggcccagggtccctgtgctgtgtgcagcctagggacttggtgccctgtgttccagccatggctgaaaggggccaatgtacagctcaggctatggcttcagagggtggaagcccgaagccttggcagcttccacgtgttgttgagcctgtgaatgcactgaagtcaagaattgaggtttgggaacctccacctagatttcagaagatgtatggaaacacctggatgcccaggaaaatgtttgctgcaggggtggggtcctcatggagaacttctgccagagcagtgtggaagggaaatgtggagtcagagcccccatacagagtccctactggggcactgcctagtggagctgtgagaagagggccaccatcctccagaccccagaatggtagatccaccgacagcttgcaccgtgctcctagaaaagccgyagacactcaacgtcagcccatgaaagcagcaaggagggaggctgtaccctgcaaagccacaggggtggagctgcctaagaccatgggcacccaatcttgcatcagcatgacctggatgtgagacctggagtcaaaggagatcattctggagctttaaaaattgactgccctactgaatttttggacttgtatgggcctcgtaacccctttgttttggccaatttcttccatttggaatggccacatttacccaatacctgtacctccattgtatctaggaagtaactagtttgctattgatttacaggctcataggcggaagggacttgcctttctctcaggtgaaactttgaactgtggacttttgggttaatgctgaaatggcttaagactttgggggactgttgggagggcatgattggttttgaaatgttaggagatgatatttggagggcccaggagcagaataatatggtttgacwgtgtccccacccaaatttcaacttgacttctatcttccagaattcccatgtgttgtgggatggacccaagtggaggtaattgaatcataggggccagtcttcccggagctattctcatgataatgaataagtctcacaaggtctgatgggtttatcaggggtttctgcttttgcttcttcctcattttctgttgctgccaccatgtaagaagtgcctttcacttcccgccatgtttctgaggcctccccagccatgtggaactgtaagtccaattaaacctcttttttatcccagtcttggggatgtctttcagcagcatcaaaacagactaatatacatagtttctgaaacttgtctgatactctagataaagatcatctttatgttgattkaaaaattttttaactttgtttaatccccataatcatatattgaccttttttgctgaattttgctcattgagaatgtattgaaatgtctacttttttcatatatatcctattcttagctgaaactctagaatcctccttttttgattatatatgcataattatccttaaatgtaagcagtgcttacaattctgttctgtaccattactatattacccaagtttacaacttaactagaccatggcttataagtcatctaaaaataaataaagcaaattatagaagtattttagccttaaataatgaagacataagtttgtttcaagtgattaaatagtgagaattgtgtaaagccatttcactagcgtcaaaaaactccttttgctctgtccccaacataaaatttgtgtgtaatatacttgaaatttttagagcctctgaaatgttatccaacttattttctttaaggataaaattatttgtttgagaaacccagtttcaagaaaatggcattttatccttactttgtgaagcttccctactcctcttctttcatctaactggtgctgctaaagcctgatacacctagtcaaagaagcattgttccaaaggtcctgacctggaataagaaaacaaaaactggcttcatagctaggatgacaactgtagctccattatcactgaattgctaactttgttcttattctctcaaactgtggttttgccaatgtgatactcaattacctaagaggggagaagtatgatttctttatgattttaatactctttcctctcatattttaaaatagctggttttaggccaataagtgtctactcaaagaaattcaaatccttatataatttaagaatgctggaggaggtttaaatattcatgtacggtcatacttccattttattccacttcacttatatatacatagcacttaacaggtaattgtgttttttataaattgaaggtttctggcaaccttgcattgaggaagttcattggcactatttttccaaaatcatgtattcacttcatgtctctgtgtcacattttagtaattcttgcaatgtttcaaactttcccattattattatatctgttatgatgacctgtggtaatttttgatgttactattgtaattgttgtggggtgccctgaatcatgcccgcattagacagaaaacttaatggataaatgtgtgtgctgacttctccactgaccagtgatttccccagctctcttctccttgggccttcctatttcttgggacacaatagtactgaaagtagtccaataataaccctacaatggcctgtaaatgttccagtgaaagaaagagtcatacattcctctctttaaatcaaaaaatagaaatgattgtccctctccctctccctctccctctccctctccctctccctcacggtctccctctgatgccgagccaaagctggatggtactgctgccatctcggctcactgcaacctccctgcctgattctcctgcctcagcctgccgagtgccgccacgcctgactggttttcgtttttttttggtggagacggggtttcgctgtgttggccgggctggtctccagctcctaaccgcgagtgatccgccagcctcggcctcccgaggtgccgggattgcagacggagtcycrttcactcagtgctcaatggtgcccaggctggagtgcagtggcgtgatcttggctcgctacaacctccacctcccagccgcctgccttggcctcccaaagagccgagattgcagcctctgcccggccgccaccccgtctgggaagtgaggagcgtctctgcttggccacccatcgtctgggatatgaggagccccctctgcctggctgcccagtctggaaagtgaggagcgtctctgcccggccgccatcccatctaggaagcgaggagcgcctcttccccgccgccatcacatctaggaagtgaggagcgtctctgcccggccgcccatcgtctgagatgtggggagcacctctgccctgccgccctgtctgggatgtgaggagcgtctctgcccggccgctccgtctgagaagtgaggaaaccctctgcctggcaaccgccccgtctgagaagtgaggagcccctccgtccggcaaccaccccgtctgggaagtgaggagcgtctccgcccggcagccaccccgtcccggagggaggtgggggggstcagccccccgcccggccagccgccccggccgggaggtgaggggctcctctgcccggccgcccctactgggaagtgaggacccctctgcccggccagccgccccatccgggagggaggtgggggggtcagccccccgcccggccagctgccctgtccgggaggtgaggggctcctctgcctggccgcccctactgggaagtgaggagcccctctgcccggccagtcgccccgtccaggagggaggtgggggggtcagcccccggcctggccagccgcccagtccgggagggaggtggggggtcagccgcccgcctggccagccgccccgtccgggaggtgaggggcgcctctgcccggccgcccctactgggaagtgaggagcccctctgcccggccagccgccccgcccgggagggaggtggggggtcagccccccgcctggccagccgccccgtccgggaggtgaggggcgcctctgcccggccgcccctactgggaagtgaggacccctctgcccggccagycgccccgtccgggagggaggtgggggggwcagccccccgcccggccagccgccctatccaggaggtgaggggcgcctctgcccggccgcccctactgggaagtgaggagcccctctgcctggccagccgccccgtccgggagagtggtgggggggtcagccccccgcccggccagccgccccatccgggaggtgaggggcgcttctgccccgccgcccctactgggaagtgaggagcccctctgcccggccaccaccccgtctgggaggtgtgcccagcggctcattggggatgggccatgatgacaatggcggttttgtggaatagaaaggcgggaagggtggggaaaaaattgagaaatcgcatggttgccgggtctgtatggatagaagtagacatgggagacttttcattttgttctgtactaagaaaaattcttctgccttgggatcctgttgatctgtgaccttatccccaaccctgtgctctctgaaacatgtgctgtgtccactcagggttaaatggattaagggcggtgcaagatgtgctttgttaaacagatgcttgaaggcagcatgctcgttaagagtcatcaccactccctaatcttaagtacccagggacacaaacactgcggaaggccgcagggtcctctgcctaggaaaatcagagacctttgttcacttgtttatctgctgaccttccctccactattgtcctatgaccctgccaaatccccctctgcgagaaacacccaagaatgatcaataaaaaataaaaaaaaaaaaaaaaaaaaaaaaaaaaagaaatgattaagcttaatgaggaagcatgttgaaagctgaggtaggctgaaagctaggcctcatgcatcagttagccaagttgtcaatacaaaggaaaattcttgaaggaaattaaaagtgctactccagtgaacacacaaatgataagaaagctaaacagtatttttgctratgtgcaggaagtttgagcggtctggatacaagaccaaaccaggcataccattcctttaggccaaagtctaattcagagtargtctctaactctcttgaattctgtgaaggttgagagaggagggttagctgcagaagaaaagtttgaatatagcagaggttggttcttgaggtttaaggaaagaagcaatctccataacataaaagtacaaggtgaagcagcaaggagtgatggagaagtggcagcaagtaatccagaagacctagctaagatcattgatgaaggtggctatactaaataatagattttcaatgtggataaaaagccacaggctgactttcttgtttggaaccagtacagctgttgactttaagttgaagccaatgatgatttatcattctgaaaattctaggtccctaaagaatgatgctaaatctactttgcttgtgctctatcartggaacaacagagcctgtaggacagcagatccatttatagcatggcttactgaatattttaagcccactgttgagacctcaaaaaaaaaaatagattcctttcaaaatattactgctcttcacagtgcagctagtcacccaagagctctgacatgaggtaaaaggagaataatgttttcatgtctgctgtctgttctgcagtccatggatcaaggaagaattttaactttcaagtcttattatttaagaaacacatttcataaggctatagctaccatagatagtgattcctctgatggatctgggcaaagtaaactgaaaactttccagagaggattcaccattctaggtgtcactaaaaacatttgtgattcatgaaaggaggacaaagtgtcaacattaacaggagtttagaagaagttgattccaaccctcatggatgactttgagggattcaagacttcagtggaggaagtaagtacagatgtggtagaaagggcaagataactagaagtggatcctgaagatgttactgaattgctgcaatttcatgataaacgttgaacagatgaggaattgcttcctcataagaaaacacagaaaatgttttcttatgatagaacctattgctgggtagatatgctgtgaacattgttgaaatgatgacaaaggatttagagtattttataaactgaggtgataaagcagtggcagggtttgagaggactgactccaattttgaaagaggttctactatgctactaaacagcatcagacaatacagagaaatcatttgtgcaaggaagagtcaattgatgcaccaaactttattattgttttattttaggaaattgccaccgccacttcaactttcagcaaccaccgccctgatcagtcaatagccattaacgtcaaggcragatcccctaccagccaaaatattatgactcattgatggttcagatgatcattaacattctttagcaataaagtattttttaactaaggtatatacatttttttagacttgctattgaatacttaatagactacaatacagtgtaaacataaattttgtatgcactgggaaaccaaaaaatttgtgtgactttctgtattgtgatatttgctttattgtggtggtctcaaaccaagctcacaatatctctgagttatccctgtacattcttattcactcttagaattgagtactattggcatgatcaaaatatttttagatgaaagcttaatgcttcttgtaaacagtgctgaaactttagcatgcattggaatcacctaaaggactaattaaaacagaatgctgggccccacctccagagtttctaatacagtaggactgaggtggggcccaagagtctgcatttctaaaaaaattccaggtgggagggaccacactttcagaaccactgttgcagatcatttgatgatgtatatttccaaaatcaaagctgacagggcttgtcatacctactcaagaatagcatgtatgctgcttagaagatggtaagtcattgtcaaagccagagggatactaatgatgacttagagtttcacaggttcttaattgaccattttcattcaccttggctgatgcctagtgttacttaatgcttagtaagaaatctttaggccaggggcggtggctcacccctataatcccaaactttgggaggcagaggccggcggatcagctgaagtaaggagttccagaccagcctggccaatgtggtgaaaccccatctctattaaaaagtacaaaaattagccaggcgtgctggcgcgtgcctataacccctgttactctggaggctggggctggagaattgcttgaacctgggaggcagaggttgcagtgagcggagatcatgccactgcattccagcctgggcaacaggagtgaaactctgtctcaaaaaaaaaaaaaaaaaaatctttaagcaatgtcttggccctaagaatataatctaaaatatgttcttatgtttatatcatcttcgatagctgattaaagtgatgtagcaactgagaatttcaattgttgatttaaatcatggaatatacaaaaagatataatccttgttaggtcctgcatactttctaaagccattatgaggtcttaattaaaagaaacaaagaataaaaccctcattttttccctagcccttactctgcttattgtttaaacataattataaagactctgaataacaaaaatttaactggaaagatgaaatcagtattcttaatactacttagtggcttttaggtttaggacatatgtttaatatgtattctgttgatttttcaatagatcatgttaattaacatgtctcaattacctattgaataatgtctctaaaatgcctatctgtgattattattcatgagattacactcccattttaccagtactatgcctatctgtgattattattcatgagactacactcccatttgaggagtacttttcttttcttttttttttttttaaagatggggtcttactctgtcacccaagctggagtgcagtggcacgaaatcggctcactgcaacctccgcctcctgggttcaagcgattctcctgccttagcctcccgagtagctgtgattacgggcacctaccaccacacctggctaatttttgtatatttagtagagacggagtttcaccattttggccaggctagtcttgaactcctgaccttgtgatctacctgcctyggcctcccaaagtgctgggattacaggtgtgagccacygcgcccagcttgagcagtacttttcaactctgagaagataaacccaagggattctagaagagggtctgcttggagaataatttctccagtaatggtatctgaaggttgaataaaaacaagtgaatagatgtagatattgactaagagtgactaagaaagacarttaccttattaattaatacaatcttgagtgtcatcaaattagctatggggcatatatcctacactcagaaattaggcactattaaagttaaagggggccacactgaattgaaagaggcaagaatttaacaaacaaaatgataaactacaaaaggtaactaaataaacagagcagcttcttatatattctccaataaggcattgtggaaacattgagggatggagggatacccaagccaagatgggtattagactgctaactttgacattaaacactgagaaattcttgagcagggagcttcctttgtatgagtctcatcttcatcacctttaagaagcaattaatgaaatctagtctgcttacttcgcaatgttttgagcattaaatttaattatatacaaatatgtacttttggtgtctgttcagtgagaattgattctcacttccctaaaagtaatttaaacgttttaatcaaatgtgtaatgttgacatctttacctttccaagtacttttgtacttttccagggttaaaataacatttttgtcatttaaatgaggaaaaaatataagttttttaaaaactcaaatgtcatagctttttaactgttctaattgtgtctgctaatagaaacaagttgatgtgcaaaccacaaaataataaatatttttgcctagcttttgggaaaaagaaaagactatagtatactttaagtaagtgtaaatttagtttcattttagcaattccatagtcgaatctgtcactaagtaatcattagttaaagaaaaaaaatctagccaggcaccgtggctcacccctgtaatcccagcactttgaaaggctgaggtgggcagatcacaaggtcaggagttctagaccagcctgaccaacatggtgaaaccccgtctctactaaaaatacaaaaattagcccggcatggtggcgggtgcctgtaatcccagctactcagaaggctgaggcaggagaatcgcttgaacccaggaggcagaggttgcagtgagctgagattacaccactgcactcctgcctgggtgacagaacgagactctgtctcaaaaaaaaaaaagaaaaaaagaaaaagaaaagataagaaaaaaatctagtgcccagggcatgcaactatataagtaaaaattctaaaagatcatcaatgtttaagaataaaatacagtcagttatataattttaaaatatttctaatgagtgataaggaaaacttgtcaatggaatttctgaagtcaatagccaatttttaactttatctgctaatatggcaattatttaacttaaaaaacagacacacttcttattcagtttttggacatcttattctgtaacttcctattgattaacatcgcctttaacattttaagtacttgtcgtaacattttatcatttgaataattcatattgtattatactcttcacttttataggaacaatcatcaaccaacattttaacctattaatctaaactaaattttttcctctcatttaatctatcaattaagattcttctgattgtatgtaacagaaaatgtagttcatttattatctcacattagaggaagtctagtggtagggcaggccccagagttggtttatttgttagcttaattatgtattaaaggacttggcttcttcgagtcactactttgccattcttagtattgtcttttctcaggggaagggtagaaggagggataaaaaggtggctgctgtacttccaagcattcagaatcattgaaaagtcttgctaaatcagactgctgcatctaatccccagaatttgattcagtaggactcgccggagtgtgagaatttgcatttctaataaattcccaggtgatgctgatgctgctcatagtaaagccacactgagaaatattaacttagactaatgatcttggaaacgaatggattttttcttttctttttagttcacatgtaatagttgtayttatttatgcaacacagaatgatattttgatacatctgtactatgtgtaatcatcaagtaagggcaattagcatatccctcacctcaaaaatttatgatttctttttgttgggaacattccaaatcctctcttccagttttttaaaaatatgcagtaaattgttgttaactatactcatcccacagtgctataaaacactgtaatgtatttctcctatctagctgtaattttgtatccattaaccaacctctccctattcctcccctccaactacatttaccagcctctagtaaccactattctactatttacttctatgagttcaacttttgagctcatgtatgggtgtgaacatgtgttatttatctttttgtgccttatttatttcacttaacataacatcctccaggttcatccatgttgccatgaatgacaggacttaattcttatttataactgaatcgttttctattgtgtatatataccacattttctctatccagtcatctgttgatggacttgtagtttgattccattatcttggctattgtggataatgctacaataaacatgggggtgtagatacctcttcaatatactgatttgcttttctttggataggtacccggtagtgctgaatcacatgatagttctatttttagttttttgaggaacctccatactgttttccataacggctgtacaaatttacaatcacactaatactgtatgagtttcccttcttctgtatcctcactggcatttgttagtttttgtctttttgacaatagtcattctaacaagtgtgaggtgatatctcatcgtggttttgatttgcatttctctgatgattagtgatgtcgagtgttttttttttttatgtacttgttggccatttgctttgagaagtgtctttagatcatttgcccatttttaaatcaaaatatttgagttttttttggagttattttttgagctgttggtttttttcagttccttgtatatcctggatattttgtcaggtaaatagtttgcaaatatttatttccattctacaggttgtctcttcattttgttgatgatactctttgttgtgcagaggcttttagtttgatatagtaccacttgtctatttttatttttgttccctgtactcttgaagtcttacccataaaattttttcctagaccaatgtccagaagcattttccctgttttcttctagtagttttagggctttgtgtcttacatttaattatttaatccatattgggttcatttttatatatgctgagagttaggggtctaatttaattcttctttaatatgaatatccagttttcccaacaccatttattgaaaaggatgttctttcactagtgtatgttcttgtcttcttttctgaaaattagttggctgtaaatagttggattcatttctaggtcctctattctgttctatttgtccttgtttctgtttttatcttgctgttttggtcactaaaattttgtagtgtattttgaagccagatacagtgatgcatccaggtttgttctttttgcttaggattgctttggttcctcaggatcttttgtgtttccacatgaattttaagactgttttttctatttctatgaagaatgtcgttggtattttaattggaaatgcattgaatctgtagcttgagtaatatggtcattttaacaatactaattctttcaattcatgagcataggatgtctttccattgtttttgtgtcctctactatttgtttcatcagcattttatagttttcattgtagaggtctttcacctccttggttaaatttattactaggggttttttgtagctagtataaatggaattgctttcttgatttctttttattgttgttgttattggcatacagaaatgctactgatttttgtatgttgattttgtttcctacaagtttactgaatttgtttattcgttctaaaagtactttggtggagtatttaggtttttctgtatataagatcatgttatctgcaaacagggacaatttgacttcctgtttttgaatttggatgctgtttatttatttctcttgcctaatctattttgtctgatataagtatagctactcctatatacttttggttttcatttgtgtggaatacatttttccattccttcactcacagtctttgtctgtttttaaaggtgacaagagtttcttgtaggcagcataaagttgggttttgtttttgcttattcattcagccagtctttatctttcaattggggggatttaaaatgtttaaaagaaactaccatcagagtgaacaggcaacctacagaatgggagaaaatttttacaatctacccatctgacaaagggctaatatccagaatctaccaaggacttaaacaaatttacaagaaaaaatcaaacaaccccatcaaagagtgggcaaaggatatgaacagacacttctcaaaagaagacatttatgcagccgacagacccatgaaaaaatgctcatcatcactggacatcagagaaatgcaaatcaaaaccacaatgagataccatctcacaccagttagaacgggatcattaaaaagttaggaaacaacaggtgctggagaggatgtggagaaacaggaacacttttacactgttggtgggactgtaaactagttcaaccattgtggaagtcagtgtggcgattcctcagggatctagaactagaaatatcatttgacctagccatcccattactgggtatatatccaaaggattataaatcatgctgctgtaaagacacatgcacgtgtatgtttattgcggcactattcacaatagcaaagacttggaaccaacccaaatgtccaacagtgatagactggattaagaaaatgtggcacatrtacaccatggaatattatgtagccataaaaaaggatgagctcatgtcctttgtagggacatggatgaagctggacaccatcattctgagcaaactatcacaaggacacaaaaccaaacactgcatgttctcactcatgggtgggaattgaacaatgagaacacttggacacagagtggggaacatcacacactggggcctgtcgtggggtggggggaggggggagggatagcattaggagatatacttaatgtaaatgacgagttaatgggtgcagcacaccaagatggcacatgtatacatatgtaacaaacctgcaggttttgcacatgtaccctagaacttaaagtataataaaaaaatcataaaatgtttagccctaaggttgctattaataaatgagaatttacttctgtcattttgttaattgttttyggaatgttttgtgtaccctttgtttctttttgtttttctttgcagtttaatgattttctgtagtgataatgtttagttcctttttctgtcttatttttgtatctgttctaccagtgaattttacactattgtgtgttttcttgatggtaaatatgacattgtcctttagcttccaaatgtgggactttcttaagcattttttggaggggtattgatgagtttcctgtttttggtttctggaaaatactttatttctccttcatttctgaaagttagctttgctgggtatagtattcttgcctgacaatttctttctttcagcactttgaatatattatcccattctctcctggcctataaggtttctgctgagaaatatgctattattctgatggggattcctttagatatgacttgatgcttatctcttgctgttttcagaattctttcttcaacttttggcaatgtaactataatgcatttcaaatagaacctttttgtgttgaatttatttggagatctttgagcttccagtatctggatgtctatatcactcctaaaatttgggaatttttcagctattattttattaaattacatttctttctgttgggaccattcaacatacactttctagctatttgaaactatataagtattgtttatttcatacattgggttcttcagttttaatatatatatattttttgacagagtctcactctgttgcccaggctggatgcaatggcacaatcttggcttactgctacctctgcctcctgggtcccagttcaagcaattctccttcctcagcctcctgagtagctgggattacaggcacatgccaccatgcacagctaatttttgtatttttattttttaatagaggcagcgtttctccatgttggccaggctagtcttgaactcctgacctcrtgatccacctgcctcagcctcccaaagtgctgggattacaggtgtgaatcaccatgcctggctgatatttctgtttttttctctttttttaatgaaatgtacctctgttgaatttttcattcagatcctgaattgttttcttgattttattgtattgtttatctgtatttgtttgcatttcactgagttttctgaagataattattttgaatttcttttcaagcatttcatgcatttccttttttggtattctgctactgaagaattaccgttgttttttggtgctgttatatttccttgctttttcatgttattttgtttctctatgttaatatctgtgcatctggtgtaaccgttgttttcttccaattttatacagtatctttcatagaaaaagactttttcctatagatgtattcataatgtaagttgggtagagtgctttggctttcattctgggtgggtgcgatagtacagtctctgtataatttctttggctgtcatcaacatcagtggtgtctgcaagttcctcagtggcttagattgcagttgtctgtgggaaagctgtgctggatggggatgccaggtgagatgatccttgggcccctgggcagcacatgggtgcatgatgacctcatcgctggaatgggctgggttgctggcagaagtgatagtgaaccctcatgtggtctggtcctttaacccctatttggtgtggtggtggcagcaggtacctaggaggagtgcaaaggtgttcatggtggctgggaatggatgtttgaggattacttatgacattcattaaaagatatactataattatcatttggaaaattacagagttccctttactcacctcaaagggcctggtgtcatttttagtttgtaagcctcctgttaaatattctacactgggacactgctcatttaaaataccaatatttctagtagttgatgtagtagttttgcagaaaatagttttgcattcagatgtttgaattgggagcttgattgggtcagttcaagccccaaattttcacctcagcttacctgttcccactcataggaagttttacccctccaaatcctcatttttccaattcgcctaaatattggacatttagaactattaaaaacttaaaatatgatacaggctacaaaagcattaccttctataatcaaggaagaaaaataaggttgtccaaaggcatactgtaaatgcttctaatccaattttccacctgatctttgattgtagcaataaattttctaagctaaaggattaacaatttgcttgtgttgcaaaaactctttcctgccaatttgtaattacccttctctatcatttatctcataaactatattgccaaattgtaatttcccctttttcattatctatttcaaaaaccatctcattgatatgggttctgtatctcccatagtatgctcagtgggactagtggtctgtttggatgattgtcctgggctaaactgcaggatcctcataaagccttggggctgtttatctcactctccaatttattatcataatggcattttgtgcctttttcctcatttatttgcacaataggaagcacagtggagagagatgatttctgcagggggcctggaaggacaggggacaagttcagacacagaagaaagctttgcagaaaatatctgacttccagcagttactgggatagaaaacttttaagtgcaaaatgtactattttggaggtatgaggaaatgctacctttcccaaagcactcccacatcccagtgtgcagcaggataaagagagactgaaaatgtttctgatatgaaattgatacagcatttaaatggagggaggaggcctaggctattaatgcaaacacagctagaggcctgcagatatgacacagaatttttcccacagttttaatttaaaacaaccaacccgtcagcaaagctttcaaagttggtggaagatattggccagtggcaatttaacttactcacctattttaagacctccttttctttttcttcttcttcttctcctcctcctcctcctccccctcccccttcccctcctttgtctctctctcatccaggctggagcgcagtggtgtgaacatggctcaccacagccttgtcctcctgggctcaagcagtcctcccacctcagcctcccaagttgctgggaccacaggtgcacaccaccatgcccagctagtttttaagttttttgtagagatgacgtttctccatgttttccatgttattacttctatttctttgaggaaagtcattggcattttggtagagattgcattcaatcagtagattgctttgggtagcatggacatttaaaaatattaattcttgcattccatgaatatagaatatgtttacattgttttgcatcctcttcaattgctttcatcagtgttttacagttttcatcatagagatgtttcacttctttggttaagttaatttctagggatttaattttatttgtggctattacatgtgggattatttttacctctttttcatattgtactctgttggcatatagaaatgctactgatttttgtatgttgattttgtgtcctgcaactttattgactttatttaccagttctaatagtttttggtggagtctttaggtttttccaatatatagtcatatcatctgcaaataaaaataatgaaacttcttcttttacaatttagatgttaaagaacatttctcttgcctaattgctctagttaggacttccagtactatgttgaataatagtggtgaaaaagtgggcatccttttcatgttccagtcttaaaataatgactctaagtttttccccattcagggtaatactagctgtgtgtctgtcatatacttttttctttcttctttttttttttttctcactctgttgcccaggctggaatgcagtggcgcgaccttggatcactacaacctccacctcctgggttgaagtgattctcttgcctcttgtaatcccaagtaactgggattacaggcatgcaccaccacacctggctaattttttatatttttagtagagatgaggtttcaccatgttggccaggctgatctcaaactcctgacctcaagtgatctgcttgtcttggcatcccaaagtgctgggattacagacgtgagccaccatgcccagcacaacttttattatgttgagatatgttccttctctacctagtttttaaagggttttaatcatgaacagatgttaaattttatcaagtggtttttcagcatcaattgaagtgatcatatggtttttgtccttcattctgttgctatgacatatcacattaattgatttgcatgtgttgaaccatccttgcatcccaaggataagctcacttggtcatgatgaatgatgtctttaatgtattgttgaatttggtttgctagtatttcattgaggatttttgcattaatatttatcagagacaccagcctktagatttttttttgatgtgtctttgttctttgtatcagggtaacacttgcctcgtagaatgagtttggaagtattccctcctcctctattttttgtaatagtttgagtagcattggtattagttcacctttaaatgtttggtagaattcagcartgaagccatcaggtcccaagcttttctttgctggaagactttttattatggcttcaatcttgttacttgttactgttcaggctttggatttcttcatggttcaatcttggtaggttgttatgtgtctaggaatttacccatttcttctaaattttccaatttattagcatatggttgatgatactagccactaatgatcctttgaatttctgtagtatcagttgcaatgtttctattttcatctctgattttatttatttgggtcttttccttttttttctttgttagtctggctaatggtttgtcagttttgttcatcttttcaaaagactaactttttgtttcattgacatttttattgttttcttcatttcaaacttatttctgctctgatctttattacttcttttttcctactaattttgagtttgatgtgctattgcttttctaatttttttaaagatgtatcattaggatatttatttgaagtctttcttctccttcttttttttttttytccacagagttttgctctgtcacctaggctggagtgcagcctagctcactgcaacatctgcctcccaggctcatgcaattcttctgcctcagcctcccaaatagctgggattgtaggcacctgccacgacgcccagctaacttttgtctctttagtagagacagggtttcgccatgttgtccaggctggtctcaaactcctgacctaacctcaagtgatctgcccaccctggcctcccaaagtgccgggatcactcatgtgagctgccgcacccaaccctctttcttctttctgatgtaggtacttagagcttaaacttccctcttagtagttatagctataaacttccctctttcaatgtatctgatatgttttggtatgttgtgtttccattagcatttgtttcaagaaatttttcaatttctttcttaatttcttttctttctttctttctttttcttttcttctttttttttttttttttgatagagtctttctctgtcacccaggctggactgcagtggtgtcatctcatctcactgcaacctccgcctctcgggttcaagtaattctcccacctcagcctcccgagtagctggattacaggctctggccaccatgcctggctaatttttgtacttttagtagagagggggtttcacgacattggccaggctggtctccaactcctgacctcaggtgatctgcccacctcggcctcccaaagtgctgagattacaggcgtgagccactgtgcccgttctccttcttaatttcttcattgacccactggtcattcaggagcatattgttgaatttccacgtatctgtatagttttcaaaattcctcgttattaatttctagttttattccattgtggtcagagaagatgcttgatattatttcatttttggggaacgtttaagacttcttttgtgacctaacatatggtctgtccctgagactactccatgtgttgagtagaagaatgtgtaatctgcagccattggatgaaatgttctgtaaatatctattaggtccacttggtctacagtgcagattaaatttgatgtttgttgattttctgtctaggaggtctgtccaatgctgaaaatggagtgtttaagtccccagctattttgtattgaggtctatctctctctttagctctaataaaattagctttatatatctgggtgctccagtgttaggtacatacatatttataattgttatatcctcttgctgaattgacctctttatcattatatgatgaccttctttgtctcttcttatagtttttgtcaagaaaactattttgtctgatataagcatagctactcctgctcttttttggcttccattggcttggaatatctttttccatccttttattttcagcctatgtgtatcttaataggtgaagtgtgtttcttttctttcttttctttcttttttttttttttttttttaagacggagtcttgctcttgtcgcccaggctggagtacaatggcgcgattttggctcattgcaacctccgcctcctgggttcaagcgattctcctgcctcagcctctggagtagctgggattacaggcacctgcgacaacgcccagctaatttttgtatttttagtagagacggggtttcaccatgttggccaggctggtctcaaacttctgacctcaggtgatccacccgcctctgcctcccaaagtgctgggattacaggcaggagccaccacgcacagccggtgaagtgtgtttcttataggtgatagatcactgggtcttgttttttaatctattcagccactctgtgtcttttggttggacagtttagtccatttgcacttaatgttattattgataagtagagactttctcttactattttgttatgtgttttctagttgttttgtggtcttctcttccttctttccttccttctgtcttcctcttagtgaaggtgattttctctggtggtatgatttaatttcttgcttcttatagttttcgtgtctattgtacgtttttcaagatgaggcttgcaaatactatcttataacccattattttaaacttaagacaacttaaaactgattgcataaacaaaaacacattaaaaaaaagaaaactaatagaaactctacactttaactttgtccccctgctttttaacgtcttgtttctctttgtttcattgtactatgtcttgaaaagttgtcgttatcatttttgrttggttcaccatttagactttctacttgagtactctacatgccacaattacagtttgtttttgcaatcagttataatattctctgattttctatgtgcttactattaccagcgagtttgtacatatatatgtattttaatttttatattagatttgggggtacacgtgaaggtttgttacatagataaacacgtcatgagggtttgttgtaaatattcatatagatgatttcttattgctcattaacatctttgtctttcaggttgaagaactctgtttaacatttattttaggacaaatctagcattgatgaaatccctcagcttttgtttgtctgggaaggtctttgttcttcatgcttgaaggatattttcaccagatatactattctacaataaattttatttttttcctttagcactttaaatatgtcacaccactctctcggcctgtaagattgccactgaaaagtctgctgccagacatttgggagctccattttattttatttgtttcctttctcttgctgcttttaggatcctttctttacccttgacttttgggagtctgatatattaaataccttgggggtagtctttgggttaaatctgcttggtgttctacagtcttttagtacttgagtgttgatatctttctccaggcttaggaagttttctggtatcatccctttgaataaactttccatccccatctttttctctacgtcctctttaaagccaataatttaagagttattgcccttttaaggctattttctagatcttatagccatgcttcattcttttttatccttatttcttttgtcttctctgaccatgtattttcaaatagcctttctacatgttcactatttattttttctgcttgatcaattctgctattaagagactctgatgcattctttagtattccagttgcatttttcaactctagaagttttgcttctttttaactatttcaatttgtttgttaaatttatctgataaaattctgaatttcttttctgttatcttgaatttctttgagttttctaaaaagagctattttgaattctctktctgaaaggtcacatatctctgtttctcctggattgatccctggtgtcttatttagttcatttagtgaggtcatgttttcctggatggtcttgatgtttattggtgtctaagcattgaaatgttaggtatttattgtagtcttcacagtctggacttgtttgtgcccatcctccttgggaaggtttttcaggtatttgaaagaactagggtattgtggtctaagccatagctgcgtgagggggcacctcaagcctagtaaggttgtggttcttgtagacttgtagaggtactgccttggtggtcttggataaaaccctgaagaattctctgtattatgaggcagagactcttgttctttacccttactttttcccaaacaaatgaagtctctctgtgctgagctgcctagggctgcaggtagagtgacatactacccccctggccctcactactgggactgtgctgggtcagacctgaagccagcacagcactaggtcttgcccatggctttctgtaaccactacctgggtaccacccatgttcactcaagtccctagggctctaccattagcaggtggtgaagccagccaggttggtgtctttcccttcagggcagtgagttccccacagccccgggtgggtccagagatggtgtatgggagctagggactgcagtcaaaaatccttgtatgtctacctgacgttttattctactgtagctaagctggcacttaaaccacaatacaaagtccttcctgctcttccctcccctttccacaggcagaggagcctctccctgtggcaaccactatcactgggccatgggtggttttctacaccaccattggtattcacttaaagttcaaaggatcttcagtcagcttgtggtgaatgctgccaggcttggacatacccttcagggcactgggcttccctctggcccagggaaggtcatgaaatgccatccaagaggttaggcctgggattggggacttcacgagcccacttgttggtctaacccactctgactgagctggtatctaaagtgcaaaactaagtcctctttactttcccctctgcttttctctagcaagaggagtctctcaccatagccaccacagctggcaatgttctgggtctcacttgaagacaygtctcagagtctcacccaaggcccatgccatgatgcactacctgggtattgyggctgattatttagtacccaaaggctctttattcacaggtgatgaatcctgccaggtgtggatccttcccttcgaggcagcggtttaccttttggcccatggtgtgtctagacgtgtcatctatgagttagggtctagcatgggggcctcatgactgcccagtgccatatcctactgtgactgagctggtatgcaagatgcaaaacaaagtcttctttgctctcctcttcatacgcagaggagtcacttttgttgcttcaagctgtgctgcctggggttgggggaaggatggcacaagcactcccttagattccctggctagtgtctccccaggtcatgtaccaccctagtccagtggctctaagcccatcccagcccagcactagaagttgcctaagaactgcaatccctgtgtcctagacagactttcaagtttacctagaaccccagagcactttggcctatggtggtgaggcttgccaaaaaactcaagttctgacaattgggatggtccattcccctctggctaggtctggtccaaatgttcccttcatgcatgagtgctggctgagcccagcatggctttgctctccactgtgacayggcagcactgagttcaatagaaagaccactagccactgcactctccctcccccaagtgcatatactctctgtgtagcagggctgctgctaggttatggggaaggggtggtgtctgtgattcaagactgtctctcctactctcttcaatgattctttcagtgatatgaatataaaaccaggtacyccgattgctctgatttttggttcttgtgatggtatgcagttagttgttaaactttccagtatgcagatatttgttaaaatgtgttgttcctgtcgggggttatcaatggtacaggcttctattccgccatcttgctctgctctccaaaacacttcgaatattaaacactgaaataaatgtgagttatacatacatttaagaaagattaataaaacaaataaggtaattatttacccaattattccagttccgggttgtaggtggctggagcctatccagcggctcagcactcaagggaggaatcaaccctggacaggatgccattctattgcagggtacacatgtacacacactcactcacactgggacaatttagacacgccaattaacctaacatgcacaactttgggatatgagaggaaaccagaatacctggagaaaacccatgtagacacagggagaatgtgcaaactcaatacagtggccctaccagtaattgatgtttttttctcatcatttaatgaaatgatgttgaacaaaatgaccttattcgaggacctagtgtacaatgctttttgtcaggcattaatattcatgccatcaaaatcaaaagcacaggctcagctaaaatttctcaaatgcatggaaacaagcacctcaacactgttatcttttaatttcaaatggttacctgggctcaaaatctgggtgtgcaattttatctgctctgggcagtgctcaatatcgagcatttcttacaacaattaggacttattmccattcagataatgttgtcctagttaacccctttgtggtttttggagatgtaggtttattctttaaactttktttttttttttttttttttttgagacagtttcttgctctgtcccccaggctggagtgcagtggcatgattacagctcactgcagctttgacctcctgggcttaagcaatcttcccaccccagctgcctgagtatcagggaccacaggtgtgtgccactgcacccagctaatgcttttattttctgtaaagacaggatctcactatgtggtcaagcctggtcttgaactcctgggctcacacaattttcctgcctcagcctcccaaaatgttgggattacaggtgtgagatgcaccagaaacccttaaacttcttaaaaatcccttaagtcctcttggttttacaggaaagtaggagcttggattttagtttgatcataggaaacaagtagattgttattcattcaacaaaaaatatttatgataaacatttttcaggctatccatttatttaataggtctttattacatatttactgctgtcaaatgttttggggccagaggtgaattatgctagtttggaaactaggtggaatattatcatttaaatggatacctttgtatctcaaaacaaatcctgtagtttatataatttggaatattgtatgtctgttttccatggaaatgatgaagttcattggtcatggtactcttgggtcatgggactcacactcactttgctcttacctctttcttattttcacatgcatcccatcgacactcatgtctaatccagaagactggtagtatataagatcccaaatattaccactggctcagaatctgagccaatgaatggagagactatgtcatacttgaaataaacttctttaacaataaaaattaagagtataagttctctcatttcatctcagtttcatcaaatatttcatgtttaaaatgctagcaagtgtgaaagaggctatggaattttgtgagtgataaaatatttgtagagtacttggggatctggatctgggtgctattaaaaccaaccaaacacaagtagctcatatgagtccttcaatttttattcttgcttccaacttttaatcttccagcactgccaaaacatggaactaggcagatttatagcaattctggtagatgtttgttaggaactgatttcgtacaacactcttggcaataaaactatagttttctaaacttgacatttagcatgtcctttatcttataagaagaaaaatacttctgttgttctgttggagtaggttagcttataaaaataaagtgatgcatctttatatgtttttaacgtgtccaactttgccaggcatggtggttcatgcctctaatcccaagcacattggtaggccgaggcaagaggatctcttgagcctaggagttcaagactgcagtgtgctatgatggcatcattgcactccagcctcagngacagagactctgtctcttaagttagtaagtaaataaataaaatgttcaacttaaaataaaattacaatttcttttctagcagctaggtgaaatttcttaactattaacctctggtactttaaacaacattaaaacagcctttaaaagaagacattaattaattgaggaaagattttaaaataattttttccaagttttaatttttaaatccctaaagaaccacatattcttgtaccatccaggtttataaaaatgcagctatcaaatttgatattaaaaacaagataccgcacaccctttgtggaataaagcacagtataaagaaaattagaatgtcatgaccattcttcttcaatctttcccatttgtaatatttcccccaagcggaaaagcctgacaaatttccctttcttgcacgtgaccactttttgcatcagatgcatttaattttgtaggttaaatattcaggacaaaaggagagtagaaagaatttttagagctttgatttctatggaagcaataagctgaaacttggaaataatatgtttcattgccatcaatcccattgtagctagctaacactccagggatttccttgattctctctataataatcttatacttctatagtgcttataatttgcaacctgtgttcacttactttatgagattcttrcaaaaatcttttgaaagaaggctagtgtgtatgtatatgtgggtgtatgaatatacatatatatgtgtatatgtttgtctatacatatacatatgtgtgtgtatgacatatatatgtatatagtcatccctcattgtccacaggggatcggttccagaaccccctcagacaccaaaatttccagatgcttaagttttttatataaaatgactaattggtcaattcttcttggtaaagttgatcttgatcttaccagtttcttttttggcttagtaataggaacaatgattttcataatttaggggaccaaaagtaaaatttcagtttaagtcattttaggaataaaccatggagctataaatcttttggaggagttatagattcagtgttaatgctagagtattgcagtatattaatacaacagatagttctgaaaagttgctttagaaaaatgtttcagctaaagtgacccaataccaaattctgtacagttaccctctattttgtaaatgyatatgttaatatcaaagtatttatattgtgtaatttcctaccttaggtgcttttgtttttaatataatgctgtttcaaggtcgaatatgtacagtaataactgttacaaattgattacgagagatcacaatcattgtacaaatcacaggctatgtcattgtgtagacaaaaatcactgaccatgcatgccagaggtggatcataaatagtaactcctaagactagaaatctacttgatatttttatgggttcatctttaaaagtgacctcgctgaataaaagttcaatatttcttaaaagaaaggtaaatctaaaaaccgtccagaattttcgatcctagtctagtaccacttacttgggaacaaatatagaagcacaggcaaccccgtccgttaatttggctccgtcattgtgcagacaaaaatcactgaccatgcatgccagaggtggatcatagttaactcgttaagactagaaatctacttgatagtgatttttatgggttcatctttaaaagtgacctcgctgaataaaagttcaatatttcttaaaagaaaggtaaatctagaaagctgtccagaattttcaatcctagtctagtaccacttacttgggaacaaatatagaaacacaggcaaccccgtccgttaattctgatgttgaacgtgtggttagagagcacactgcgrtatgttacaggacctgagataaaaagcaaatttgtaaagtgtctaagtgttgatggagaaaaacacatctagcatatacggaaattttcttttgagttctctgtaggatgatcaccaactcagtaggtgaagccctgccctctagtggttatgggtgtgagaggacttctgttcaacattatatgtctggctcaccacggtttattaaaaccaatcgttcattaaaaagcacttattaggggtctgggtaagatgccgagcaagtgaaatgtttacgtgtgaaaaggcattgacactggacaaaggtacagctgctaaaagaagtgctcgttcattggcttcgacagctgtacgactggtttctaattgctgttccagcctctccccagttccatataccacaaacgaatgaaaaagattagctctccctggagctctctgaggctgaaccttgctctctcattacacatggtaactaagcacaccccttamagaattttgggaagtcgccccgcgattaccggctcccscaagaaccaagcagtcagtgcagggttttgcaagtgagagtgcgagactcgggaggytgctcacggtgctccagtccctggcaggagcatggacacctcgccccttccttccgtgggcctcaacgttgcctgctgagattgtgactgccaccccgacrggagcagcttcccctacagactttgtagagagcgcttaaacgcctcggggacagcggccatgactstcagcttgggccgaccccgsggccgccccacgggaatgcgtggccgacacggggcgtgggcgaatctccgaccctcgcgttcagggggtrcatataaacgggcggacaccgtccctggggtaagggaggcgccagcaagaacaaggcgggccaccaaccccgagcgacctcctaccggacggatccaaacccaaacattgtccattccgggccgaagtctcggccttcacttcacttccgccttcccagcccgtgaacacgaatgcgcctgcgcgcacctctctcagcggaagtaatagtgacaaagctgggttcgcggctggcccaggagtgcggggcgcgactgggcggccggcggcggggaggggcggagcgcaggagtcggaggcgggagcagaccagcacggcctcgcggagccggcccggcggaccgtgacgggtcccctcacctcctcttctctcccctccccgcccgccctctctccctcccttcctccctcccgctcgcttcttctcacgccgggagcaggctcscgcctcgcaccgctgccccgcgagcagctcctcttctcccgaggcgcgcggggcgcccccgcgagccccgcggctgagaccccgcagcctggaggagggctgtccggggctttgggtgggtaycagtattacctcctgcccccatttctagaaacttccaggttctgaaggaaggggaggttcgggtatcccctggatgggggggcatctctagggcgccgccccgctggcgtgagctggggacgttgcgggcacacgacggggcgggtgcgggatcttggggaggggggctcccgagatagtggctgggsggggaactccttcctcagcctctcgtcagcgccgcttctcctggtttctcttgcagatgctgctgctaggggtggtgggagcagccgtgggacgcgtggccgggagcgggggtgacagcctgggattccgggggcttctcttccttgtcctcctcctctcctctctattcccagwgtggccgtggctgacactaaagactttgtagccatcaacccgagtgcagtttcgatggaaaatgaaggtaaaggcccctggscgaccggttgcaacgcggagttgagggtgtggtggtttgcttttaagttgtctttgtttttccacctttttattttcgtgagcttatttatttactgtgtatgtgaagtgtccaaggatttgcttacttagggtatccagcttttattttggtaacatggggcatttgagagattgaggttctgtgggtgactgagcttgattcagctttcttgaggaattcctgctctcttcagcttagggaatgagagggaagttttcatttcagatagcgtctgtgcatgtttaaatagctatttgaaaggaattactcgaggggaagtggaaatgggggacaaggggatggggctgcatctctgtatattggcgtttcaagcctcgatgtggtgtgtggcaggattcatttataagaaagcaagccatgttttattatgtctagcattggggaaaaaactcattatttttcaattcacaaaaaaaacccagtgaatttaatgaaatgttatgagatgagtgcttttcttaaagttccaccctatttcaaaacatcatttaggaggytgacagcggaacctgtttgttcactgtacactttggacacattagatcgtcattcacatgttacatgatccctttggcctcgttaaaatatttaatgcttttcctacacagcactgattatttttaaaattgttgaacaactgtgaataagtgattttttttccccctcctgaaacaacacttattctttggactgacttctgacttgtgcgtgatcatttttttttcttctgcctttaaccgggctgcaaaatactataaaagatacttaacaaatgacagttttttcctctggtataatttgttttaaaaaatatgtgtctggtataaaggagctgcagtcttgctggctgcttctaatttgtttttccattgttgagaatgtaagcttgattgtctgactaggactagtaattttgaaatgggtgtttcttatagatgcagtaatgtgttttgctmtctgagacctctgggctatgtagggaatatgatgagaggcatgattatattgacaaattttactctggatggataattggcggaagacattttctgaaatactaaagtgtataactgcagaggagttatactgtctaattgggtcttgagaaacatttgaaagcagtgatgtttttggtgataaggaaagtcacttttctgagcctttttcctctcttttaagtttattgatttaagaaaggcaaatccattctgcacatgagacaaagaatgttaaatgcattcatatacttgtttcttggtagaaacatcttaaataacttctaacatttaatgtatgtttatgagcttgttttcagaatggtaccagatttaagagggtagcctaaagtaggtggattctttcatgttgcttttgtttcttgatctctcaggaggaagagcatgagtaataaagccgattctcattatctactgaggtgggagggggtggttgtgagataggagaatggtgcctacttgtgtctgtctctgtattttgtggccaaatatgaattttgtggtttcatagtaaaagattatacagttcttaaaaacgtgtggggttttctgtcccgttattcttgaccatcaagagaccatttttgtcagtttctccctatcgtcacatttttttttatatataaacagtttgaagaagagcctgtatatagcctagaaattttcaaaagtgactgaccatattaaactacatagattgatacctgtgcctttttattgttcacttgcctttttgtagttttcatccttctttgatatagtgtagtattaacaatttggaggtgtgaaacaaaaatggattcaagtcttgactaacttgtcttgaaccacttaaagctgtgtgattttaagtaaattacgtcacctttctgagcctgtatttcttcatctataaattgggattgataatctttaactcacagaattgagaggattaaatgagaaaccctgtataaattctcttgtgaggtaggaatgataacgtttaagagcttgagttgtggtggaaccatgcagactgatttgaatgctggattcrtcgcttaccatttggctttgtgcatattaaagttttctgtgcttccgtttcttcataaaataaagataatgatagaacctaccttatgaggttgttgtaaacattcaaacagtatctggcacatagtaagtgctcggtaaatgttaattataaattgcctagctgaatgtttgatacatactaataggccacctggcattaatattgtcatgacagttaaatgttggaagggggaacagtagtagccaaatgctcaaaatgaagttgtcattgttagttgagggataagtggagttaggtaaggaattttctatggcattagtgcttttaagcctacagaaaaagttagggctctaccaagaagccagggtccagtacagaaagagacaggtttggatttgaagcccgacaagtaatgttttcctctcctgaaaaatctgacaagttactaggcttctaagctttctcagcctytaagttatctcatctgtaaatgagataatgccctcttgcaaagttgatgtgagtaataaatgaagccgccagagcaatgtttgacatacagttaacttggatgaattgagtgatgctgctgttccctagtaagagtatcctccagtaggtatgcaggtagttacatttgtgggtgtgaacagtgtagaattgatagtgtttccctagagcatcagcatgaaggtttcttaggtagcttacagtggtgtggggaggaaatggtttcatccatgtgttggttccttcagcaatggtggtattttctttggcacttcggtttagattcttctggacttttttcctagggcccatttaaactttctcagcaaagcttgaccaatttttagctgtagactccaggatgtttcatgaacactttctgcttgtcactaggaacgtttaaaatgttaatttcctggaatttttggactacttaacattcagtcgtgagttaggattttatccagatcctttggaatttgtttttacatgtttatcacaaatctaaacagatcccgcttaggcatcttgagatgcacaagtaaacagctcttacctgatttttaaaagttaattgcatgtttaaagtgatagcttactagaaaagatatgtctagctggagaagcttgcacataggttttcctttctagtaatggatttattttttggaataaatttggcctttcccatagaaaattcagtgtgactttaatacacatgaaactttaatatagccttaaatgtttgactagtggatagaaatgtaatagtcttcaggatttcaggacatggttaatttaagattatagacagagctaataggtgtagagaacaatgccccaatcttttttgtttgaaaatggttgtatttacactttacttttaaaagcagtttcttaattcaatttcaaattgttaatcagctaggaatgtctcaagaaaaaattgcattactatagttggagaagctatagggaaaaagggatgagaagccaccttaattttattcctttaactgaaaataggaaaccaggttataaaaatatatctttgggtgtgggaaatatagtttatgttgtttgcagttttgtccataaaatgatagtcttaattagtactctgaaaaagagttgaaactaaaagagattatatatatgacattttgtaaactgtagtaatttaagccagaggatgctgtagmgagtacttgtatgcaataaccttctgacagttggattccaaatacttgatttgtcttcatatttttgtcattcatttaaagtcagcagaattcaggtctgttaacgcaaagcattatgaaacaaaatagtttcctagggaacacacccctaggggcccaggactgattttggagatcttagttagccatgatctgttttgcaaggttaaattttgttttaaaggtgccaggaacactgtggcttgatggtaaagttagcatgaattttaaattacaccgttgttacatgtagcatcttaaaatatcttaaggatcagttcaagaggtcccctcacatttactttgttgaaacaaattctttttaataatggtttcaggcatcagttgtgacaaggttatctttatgcttttcatgtagacaaatgttggtaaaaggcagtaaagggtgcatcctgaggttaatgccatcatttcatgaaagaaaggatctctcaaaaaaaaggctaaattgataatttcctcttggatgtatatgactgctacttatatgcatttgttaatacagttgacccttgaacaatgtgggggttggggtgctgacccaccatgcagttgaaaatctgcatgtaacttttaactctctgaaaactaaactactaatagtctctactgttgcctggaagcctcactgataacataaacagtcaattaacacatactttgtatgctatatgtattrtatactgtattcttgcaataaagtagagaaaaaaacttaccaagaaaattatgaggaggagaaaatatatttataattcattaagcagaagtggatcactataaaggtcttcatcctcattgtcttcgctttgagtaggctgaagaaaaggaggggttggtcttgctgtctcgggtgacagaagcaaatctgagtataagtagacctttacagttgaaactcatgttgttaaagagtcaactgtgtatcttctgtcttcaggctttaagttgctacgacaaaagtataaatcgtagaattacaaataaattacaccaattgtgttaaattaggttggtttagactaaacctgtgatgtgtttagaaaaagtttgaatgaaatgttgaaaagctgtcctagattatagacagaagacagtaatagtcggggtcagaagcattatcttaagatggccgtaactgggtgtctgattcaatttctatctctgctttttttaattctgctataggtattagagaatgtgtgaattggaattatttaatatacctgttagttgtaattgctttcttaagtaaaggccttttggtttgacatttggtcatttcgtaaacatgctgacctaaactcgtgtccctccctcagaaggaaatacgttaatttagtatgacatccttttttttccctttgtgcttatttatttatttatttttttgagatggagtctcactctgtaacccaggctgggctgggacacagtagcatcattatagctcaccaaagcccctaactcctggactaatgcgatctccctgccttagcctcctgagtagctgggattataagcacacatcactatacccagctaatttcttaatttttttaaagacgaggtcttgatatattgcccatgctggtcttgaactcctggactcaagcagtcttattgccttggcctcccaaattgttggaattataggcatgagccmccgtgcccagctttagtatgacattctttattcttttagaaagctttgagatattgatgcatccttatagaaattactttcatttatttatttacttacttaaaacagcttgataaagttggaaaaagcaggaccctaaataataaatatatttgccatcagccttttataggaaaactcagaaataataagtggaaatatttaggatgtcactcatcagactttttttttgaatatgtaaatgtgtttttttgaaaatttaaacacgcaaagtaaaaattaaaagttttggttaagttgtgaatttcagaaatttatcttggttatggtgtcctgaagttaaaaagaatagagcattagtacattagtacataaacgttctgttattctctgcctaagggcaagatccaactttgaaccaggtcctggatttcctctcatcttaaatcggagcctttttcatttgtagtataaataaattagccttttgatgctgtgattttatttgtatatgttatatatgagatttatatctctctttgtatgcaggcatttcactagattttgtttggccatctatttttagtgtttccctagcagcatgtttgctttacctgccttcatctaggtttctacatcatcaggggtggaaatattagttggcttaattaagcttgggagttgtaccttacttgctctgttgagtgtcagttctaccttcttttgaagcaggcaaaagcagttcatggcacaaatgccagaaatagcatgcaaaccactttgtagtggtatgcaaactaatttctgctgtgtccttttcttaatgcttgtgagggttactgtttacttaagagttaatatttggcttatgaaactagtatcagatgagaaattccagcatccctccccaccccagagaaagatgtggtcattggggactgctctgaagtctgccagccctctatcctaaaagttggtagatcagttattatatcttgatatgtacccctaattcayatgaggggccaagagagattagttactcctgatttcatctgttagaagataaagggagtgtggtttgtatctatattagagtaatgggaatgaagggtagggatggatgacagagatattttactcctaggaaaaatcagcaggacttggacagtgactagatacagagaattaagggaatagttgaatcagacatgactgcaagatgtcatttgggtcagtgaaggtgccattgattgtggttgaaggagtgagccgatttaggggctggctgaagggaatatataggtcagactgtcatgatgtgaggctcatatagctatgcatggagagaggtgttaaatcaagcaccaggattcaaagtgagctcttgaaggcagagacctcaatttgtcctttattcatcttgaacagactctgggacgtacctactgtcaattgaatgaaaatgctggcttcttccttctaagtggttctcatctcaggattgttttgcccccgggggacatttggcaatgtttagagaaatgctgggttgtcacaactcaaagtatgctactggcatccagtgtgtagagaccagggatgctggtaagcatgctacaatccgtaagacagcatcttctacctccccccgccaccctcaaaattttttagccccagatgtcaatggtgccaagattgagaaacactgttctaacaaacggcaaggaagttgactcctctaagccttggtttcctcacttgtaaagagattatgactacttcaggtttgttagaattagaccaggcagggtgtgtacaagtgcctggcatgaaagagcctctcagcaaatcctaatttcccttaccttacttgatgaatagatttaggggagttacttttggtcttttaactgctaatttcaaggcttcacgttttttttttttttttttttttttctgagaggtgagtgggatgcctaggaaacatagagtagcttttataakcttaatgcttttctcatggttttatcaaattatgattttgattatactttggtttgggtttgtactatttcaggattcagtatttagtgttcacctagcagtagacaatgaagttaaacccttagtgtagatcaatgaagttaagcccttaaattttactttttagcctgtaaatacattttatgtattatttattgctcacagaactgttattgtttggaagcaattttactattctttgaaatcaagaccaaaatgtactgaattttatttctcatggaaaatgctagacctcctatgtctattgcctttttcctttttatccatttattctaactagaccccccccgaagtcagaactcttccttagatttcctttttagggtcttcattaggtggctttcttttgcttgtcgggtgtctttttactttattttgtaaggtgttgaatattccctttattttgtaaggtgttgaatgtttcagtggtgttagggacaggaccaccgatattttcatctctaataccaatcccttagtgatctattccagtcatagcctcagtgtttaaagtctccttacatgtacatagttgtgtggcattctcatttttagggagtcactggaattctttgctgctatttctttccttttaggaaaaaaaccggtttactcttactatacattattttctccatctatagaatggaattactgtaggtaaaagtccttgagttcggtaaactatgtattggacttactaatgtacgttttattaattgcaggtggaatttagaaataacctgcctgtttttcatcttaaactaagattatttaaatattccattcattaattagttggttagaaaaattagcttttgaggaacaccacttaaacatggaaaataataacagagtacattttgtgacagcaaataaattatcggttaacttaaccctataggattcaaagttggtagctttaaatgatattaaattgtatttgactgtcaactgcttttaaaggcttacgtggctccccattgtacctgtagttatttaggtctggaagcacagggtgttaagaatgccaccataatgtcttttcataagggtttggtttgtcatagcctgtaaaattaggttcaccagttagctgctttatgaaatgaatgtcattggtcatggtgggggaggtattaggagaaggtataaaggaatctaaaaaaactttctttctttctctccctccctcccttctttccttctgccccttcctcccccctttcctttcctttttcctctttcccctttcccatttcccctttcccctttcctttcctttcctttcctttcctttccatcttctgtattgctagtaaaataattgttgctcactgaaggctttaaaaaacactggttgcatgcttaatataggatggcaacaaaatggacgggtttaaaaaatatgtagatggtatgatacccctttcctccatccttgtaccaaatttctttcaaacctagaataatttatacaaacagatgtatcagtagatggagtattatgcccactttttaatttaatgatcaaaaaatgccaaattcttcccagagtggcagtataattcagatgtagttaactgttggatgcaaattcaattatggtagaaagatttactttactttgagaggtttttctaaaatcttctaaaattatgttgatttttaaaatttgaaataactttagacttacataaaaggtataaaaatagtacaaagaggtcctggatatcttttgcccagttactcctaatgttaacatcttatataaccatagtataattattaaaaccaggacattcacatttataaactatcctttttctagttcaggatccaatttgggatcctaccttgcatttagttatcatcatgttagtctcctcccatctgttaagcttttcagtcttttttttctctcatcttttataaatgttactgacacttttgaagagtactgttagttattttttagaatgtttctcaatatggggttgtcagatcttcacccgtgattagcatgtcttatgatgggtgaagttaatgtgatcacttggttaaggctgtgtctgccagatttcttcattgtaaagttactgctttttcctttgtaataataaatgttcattttaaccttgtagttgtataataattagtaattcctttgtaattaataccttcctctagtggggaggtactgcaaatatactgtgtcccatcatacttatcatgggccagttttgcaatatcctgtgttccatcatactttacatgggcaagttttgctatctatcaatggttcttaactggcagcagttattactgctttggtctttgcttaatggcgagttttctatttcactcattcttactatatttggaattctacaattaaggaagtactgtcctctttacttattaattatccaattaatttatttacatggctttgtggatattttgccttatgggttaaaatccagtaattgttgctcaagtcattctcgctttggttattgagggcacttgaaaatttgttcctgtgtcttttctacaataccctctctcattttgtgagcactaatttactttctggtatcacatgatgttctgggtgtatcttgtatttttcctgcttgcaccagccatggaatcaaccatttttccagggagctgagttcattttactagagaatgatatctagaaaccaagatctgggtgccaggtgtgctccatgctactgggtgtcattgcttctaggctctcttagtagatagagctagcagtrtatatgtttggtaacatgtatgaacacatatgtttttattttcttatctatccatctatgtatataaataaaaaactgccagtgatgctgccagttctgttcttccaccatagggtccattttggtcttttttcctgttcagcccttttctctttctttgttacttccttctccaaaggtgagaaactgttctcaaccacagtatattgacttacttgtttcatccgagtacacacaaacaaaagtagttttagaattagtgacctattcattccctggtgagaaacacagttttaaactagagtacaatatttgtctttaactttatggtatacaggcaaattctgttttcagaagttacttgggttcttttcatccctgcctaagggttatgttagtcacttgtaataaaattaggttcacttgttattgtttgtatgctgttttaagttcctcctacatcctgtttcatcatagcacagtatccctctcccatttatttatgataaagatgtgttcttaaaaggactggatttgcttaaggttgggtacagctgtaattgctttgccagacagcagttaaaggacatgtgctttggcaatcattctcttgggcttgcttgcctggttccttagtttcagctctcatttctacatcgtttacacttgggaattgatatcagctgtggccccataactgtcagtgcttgaaatcatgcccatcgactaaatcttatttgttctgtatgcacagttttagacccggagccacctacagtatgaatactaattctctcatagctgtggtaaatcatgaagtattttgtagaccctgtcctttactgggtttttctttttcaagatagaatcacttaccacaaaatttgtcattttaaagtgtataattcagtggtttttagtatagtcacaaaattgtatattgatataattctagaacatttttatcaccccagaaagaaaccccttacccattagcagtcacttcccattctcccctttcgctagcccctggtaaccactaatctactttgtctttatggatttgcctgttctgggtatttcatataaattgaatcatacaatatgtgaccttttatgtctggcttctagcacgtgttagtacttcatttctttttgcgatgaaataatattccattgtatggatatacacattttgtttattcatcagtttctactttttgtcaaaaaataacactattgtgagcattcatgtatgggtttttgtgtaaacatgttttcagttttttcaggtgtatacttaggagtagaagtgctgggtcatggtaattctatctttaatttattgagtaactgccatagtggttgaaccattttttcattcccactagcagtgtatgaggctttcttttaattaatttctccacatcctctccaacattttgctgttttttttttttttttccattgcatcctagggggtatgaagtggtttcacattgtagttttgatttgcgtttcccaaatgactaatgatgtgtcaaggatcttttgcatggattcttcatgcaaaagaatgaaggtggactcttatctcacagcatatgcaaaaatcatttctgcactctgacttctaatctgttggtttataagtctttgcagatccaagtaccacaatgttttggttactgtagattttgcgataagttagttttgmaactaggaagtgtgatgtgcttattggttatttgtatatctttggagaaatgtctattcaaatcttttgaccattttgtaatttggttatttacttttttgttgagttgtaagagttctttatatatatgtgtgtacacacacacacacacacacacatacgtttattctggatactggataggaatatattctatacttgtaccagtatacaaagatgtttacctaagagtgttcactgcagcaatgtttataagataattatcagagatatggtttgtaaatatttctcccattctgtggattacctgttcactttctgaatggtatcctctacatcagaaacttttaaaattgtgatgaagtccaatttatatatgtgtttcttttattgtttgtgctttatatatctaggaaaccattgcctgattcaatgtgatgaagattataagaattttatagtttaactctcacgcttgatccattttgagttcatttttgcatatgatgtgacataagggcccaccttcattcttttgcatagaatatccagttatcccaatactgtttgttaaaaagactattctttttccattgaatgtcttggcacccttgtcaaaaatcaattgaccagaaattatgggtttatttctagactctgaattctattctgttggtttatatgtctttgctgatgtaagtaccataatgttttgattactgtaggttttgtagtaagttaattttgaaactggaagtgtgagacctttaacagtgtctgcctttcttttttttttttttcagattgttttgtctattctggatcccttgcatttccatatgaattttagaatcagtttgtccatttctgttaaaaaggcagttggaattttcataagcattgccttgaattgtcctttactttgagaatataatattcttacttaggtacaaacataagactttttgagtactatgtttgggtgtgaccttattctaggtaacaagcatttcacagaaatagaaggccaaaaggtacatgaaaagatgttcaacctcagtcatgaagaaatgcaaattaaaaacaaaattataatttttcacttgtcagattggcaaagattagagtgtagtgatgactagtcttggctagactgtggggaaaatagaagcttctgagtttgaagtttttgacacagtccctttggagatcagtagcagtagctatcagaataaaaaatatgaacaaccaaagtttcactttcagaaatgtattctgtacctgtacttgcacaaatataccaagaagtttgtacaggatgtttactgcagcaacatttgtaataccaaaagacaggagtcagcctaaatatcatcaagaggactagttaaaattgaagtactgcatacaatgaaatgccctgtgagccactgaaaagaatgaggcaggttagtatgtaaggtgacatggagtccaagatgtattgaatracaaaatttgttattgtgtggttctattagaaattaaaaaaaaaaaacaccagaaatacttgtatacacacctgtatagaaaatggctggcagtatacacagaaatagttaacagagattacttctgggcagtagaactggaaatctcattaaatcctttctcattacttgactttttttaaaacaatgagcaggtttttgttttctgaaaaatcattaagaatgactcagtagtgcaagtaaaattaaaattaatactactctttaggaataaaatatttgtttttttctgtcagtttgattgttttatatataatatctgttggtctctagagcagtttgattgttttgtatataatccctgttggtatccagaggtaaatgcattttattgtgatttttattgctgtgtggaaaatggattagaattagttcttgggtacaaatatttaatagtatttggaaccatatttttcatttctacatattgtaagtatgggagaaaaataagatttatcttttaagagttgtgattgtgctagtttttaatttatcaaatgaagaatatttaagaatatttaattctttaagtacaaagaatatttaagaatacttaagagcattgaagcctgattatgccactgttctttgggttcatgctctggaacttaaggttcagtgaagaaggtaaccatttcatagtatctcccttaacaaaggttactgatacattttcagaaaccttagtaccacaggcagtaaggaggcagtgagatccctctggattttgccagaccattcctagaatttttaaggtgaggggaccaatttcccaccccatatagaaatggcaccaacatctctcctagaaacttcctggtgattggaaactttttatctgttgatgctggttctgtctttagggagaatgtcatgtttcatgtaacatatcttaaaatatttgaagatacctgtcatatcctttatttagaaatctttattgaaatccaattaatggtcaggtactgcccttcatacttctctaggccgaatattcctaattccttccactgatcatcttaagacctcatttccagaaatgtcaccatagtatgccatgcttggtagcaggctctaatgatgccctaaactgaatatagacttctcaaggtatggttggattgttgtgaaatagtctaggctcattgactcgcttggactaaaaagctatctttctcataatgcagtttaggataatgtttacctttttagcaacaggtttacactgmgaatgcttttacagctctttaaatgatgtatgaggtcaacttaacccatgtgtttgtctgaattattattgtagagccttagcatctggtatgttagtagttggtttttcggtatagtagtaggttttatatatatatttatatttatatttatttattgtcaatagagttagggtctcactatgttgcccaggttggtcttgaactcctgggtgcaagtgatcctgctgccttggcctcttaaagtgctgcgattacgggcatgagccacggcacccagctagtagtaggtttttacatttatttctcataagtatacgtgtatgcttttgtaaatgttgaggtggtggtatattgcctcttctcgttgattctgcctgataatcagcttgttagaattttgttttggtttgtagttctccttgaagaggtccttcacatcccttgtaagctggattcctaggtattttattctctttgaagcaattgtgaatgggagttcactcatgatttggctctctgtttgtctgttcttggtgtataagaatgcttgtgatttttgtacattgattttgtatcctgagactttgctgaagttgcttatcagcttaaggagattttgggctgagacaatggggttttctagatatacaatcatgtcgtctgcaaacagggacaatttgacttcctcttttcctaattgaataccctttatttccttctcctgcctaattgccctggccagaacttccaacactttgttgaataggagtggtgagagagggcatccctgtcttgtgccagttttcaaagggaatgcttccagtttttgcccattcagtatgatattggctgtgagtttgtcatagatagctcttattattttgaaatacgtcccatcaatacctaatttattgagagtttttagcatgaagggttgttgaattttgtcaaaggctttttctgcatctattgagataatcatgtggtttttgtctttggctctgtttatatgctggattacatttattgatttgcgtatattgaaccagccttgcatcccagggatgaagcccacttgatcatggtggataagctttttgatgtgctgctggattcgttttgccagtattttattgaggatttttgcatcaatgttcatcaaggatattggtctaaaattctcttttttggttgtgtctctgcccggctttggtatcagaatgatgctggcctcataaaatgagttagggaggattccctctttttctattgattggaatagtttcagaaggaatggtagcagttcctccttgtacctctgatagaatttggctgtgaatccatctggtcctggactccttttggttggtaaactattgattattgccacaatttcagctcctgttattggtctattcagagattcaacttcttcctggtttagtcttgggagcgtgtatgtgttgaggaatttatccatttcttctagattttctagtttatttgcgtagaggtgtttgtagtattctctgatggtagtttgtatttctgtgggatcggtagtgatatcccctttatcattttttattgtgtctatttgattcttctctctttttttctttattagtcttgctagtggtctatcaattttgttgatcctttcaaaaaaccagctcctggattcattgatttttttgaagggttttttgtgtctctatttccttcagttctgctctgattttagttatttcttgccttctgctagcttttgaatgtgtttgctcttgcttttctagttcttttaattgtgatgttagggtgtcaattttggatctttcctgctttctcttgtgggcatttagtgctataaattgaggatacaaacaaatggaagaacattccatgctcatgggtaggaagaatcaatattgtgaaaatggccatactgcccaaggtaatttacagattcagtgccatccccatcaagctaccgatgactttcttcacagaattggaaaaaactactttaaagttcatatggaaccaaaaaagagcccgcatcgccaagtcaatcctaagccaaaagaacaaagctggaggcatcacactacctgacttcaaactatactacaaggctacagtaaccaaaacagcatggtactggtaccataacagagatatagatcaatggaacagaacagagccctcagaaataacgccgcatatctacaactatctgatctttgacaaacctgagaaaaacaagcaatggggaaaggattccctatttaataaatggtgctgggaaaactggctagccatatgtagaaagctgaaactggatcccttccttacaccttatacaaaaatcaattcaagatggattaaagatttaaacgttagacctaaaaccataaaaaccctagaagaaaacctaggcattaccattcaggacataggcatgggcaaggacttcatgtccaaaacaccaaaagcaatggcaacaaaagacaaaattgacaaatgggatctaattaaactaaagagcttctgcacagcaaaagaaactaccatcagagtgaacaggaaacctacaaaatgggagaaaattttcgcaacctactcatctgacaaagggcaaatatccagaatctacaatgaactcaaaccaatttacaagaaaaaaacaaacaaccccatcaaaaagtgggcgaaagacatgaacagacacttctcaaaagaagacatttatgcagccaaaaaacacatgaaaaaatgctcatcatcactggccatcagagaaatgcaaatcaaaaccacaatgagataccatctcacaccagttagaatggcaatcattaaaaagtcaggaaacaacaggtgctggagaggatgtggagaaataggaacacttttacactgttggtgggactgtaaactagttcaaccattgtggaagtcagtgtggcgattcctcagggatctagaactagaaataccatttgacccagccatcccattactgggtatatacccaaatgactataaatcatgctgctataaagacacatgcacatgtatgtttattgcggcattattcacaatagcaaaaacttggaactaacccaaatrcccaacaatgatagactggattaagaaaatgtggcacatatacaccatggagtactatgcagccataaaaaatgatgagttcatgtcctttgtagggacatggatgaaattggaaatcatcattctcagtaaactatcgcaagaacaaaaaaccaaacaccacatattctcactcataggtgggaattgaacaatgagaycacatggacacaggaaggggaatatcacactctggggactgttgtggggtggggggagggatagcattgggagatatacctaatgctagatgacgagttagtgggtgcagcacaccagcatggcacatgtatacatatgtaactaacctgcacaatgtgcacatgtaccctaaaacttaaagtataataaaaaataaataaatttwaaaaaaaaaaagaattttgttttggttatgaggcaaggtgggtatccctctccagccttgagttaatgtcatcttggataagtatgctattcagtatttatctgagttgttgataaaatattaacagaatagagcctcgtggcatacctagtggtactgagttattaatactactggcccacctgtcagaaattatgcagtttagctgtgtattttcatgtgacagtgtttataaaatgtcttgttggcatcagaagactgtacagccttactgtacttaagacatgctgtttttaaatgattgttttctccttttccaaagttaaaatctgctgtatttatttaagatttttttggtgtgtgtatgggggaagaggggaggtggaaggatgaaaagattctttgcactaagtttgcttttggttaaaaagaagcctgtattcttagatcttaaatctagtctcactatactaaaattagtcccctaaactggatttactttgaaacttttggatgacctgactaatttaaatattgtacaatagttaagaaggaggacttttagtgttacacaatggttcggttcctggccatatcacttactagttttgttaatttctttttgtgttgggcacattacttctttaatctttaatttccctatctaaaaaagtagtaaaaataatgccctcttcagattgttttccgaggattaagtgaagtattagaaataaagcactcagcatcaagcactggtacttagcagcttaacgggcaaacctgctctttccctcctcctcctcctccttagtactcttcttcctattatgtttcctccaactgttactgtgataacatataaatgactaaatgtgaaatcagtagagttttagactttttttttaactcaaagcttcaaactaaaaacagtgtatttcttgcagatcctttaaggataaatagttgatcttttaaaatgaaagtgccctgtgaaagtttcatagctaaacatttttgttctttagtttaaggcttaagccatataggtttttttgtttgttttttttttgatttgttttaactagtcaagtgcatttcagtgagaagggagaaagagtagaaaggtgttggatctgtaactgactgtgaacaatcagttgagataactcaactgccttcagaccagccaagccctatagttttacaagaaaaaacccattcaggttagtaactcatgttgaattacttttggctactttgtgttcaataatatcattctggggtgtctttgtcttttttggggggcaaggaaatggggtcttggtattttgccyagcttgggcttgaactcttgatcttctgctttagcctcctaagtagagggtgtctttgattatatcttaataaaaggattggaagttgaagcaaggaattaaaaacataaatgtgaattactgatagatgttaggcaagtagttgtgtaggtgggactaacttgcttgactaagattttgattgcccatccctttcacgttctacctccctaccccataacataccttgaacatgaaaacatggggaacatagatttcaatagaagaagcccaattatttgtgaataagtatgagaaccatctggatattctgcagttgttataatacagagcaaatagagcattagcacctacgggaaagcagttggattgttgaatcttctttgacttgtttgttgctttggatgacaggagggttccttcctacctcttagtaaagattgggaaagaaaagagttaattgtgaacttactgggattaattcattctgggttttttttttttcccccccttgagacgatgtttcactctgttgcccaggctggagtgcaatggcgtgatcttggctcactgcaacctccgcctcctgggttcaagcgattctcttgtctcagcctcccaagtagctaggattaaaggcgcctgccactacgtccagctaatttttgtatttgtagtagagacagggttttaccatgttggccaggctggtctcgaactcctgacctcaagtgatccacccgcctcagactcccaaaatgctggaattacaggtatgagctactgcgcccggcctaattcattcttaattataagaatgtacagtttttgtttagggatatagtgttagttgaaaaattagggaaaaagtctgttacttagcttagtttttcatttatccttttatttagcagttactgagtaccagctatatgccaggcatagtgagtgttggtttgtgtgacctgcagttcttgtagctattgagtttatagtgtagttgagggaaaaacacgtttggatgagcagtgatagttacgtggtaggggactgagtgtgagtaatcggttcagggttgtcgcaagccaacacaaaaaagctcatagaaggaatgaggcctaaaagcttagtgtagggtatggagtgtgcaggctggacctggcttttgcctgcagaaatgtgctacaagcatttcagacaaagggactcagtggtagacctcttctacatatgccacttcagtagtgtggttttagattttatatttagccatttatatttagcctgaggcgttctgagtcagtccaaatccactgtcactaaataaatgggttatgtatcttaataacagaggattagccatccttatatgtgaagggcagcattactgggacatgtaaagcaaacttatttgtgacaacagaatatttaagtatagttaataaataggattcttatagtctcctattaggtaacrttccttttagagatcctcatggagtatgagtatttaaagtgaggtggaggccaggcacagtggctcacgcctgtaatcctagcactttgggaggctgaggtgggtggattgcctgagcttaggagtttgagaccagcctgggcaacacggtgaaaccctgtctctactcaaaaaaaaaaaaaaacaaaaaattagccaggcatggctgcatgtgcctgtaatcccagctacttgggaggctgagacagaagaattgctttaacctgggaggcagaggttgcagtgagcagagatcgcgccactgcactccagcctgggcaacagaacaagactccatctcaaaaaataaaaataaataaaaaaataaagtgaggtcgaaactatgattttcttggaggacgggcccaaaaggtgattgattagtagggttaaagattaaatttgtgcttaaatttatatatatattttttctttcttctttttttcttttcaaagccattatgtattgctgcagtaccaatttcttttgccttagcggggaaacagctggtaccattgcaggcagaattcaagttccctgattaatgaagtggaggactgtttgaatctttaatgtcttacctttatgtgtaacttgacccctcagttctcctttttctttttttattcagccactcgacagctcaatttttctttttctttttttattcagctctcagttctctatctttttattgtccaaaaaccatacaaatggtgttttcttgcccacttttcttactcatgttgaggattggtttttctaaacatagcttttgtaaatcaatgtgtactgactgatttcacttccctgattrtatccttaaagcagctaaggtcattggttactataaatgaagtacacacaagtccgtgacttgtgatggtttgacttaggatttttcaacttcacgatggtgtgaaagcagtagacattcagtagaaactgtacttctgttcttcactttcagtacagtattatttattaaatacatgagatagtcaacactttataaaataggctttgtattagattattttgctcaactgtaggctaatgtaagtgttgctgagtgtgtttaaaataggctatgctaagctatgatgttcgcttcggtaggttaggtgtatgaaatgcatttttgacttgttactttcaacttatgatggatttgttggcatattatcccattgcagttgaggagaatagtggattctatgaagataaacttaactaccaggtaaaagacatttcttttttttaaaagcagattaataatatgtgaacgcctttggatttgttttatctaagtaagactttagattttgttgtgttatagatggtttgcaattgtgtttaacacataacagctgggaatgagtgccagagtattatttctgaatcttgcttacatggtagtgtgtgctaaaaattaagatgtaaaacttttgcttttattttacctcgacatttaaaaacactagtaaaacttgggatcaggtgaaaacttttttgttttacttgcaaaaatattctcttaaaaatattgtggtaaagagatctagcctcttaatgaattttaaagtatacattattgttggctataggtacaatgttgtacagcagctctctagtgcttattcatcttgactgactgaaacttcatgagctttgattagctactctccatttccccttctcccagcctctgctaaccatcattccactctttgatttttatgaatttgtattattttagatagtggagttatgcagtcatttgtctttttgtgactggcttatttcacttagcatggtgtcctcaagattcacccatgttgtgccattttgtagaatttcttttttttttcaagctgaagttttatttaaattgtaaaagaaatggttcccaaaaaatgctggcgaataaagcaaaaggataagatatagtgctcccttcctacgagttagccagcctatccgagtacagggtaatatatagtacttaatgctggtagaattttgcagtagtttagaaagattatctgtgcctagattatgaagagattctcagtgtgtgatgcttggttctgggtttacaccttactgggcatgaacaagagccctctccttggccatagccaaatcccttgggcccaaagttctttgcatagcaccctttacaatagatttcaccttctttttcagtcaggagttgttgattcaagactcttcccacactttgcacatcggaaatagtttttgttccagggctttccagctccagttaccttctcagcagcatgtacggaatccccacatctggaacacttctcagcacctctgtatttctgagcaaatttagaagtctttggatttgcttgtaggcatgtgaggctgaacactctggcttgatgcccaggctctcaccacggtccatgttaagtatgccagcgccctggccataaactgtagccttttggcccatacttctttccatagcaggatttgcagtaaatctcttaatcatgaattgccactgtcttgctatctaaattattcctgcaaatcatgcatagaaagcagcagcagtgggccgggcgcggtggctcacgcctgtaatcccagcactttgggaggccgaggcgggcggatcatgaggtcaggagatcgagaccatcctggctaacatggtgaaacccggtctctactaaaaatacaaaaaaattagccaggcatggtggcgggtgcctgtagtcccagctactcgggaggctgaggcaggagaatggcgtgaacccgggaggcggagcttaccgtgagcctagatcgcgccactgcactccagcctgggcaacagagcaagactcygtcttaaacaaacaaacaaacaaacaaaaagcagtagcggtggaagctcctgccattacactgcacctcttctgcgtggtgcacggccctcccgcagaccccacacttgtttccacctctccacgcaggcattttgagttggaggcaggagcacgcatcacaggcggagctagagaggctgggctggagggagtgtccagggagtccgagatcgctagaattttagaatttctttctttctttyttttttttttaytgagagagttttgctcttttcgccgaggctagagtgcaatggcgcgatctcagcttactacaacctctgcctcccaggttcaagcgattctcctgcctcagcctcccgagtagttgggattatagacgcccactaccacacccagctaatttttatagtagagaaggggttttaccatgttaaccaggctgttgtcgaactccttactgcaggtgatccgcctgcctcagcctcccaaagtgctaggattacaggcatgagctaccacgcccggcctagagtttcttttttaaggctacatagtattccattgtacatatattccacattttaaaaatcctttcatctgttggtggacattaggtttctgcagctatcactatcacattgtgaatagtgttgtggtgaacatcggagtggtaatatccgtttgagatcctgatttcattcttttggataaataccccaaagtgggacttctggaatatatggtagttctgtttttaaatttttgaggaagcttcatacttttttccatagtggctgcaccattttgcattcycaccaacaggattccaatttcttcacatcctcaccaacagtagttgtgttttgttttgttttggttttttgataatagttttccttacaggtgtgaggtaatattgtgttgtggttttgattttcatttccctaatggttaatgatgagcatcttttcatgtgcttactgcccatttgtatatgtttggagaaatgtctgttgatgtccttagcacatttttaagttgagttatttgtgtttttttactgttgaattattggagttctttatatatttggagactagccccttgtcagatgtttgcaaatattttctctcattccgtaggttgccttttactctgttaattgtttcttttgctgcgtagaagctttttagtttgatgtagtcccacttgtttatttttgttttggttgcttatgcttttggtattaaatccttgagataatcgccgacaccagtgtcatgaagcttttcctgtatgttttcttctaagagttttagtttcatgtcttaggtttattaaatcattttcagttgatttttgtgtatggtgtaagaaaagggcccagtttattttttttaggtttttacatgtagatatgaagttttcctgatgccattcctttcctcattgtatattcttggcatctttgttgaagatcagttgaccatatgtgtgtggacttatttctaggctttctttctgtgttcttgtggctctatatgtccgtctttatgccaataccatactgtttagattatggtagctttgtaatattaatatattttgaaatcaggaagtatgatgcctccagctttgttcttttacaagattgatttggctatttatggtcttttgtggttccatatgaattttagaatcgtttttccatttctataaaaaataccactggaattttgatagtgattgcgtagaatttatagatcactttgagtaatattggcatttaaaaatactaagtcttaacaaaacgtgagcataggtgtttctgtttttttgtgtgtcttgtttaatttcattcattgttttctggttttcaataaacaaacctgtcacctcattcaagtttattcctaggtagttaatttttttctattgtaaatgagattgttttcctaatgtccttttcagatagttagtgtatggaaacattactgatttttatatgttgattttgtatcctgctactttactcaatttgtttattctaacagttttttaaaaatggaatcttgcgagttttctttcttttttttttttttttttttgagacggagtctcgcacagtttcccaggctggagtgcaggggcacagtcttgggtcagtgcaacctccrcctcccaggttcaagtgattctcctgyctcagcctccgaagtagctgggattataggtgcctgccaccacacctgactaacttttgtatttttagtagagatggggtttcaccatgttggctaggctggtctcaagctcctgacctcaagtgatccgcccacctcggcttcccaaagtgctgggattataggcatgggccactgtgcctggcccaaaagggacaattttactacttcctttctgatttggatgkattttttttattttattaagcatttaatttattgcttaattgctttggctaggatttccagtactatgttgaactgaagtagggagagtgggcatccttgctttgttcctgatctttcaggaaaagtttctgttttttgctattgaatataatgttggctgtgggcttttcatatacagtctttattatgttactttctttttattccttgtttgtagagagtttttataatgaaagggcgttgatttttgtcagatgctttttctgcatctattgagatgatcatgtgatttttatctttgattctgttaatgtggtatattaatacattttttatatgttgaatcatccttgcatcacaagggtcagtagatttccctggtatgaaacccacttgatcatggtgtattacctttttgataggctgttagattcagttagctagtattttgttgggaagttttgcatctatatttattaaggatattggtctgtaattttctttttttgttatattcttcccttgttttggtgttagggtgatactggcttcatagaatgatttacggaggattccctctttatctttaggaatagtttcagtaacggtagtaccaaatttctttgaatgtctgaaataattcagctgtagatccatctggtactggactttttttttgttggcaattttttcattcctgtttcagtctcaccacttgttattggtctgytcagagtttctgtatcttcctgatttaatctaggagagttttatatttctaggaaattaaccatctcctctggattttctagtttgtgcatgtaaaagtgttcatagtagccttgaatgatcttttctatttctgtgttatcagttgtaatatctcctgtttcatttctaattgagcttatttggatcttgtctcttcttttcttggctaatgttgctaatggtctattgattttgtttatttttttttaaagaaccagctttttgtttcatttattttttgtaattttttgtttcaatttcatttagttctgctctgatctttgttacttattttcttctgctgggcttaggtttggtttgttcttgttctctagttccttgaggtgtgaccttagattgtctgtgctctttcagactttttgatgtaggcatttaatgctgtgacctttcctcttagcactgcttttgctctgtctcagaggttttgataagttgtgtcactgttacccctcagttcatagaattttaaaatttccattttggtttcattattgacttgaagtcgtcattcaagagaagattatttaatttctatgtatttatgtagttttgagggttcctcttggagttaatctccagttttattccactgtggtcagagaggatacttcatataatttcagttttcataaatttattgagtcttgtttaatggcgtatcatatggcctgtcttggagaatgttccatctgctggtgaaaagaatgtatattctgcaattgttgggtagaatgttctgtaaatatctgttaagtctatttgttgtagggtatagtcttaagtccattgtttctttcttgactttctgtcttggtgacctgtctagtgttgtcagtggattattgaagttccctcactattattgtgttgccrtctgtctcatttcttaggcatagtagtaattgttttataaatttgggagcttcaatgttaggtgcatatatatttaggattgccacattttcctgttgtactagtccttttatcgttatataatatccctctttgtctttctttttttttttgttggagacagagtcttgctctgttacccaggctggagtgtagtggtgcgaccttggcacactgcaacctctgcctcccaggttcaagcaattctcctgcctcagcctcccgagtagctgggattacaggcacacaccaccatgcctggctaattttttgtatttttagtagaaacgagttttcaccatgctggtctcgaactcctgcccttatgatccacctgtgtcagccttccaaagtgctggggttacaggcgtgagccaccacacctggcctcctttgtccttttttaactgttgttgctttgaagtctagtttgtctgatataagaataactacttctaggccggaagtggtggctcacacctgtaatcctagcactttgggaggcataggtgggtggattgcttgaggtcaggagttcaagactagccttgcaaacatggtgaaaccatgtctctactaaaatacaaaaattagccaggtgtggtggctcacgcctgtaatcccagctacttgggaggctgaggtgggagaatagctgaacccaggaggtgaaggttgtagggagtctagattgcatactgctctctaacctgggtgatgaagtgagactctgtctcaaaaaaaaaaaaaaaaaaaggataactacctttgcttgcttttggtttccattttcatggaatatctttttccatccctttatcttatgtgagtccttctgtgttaggtgagtctcttgatgacagcagatccttggttcgtggatttttatccattcttccattctgtatcttttaagtggagtatttaggccatttatattcaacgtgagtatttagatgtgaggtactgttgttttcatcatgctagttgttgccttaatcccttagttttttgtttttgtttttttttttcattgcatcattgttatataggccctgtgagatatatgctttaaggaagttccattttggtgtattttgaggttttgtttcaagatttagaacttgtggtgctggtttggtagtggcaaattctcccagcatttgtttgtctgataaagactttatctctccttcatttatgaagcttagttttgctggatacaaaattcttggctgataattgttttgttgaaggaggctaaatataggaccccagtcccttctagcttgtagggtttctgctgaaagatacactgttaatctgataggtttttctttataggttacctgatacttttgccccacagctcttaagattctttccttcatcttgactttaggtaatgatgactatgtgcctgggccatctttttatgatgaatttcccaggtatttttgagcctcttgagatttggatgtctagatctctagcaagaccggggaagttttccttgattatttcctgaaatatgttttccaaactttcaaatttcttttcttcctcaggaacacsaattatttttagctttggatgtttaacgtagacccagccttcacggatgctttgtttattttttttwaaataatttttctttatcttggcagattgggttaattcgaaagcattgtcttctgtctctgaagttctttcttctgcttgttygattctattgctgagacttcccagtgcgtttggcatttctctaagtgtgtccttgatttccagaagttgtggttgttttttatttatgctatatatttcactgaagaattttccttttatatcctgtatcatgtttttgatttctttaagttggacttcagctttctctggtgcctcctttgattagcttaataattgaccttctaaattctttttctggcaattcagagagttcgtctttgttcggatccattgctgrtgagctggtacgatcttttggtggtgttaaagaaccttgttttgtcatattaccagaattgtttttctggttccttctcatttgggtagactatgtcagagggaagatctgggattcaagggctgcttttcagattcttttgtcccatggggttctcccttgatgtggtgttctcccctttcccctaggaatggggcttcctgagtgccaaactgtagtgattgtttttgctcttctgggtctagccacccagtcgagctaccaggtgccaggctagtactggcgagtgtctgtaaagagtcctatgatgtgatccgttttcaggtctygcagctgtggatactagtacctgctctggtggaggtagctggggagtgaagtagactctgtgagggtccttggttgtgtttttgtttagtgtgctggttttgtgttggttgtcctccagctgggagttggcactttcaagagcatatcagctgtggtgctacagggaggatgcacatttgccctagagacacttggtcaagtattcaggtttctcaggcagtgagcaggcccatagagctcccaagagattatgacctttgtctttggctaccaggatggctagagaaagactacgaggtgggggcaggaataggggtgtctcagcctctccttgggtgagcttgctgcagctgctgttgcggggggtggggtgagggtgtggttcccagtccagtggagttatagtcccagggggattgtggctgcctctgctgagtcatacaggccaccagggaagtgggggaaagctggcagtcacagaccttaccttgcttccatgcaacctgtggtcttaaaggctggtctcacttccatcatgcctccccaacatcaccaagtctttttccaggtagccggttaccagggtggatactttgccccagaccacaagcctcccccttgagaaagcaaatggactcatagtttttaggcctcccagagaacctgcagtggtgatccaatttcttcaaagggtctgtggattctcttggctttcctggtttgttcctgtggtagttcttgtattgtagcaaaagttcatgatgtgagtctccacatgttgctctgtctgtcagaatgggagatacaagctagtcctgcctcctatccaccatcttaatttgagcatctagatatagtttcgaataatgtgtatctacctacaaagttcaggcatggaacgaggcaaataaaacaaacacaaaaactggatagcaaaactactccaatgaggagataaaggttttcaaaaagtacttgaactggaaagcctaggtgatactaaaacattaaataaaatagtatatccaagacccagtatgtgttaatatatgggataaccagatcgttttaactgctctggctaatcctcatttctataaatatgtagacaaaactagcactgctgtatggtrataactaccagtatactgctttgtcctttaaaatgtgtctgccrtactaggctcaaactattaaaccaagtttttctactaaggctaggaatgtcacatgtatgcagggatgagaaccttatcacacacactcacgctcacataccaggtctctcagcccttgggcgtcrccttccaactccatgtgtattttatgcatgtgatctttatatgtgttctttcgctgttttcctatcatgtgaaacacattaaacatctcaacacatttgcgcctggttttggttgcccagtagtattcttgtgtgcaatgaaaccagtgagcaagtacacatagtaggaattataccatcttggtagaaaacagctatataaacacggatgtacatatttcactggaaatctcaaggacccacctcttcagtctgtagcagaagtctgcttgccacatcagatccttttacccttcacctctattcttggaccccaaagcagggccagtgcttttagttttgtatctggtgtcctcaaaatgaatatggaaagttcataaacactatataagtactatgtgaatctggttgaaaacaggtaaaacaacaaacctacatatactaactggtagttaaatttatttcacaagaaaaccatctttaagattttttttttaactttttttttttttttgagacagagtctcgctctgtcgcccaggctggagtgcagtggcgtgatctcagctcactgcaagctctgcctcccgggttcatgccattctcctgcctcagcttcctgagtagctgtgactaccggcgcctgccaccatgcctggctaattttttgtattttttagtagagacggggtttcattatgttagccaggatggtctcgatctcctgaccttgtgaaccgcccgcttcagcctcccaaagtgctgggattacaggcgtgaaccaccatgcccggcctttttaactttttaaaatagagaaaacagtatattccttggggaaagatgaaggattgagaaaaccagctctgggtaaaaattattatgactgcayctggagttgattaggcctgcctaggaaagaaacaggcaactgctatatgaccacaggggacagccaccatctgagtctcagcagactagttcacacgccatgcaatgttgctgtatattcaarttgtaaaaatcatctagcttatcatgaaacaagctgcatttatcatcagagactgtcaggtcatcatctccacctgcagacagagcttaagcagcatctcacctatctcaaagatgacagactcttgtcactgttgtcaaaggggttgctgttctgtttcctcagtgagctcccagagttggttccttccttgggccctgtatctgtttatgttcccattttctgtctctggctccttttaccaccatcagggtaggcagacttggaacaattctctccaaatgggcagcttccatgttcttcgttaaaatacctacatgccttatcactcttcatctccttgtattcctgaaatgagtttctgctaccttctactccacgcagtactcatgtggaatgacaaagttaaatatggcctggcattctgggatggactttaccatcttgcttttctgttgcttagtactcctccacttgtgaacacacttgaggtgcaggtgtggttgcagctggagagcatctcaaagcagccctttatatatttagagagtatcatgcccctttagtgttttattgtttattatatgaaataataccgtttcctactctggagatttacagctactttgagcccatggaatacccccaaagggttttatgtaaagtgtgttcaaatgtagaccctatctatataccaactaccaaaggattagttgagaaacattttatgagtaaggctgtcatattgcatgctgggtactagagttagcaatttccaatatattattgatagaaaagtaaacattaataggaaattatcatgaactgactttactcaccttgtttagtctgtattgaccttgttggaagaaaagtattaatagctgtcatttgagctcttactagtggtaagtcaaatgctgtgttagtgtatttaatcctcaaacatctctgtttagccatattatccccaggttatatatatgaagaagatgaggtttggggatcttagaaataagagattttattgatctgtcactgcaggcagtgtaaatatatttgattcttcttaattttgctttatgatctcacaagatgaaataactatgtcatctatttcaattctcattgttttaagatttaaatcattttggggggaatcttctccaatgttttacttaggaacggttcaatgaagtctttcccctgtcctagtttgttttatagatttgaaataagggcatttcagtggctctaaaacatgtgtgtagcttttgtaaaattcctaatcttttctctaagtttttacatttcttrattatgtaaaaatattatgctataaaataatttcagtaatttgcagtaaagaaaggtaatctgtctctagtttcctcatatttattcaccgatatctcctcattaaaagttgaaaaatactactgctytttgttttaaagtatttaaacgtccaactgtactttttacataaataagattagaaaacatgaatttgattgttccagaaactcagtcatactgagagaagactttttttcctcagcaatttactattttttggagtaaatgcaaaaagcctttatgtgtgcaggcctctgtaatgacactctaatgtagtagaatcttctttgatttcatttgcttaaagatactgctttaaaagttttagggaaatattttatcctaaaaatgttaattatccaaggttgaaaagatcttacctgacagcttaaaaacttgtatctgggcagtaagatgataattttagtttcagtattattttaattgagtggatgtgtggcaattcaagtgttttcgtctcttaagtttcagtagtgggcagcttttgtctcccttctgttttcactcaaagcattttgtctgtaaagaatctcagcttaggactcaaaacaagtctgtgttgaggatttatttctagagttgtgttaaacagttttctgtagctatagataattacttatgaagctgcatcaagtacgtaccttgattactactatctcgtgactaactgcttgttcacagccttccccacccttcccaccagctccccttcactaacctgtgcatcctttgcttgtctggtctcttttacttcttgtttttctcctagtttgtgaatagctcttaaagtctgacttgttgtcatggtgcgttgraagagtagccagttgtcttttctgggtagatcagctatgagctgactgactaagaggagtagttamaatggagaaagcttagctgtactttgtcttgcatgttaaacrtaatgagtttagaggattatgattatttgtaatcatcaggatctgctagacaggacatctgttttactttttactcttatgttggtggagaaatagcgtgcttttcattcaatgtgaaaattttgtgttctagctgggcaccgatggcttagtttttgaaatgtaatttcttgagaagtagcatgtggttagtataaaattgtctttcctattaggactagctacgtaattagtctgaaatatttttctaactggaaaattagttgctgtgaacttttggatttttattattctagactgcattacacttgtttgctatattcaaatattttttctttggttttacttcctaggttgcacgttttcaaaaaatacctaatggtgaaaatgagacaatgattcctgtattgacatcaaaaaaagcaagtgaattaccagtcagtgaagttgcaagcattctccaagtaagtggttagtggggaggaagggactagatggtgtaaagtcagtcacttagactctataaaacagtgctgtctaatttacttttcttcagtgatagaaatattctgttctgtgccattcagcatagtagccacaagttgaacaggactgttgagcttgacatggggttaaacttgacagaattaaacatgactatatgacttgaaatgtggctagtgtgatggagaaactgactttaatttaatttaaatttatttaaataactacaggtggcttagtggctacctgattggacagtgcagctctagaacataatagcttttctrggaactatattagtgctgtgtaaggattggttggattaggaaaataattaacgtaagtagtggtaggagtttatctttttttgataagggttttctaaggtaaagtaaraacttaagtacaagtttagaattgcagataatctgtaattgcttatgtaggctcttcctggttttcaaaagtagtatctatcgaaacatgaaaaagataatattttttatttttccttcagcagtcacatatcttagtgatagcattaaaaacatgggtatccttttttaggtttttgttgttgttgttattgtatttatactctgctttaaaaccacttatttgtaatatgtttgttttgaaaggctcctttattggactctattataataaccttttggtcagggcaactattttgggggtacagataattttattctttaatagttagaatactaaatcatgagagagaataactgaaggatgtaggtagtgtttatagaacataaactgttccaagaagaagttcatctgaacttcactgcttttgagtaatttaggaagcacaaaatttgagcatgaaataattacacagtccaagagtataaattaataccaaccccagggttttgataggcccagagaacaaggaagacatttatggcccattgaacgttctttgggagaaactaattttagaaaatggcgaaacaacaatgaaaaggaaaaagctaattaaaatgtactgttatgctttctgtaagtcttgtggctgattgtgttatttttctccctaaattttgtttgtttggtaaactctgcctttttrtttacattttttttaaaaaatcaattttgttgagatataattcacataaaatacaatgtactttttaaaagtgtacaatttgcattttgacaaatgtaatcaccaccaccattaagatagaacatttttatcactccagaaagctcccccatgtccctttgtaattaatccctccctctctatgtgtcacttctggtcccaggcaaccactgataggttgctctcataatagactagttttgactgttgtagtttctgtaaatgtgataatacattatattatgtgcttttttgtgtttttcttttctgtgctaacattttcaataactttcatgtataaactctaataggctgatcttcagaatggtctaaacaaatgtgaagttagtcataggygagcctttcatggctggaatgagtttgatattagtgaagatgagccactgtggaagaagtatatttctcaggtgagatacttttacttcctcttctactgtgtaatttattaatacatggacttctgttatgtagttgcttacttttgtgatactgtttatggagaaaggaaataatttttagaygttttttacctaaaatttttcatttgttggggcttactgttaggttggaattcctgtatttttagtatgtaaatcttaaagacaacattttccatatgggtatattacacaaagataatactgttgacagtagtgtcctttgctgatatcaaacctacactatttaaatgataggactggcaatattttttaaggtaatcwtggccagctcagaaaactagtaaaaagtaagttaggtaagttaaactcaggctgcctgggtacaaattacaccttcatttcttaccagttgtgtcatctttattatcctctgagccttatctataaaatggtgatgataaccttacgggagatagttagctctcagtagatgatagttatttatattttttcatcctaaattttaggaaagacttattctagactgcttttatcttgataacgattgtgttaatgtaaaaagttacaggttactatgattagttttgaagtaattaggttggtttgctaaacaaatattttttgctaaaaacttctttttagtaaatgtctgtgccttttaacctgcggtctttctaaaacgatctatgtttaacttttctaaagtgccttttctgctaatgagcttaaatttgccaggcttaattttgcgaatgagtttgtctaaagtagcaacactggaattttaaaggttggatgaaccttgtgtgtatatgtcttatttttatggaatattatttatatgtgtctttgtattttcatacttaccacattcccacattaccaaagacttcagaaagcattaacatagtttactctggatttataaattgtaatgatttgacttatccctaggcagtatgatttaatgttttactttcttgatcctgttaccaaagctagagcacctgccccttgggattcctgtgagaattaaatagtgcctgtaatgtagttaagcacaactaaacaaataacagtaaatagtaatcgtaatcacaaagcactgggtgattctttattcctctgcagcctgccatccatcaagtggtgtgcttagtaatgtggcacagcttttttaggggaaaataaaaaagatcatgggtcttgccctcaaagtgtgacgttaatagctaacatttttaagaactttttttggtttacacggtgctttaatgtacattcttagttaatccttataacagttctttggtataaggttctgttttaccagatgaagaatctggagcttaaaaagattaaggtgacacacagatgccagcaactggattcaaacctaggtactctgactcagtcaggtttgtggttggtcagccctgaaccatattgcagttgcagtgttattttattagggcagtttaacttattattttttaaaaatcctcgttagaatcacttggggagtgcttaaaaaatgctaaagcctgggccttatgcctaaagattttgatttaattaacttggtgtgaatctgggcattggtattgttaaaagtttcttataggattccgatgtgaagaaggattgggacttgttccagggaatggaaccataaaggggctttggaggtggtggcatgtaacctcagagctatggtatctaagggctggggctttctggtgggatggattctttttagcctaattactttgcaactttgacagtgatgtaacactttagcagaggaagagattctaacatcagagtttcaaggaatagaatgtccaactggaagaatttggggttgactctggtgtgaggtcatttaaatgctttctgatcaggttgatgctatagtcctgtttctttgatatgatttgctgtggtagatagaaaccaggaaagctagccttgaggaaaatcttcagtttcttttgtggagaggagggaatttttctgtgatatgtgagtcaaccacagaattgtaatctacaccattgtacttgagaaatgtttgaatctcagtgttctattcagtatttcgcccaaatttttagcttaaaaatcatcttctcctgctttttctagcctcagtagaaattcagaacagctgtatttcttaaattaatataccaaaaattgctgtatactataaggaattggttaattcttagttttaagtattgctatttaattttttttttctgaaaaggaactgttaaaaagcttttaaatgtagttaagtataaacgctttttttgttaattgaagagatacataaaataaactgagtatagacttttgtaattttccagtcatgctcttatggttttttttttttaaagcctttgctgagagaactgtcatgtacaaaactgtgttgaattgctgtttgtttttactttcagtttaaaaatccccttattatgctgcttctggcttctgcagtcatcagtgttttaatgcatcagtttgatgatgccgtcagtatcactgtggtaagaaaaaaattacatatttttaatctgttgagtaagtgtataaattgggattggtttttattttggaaaataaattgagaagtgctctcagatttttttcagtgtccaaattctgcttttattttattctttttgttgcgacagtttcttgttgtattgcccaggctagagtgcagtggtatagtcatgactcactgcagccccgaactcctgggctcaagctgttttctgcctcagcatcctgagtagttgggactacaggtgtatgctaacacccccagcaattttaaaatttttttgtaaagacagggtcttgttatgttgcccaggctggtcttaaactcctggcttcaagtgattctcccaccttgacctccccaaagtgtcgaaattacaggtgtgagccactgtgcctggctcaaattctgcttttattatagttacagtaattttgagtaatgttcaaaagtccatgattagcacacatgaaaattctttaactggtaattttcacaaatatgaaattttataattatctgattaaattttaaatttatttcactttgcagttgagaatatattttgactagttgtgaactaaagcctgacatgtgaaattaaaaatattccttatagtgcatgctgtatttacagcatacatttactatatatgattttattctttccagctaggttattctagctttcattgaactgttttctcatctttttccttcttgctccatttcatttttgtataaaaaatttgtagcaagtaaaagcacttatgcttaagaacactgtagatgttattgtagagatgcagctcttgaactattgcttgcagtatcccaggtatccctgagacctgttcaaggggtatgtgaggtcacaaccattttaataatactaaaacattatttgtctttcaattatagacttttggcattaatggcacaaaaacaatggcaggtgaaactgttagagccttagcacaattcagagtaatggcacccaactttgttaacagtcattgttttctttcatgtttcttaagaatgttcttgataaagcagtaaaaattaattttattaaatctggacccttgagtacataccttcataataatttatgtaatgaaatgggaagtatgcatgaaactcttttgtatattgaaatacaatggttgtctcaaggaagggtgatgattgtgaggcaaactagccttgtacttgaaagactgactcatagacaaactatgggtgttaggacttgggtaaccagcagattcttatttttgaaagtgaattaaatgagcgaatcagaccaaggaaaggcaactggcagaatttgttgctaatgataaaattcaggttttcaagcaataattagggttttggaaaatttgtatgcactcttatgggytggatagcatcccagtatttaagactttattccaattagatcagtagtgatttcaacaaatgtgtgttttttttaaaaaaaaaattgttacgaaatgtggtaaccttggggaagatttgggcaatcttggggaagatttgaataaccaagtgaaccaatatttcccagaagaccaatgcgtgacattacaaaatctgaaatggtaaaagatccattcaaatgcaagataggtcaatggatttcgatataatagattatgaaaggtgcattgatacagttttatattctacattgcagattacctttaagtaactagcacttgagttttggtgtagtagctaagaagaatatccacaatcatctgaaaaagctgttaaaatactcctccctaggctgggcatggtggctcatgcctgtaatcccagcactttgggaggctgaggcgggtggatcatgaggtcaggagattgagaccatcctggctaacayggtgaaaccccgtctctactaaaaatacaaaaaaaaaaattagctgggcgtggtggtgggcacctgtagtcccagctactcgggaggctgaggcaggagaatggcgtgaaccccggaggcggagcttgcagtgagctgagatcacgcccctgcacaccagcctgggcaatagagcaagactctgtctcaaaaaaaaaaaaaaaaaaaactcctccctaaaaaaaataaaaaagaaaaaatgctcctcccttttccaccgtatctgtatggggctggattttcttcatacactttagcctgaacaatatgttatagtaaatggaatactagctttctagaaagtcatatattaaaatataaaaatttaaaacactgctatttttctcacaatttttttggaaaatttatttttcataaagttatttgtgttagcatgtaatgaggtttaaaattttttacatgagttgatgagtagaaattaaaactgactagttgaaaaatttgatatggtaaatatcagtatatataacccacttaaaagctggtcctcaatttgtgagagcataaaagggccctgagatcaaaaagttagagaagctgccctggtaatggcaagccactgtaaactgttagcttctttccccacaggccttaaggtaaagttgtgatttcttttccagctgatctcagtgtttaaaatctgttattgtgggactgcagatagttagaaaaataaaatacagttaacagttacttctcaagttaatgtctgatttaaaagcctgtttcttttgtttaggcaatacttatcgttgttacagttgcctttgttcaggtaagtactctattttgccaacatgaaaatggtatgttaattgcttaaaaatcaaggtgtcttgtggtagaacctaccgttattggggggttgtaatgcccatcagaacaacttattctttgtttttcaagtaatttcagatacagacaactcttcagggaagcttgtggtgtgggactaaggaactgctttgatttaggtagtgagatgaagaaaatctagttttttatttgataatgttaaggataactgaagcagatggaaacaaaaagcatagtaatagaaataaaatccagcagtaaacttttttattttttcaattaaaaaattggaccagagtttatagtttcataacactgttatgttttaatgcctactagagctaagtctagatgaaacaaaaaagtatagaattaaaaggtcgatctgtgatgtaccatttgaagaaaattccacaggtttctgtgactgattcccttagccaaatgctacacttgtttgctgaatttatcacttaaccttattttatttgagtctgttttgaggaattaaaatggttctactcattgttggcatgacctcctctcccctccctttaaaacaatttctcattcctccacaaaaggggtgttgtgatctgaatcaaagtaattcaaacagtaaataaaacatatgtaaagtagccccttttaaaaattactatgaataatgtggagatactgtcaagatttctattaataagtacagacaaataaaaatgtaggcttagttttatgtttatttaaatatctgaaacttctgtagattttagaacagtgtttcacartatcagcagatttcctttttagctagaacatggttaacaagaatagaattattctagcttagagaaaaatgtaatattgttgcataagcctgaagttcgtgctgttttgaatctgaagcctatactttgaataactatggttgttcttacatctacgatttattacgtgggtatttcttgtcactatcccagcctcttaaggtaatctctaacctagttgttattagttctgtagtaacccagtgtagaaagccagttggaatcagatcatttgcagtaggtttgtgagctccattagtagactatcagggttccgcttttaggggaatcttcttgcttagayaaatgttgcccatggtcaggtggagctggttagtctagcataggtcatktcaggctaaccattattcaaggcagctattcattcagccaagtgagtgatatgacccactggaccactaactggaccttcttgcgtctttaagaatgtgtcagatatgtggagtgccctacttcagaaggattcctgcaaatagtatcactatgtatggaagaccttagtaccttgttctctttgatcactagaaagcccatgttttcaaaaaacaccacaaaattgtgattttaacataagtcaatatggaattttacacaagatagtgttgttatacacattaaatgctatggctgagactattaaatatgtttatgataggtacatttgatagaaatctcacaaaaggatgaaaactttataaaaagcctagtttcaaattgctaggtctgattcttacacacatgtgacccatcaccaaatatgcctgtgaaaccaacaaaatagtctataaacaagtaaaaatcctctccaaaaagatcctatttactgtcagttgaacttatcataatgctttaatcaaaaagctctttatcaaaaatgtataaaaaattcttaatactttatcattatttgttatttgtgctatattacttgtgtcttaagagggctttttatattcctttttatatttatgtcctgccttttttccgtgtgtctttgcaatccccattccccacaccactgtacttcttcccagccataaaaatagctaattgttttatatagtcgtaatgaagtcaccttacaataaatttgaaaaatgacttttaggcatttattaggttttaggtggtatgtttaatgatcattttgatatagaggtatctttataattgtagggagtagaggctaagaaaccagaagacataagtaaagattgggcagcatctatgtcatttattactgggatctaggattgatgggtattttctagcatattacagaatttttgggtaaacttccaaattccttaatatccttcatgtgtttggggtgttgtcttatgatttttacatttgtagattttccttatatttgtcactctaagattaagtagagactgattgtgttctaagttattcttacatagccttgtgttttctatttgaagtttgtgatggataggacattttgactagtactagcactgcagtcatttcaaaacattcccaacccttctacctccactatttgcctctccctcttttgaccttagattagaagattcttttgcttactacagacatgaggcaaaaatagcagtgatgtgtgatgcaagactgctcatggaaatgtggactaagtagtattgtgagttgaaggatgtttctgactgaccctcagctatttgttatctggatggaagaaggctagaaatcacattgttagaactcctgagaattttcctttttggatacacaggttgatgggaactgggtctgtcagtatagagccagccacatcttactccttgtttatcccatgtttgttctaatggtttactttgtaaaccattgctgttagcatgggcttaaattcctaaagcagatgttgtttacggttaattatctttgacttctgtggtcattagacacttaacataagattatctaaattttaaggctcaatgacttaaaacttttaatgactcaaattatgtactctttggacatactagtcagttttcatttttattctaaataaccttaggtttgtacattgaatattaaaatgtaaaactgggaatatttaattatcaaaattgatctctacatttaacattttaaaataagggacaagcttttctgggtaagaatataagcacaagtaaaggaaaagatgagaattgggggaaattttaaaataatgattgagattaataagtctaaatggaatatattcatgggagcaaaattaaattctacttttttttgtttgaataggaatatcgttcagaaaaatctcttgaagaattgagtaaacttgtgccaccagaatgccattggtatgatcctttttttggtatggatttctgcccctttaaaaatagaagttgaatgtgactagtaccgtacatattgttatccccactttgtctgaacataaggaagatactattaatctgacacaaaaagttcctggtctcattaatgtagcaaaactgtaccattgaaaacyttaaaatccgagattctagagacatggatgtatttaacagattttttttttttttttttttttttttttagatggagtctggctctgtcacccaggctggagtgcagtggcacaatctcggctcactgcaagctccatctgccgggttcacgccattttcttgcctcagcctcctgagtagctgggactacaggtgcctgccaccacgcccagattatcttttgtattttttagtagagacaggtttcaccatgttagccaggatggtctcgatctcctgacstcgtgatctgcccacctcggcctcccaaagtgttgggattacaggcgtgagccaccgcgcccggctgtatttaacagtgtgtgtgtgtgtgtgtgtstgtgtgtgtgtgtgtgtgtgkctgtgtgtgtgcgcgcacgcgcgcatgcatgcgcgtgtccatgcgcaagtgtgtgctaagcmctgttctgggtatagtgattcacaatcaaacagacccaggtgattcaaaaggttgcttcaatttgcacattttacatttgaacaaataatttgtttttcaagttattttctgtcatcttggcatcttaagtgtttagaaacagtctttttcttggttcttatatttgccttttcctcagacaagcctactggaaataattttttaagacaagttgcatgaattttttttttttaaccatggttgtttctatttcgtgttacagtgtgcgtgaaggaaaattggagcatacacttgcccgagacttggttccaggtgatacagtttgcctttctgttggggatagagttcctgctgacttacgcttgtttgaggtaaatttgggatctgattgtaataagtgaaaatacgtggatgtagattaaaggataaacattactagttttaaggaattaacacatagttgatttgaaccatttggtattctactttaaaatgtgacatatataaacttttttttttccttaaaatgtatctgtctctactgtaacatcttttgaggtgtttgtttagtgaatcagcagatctttatagaaacctgcatattagggactgtgggagatacaaagatgatatgacagaatacttgtgactagggaacatactatgtgtacacaaattactcaccataaaatagaactcagtaattgagtaagagaagttcaaagaataggatatagacatttaaagaagggagaggttccacctgatttgaatgagatcagaatatgcctcagaccacatggctttggcrgtgataattgaagagtagtactggacaaagatggggaagacaatgaagcaacaccattcaaatcactatgaacattccagtgtatgaaactctgttgggacatggtaagggtagaaaacgtgtgatggaatcagatttcagaggccttggatactaggcttaacttcagatttttttggttaggagttaccttttgaggctcctgtgcagttgctaaataatgttatccttaatctggctacagtgtgtagaatagattgaagaactggaaaatggagataggcacctagtttaacaggctttcaaaacccattagtatgcaggtcttatcyaccattggaattaagctgtttgttaacacctgcagagcagtcagtctttaaatactatggccaaaagtatgagtgttctcatagatgctgtagaaggcctgaaaaacctttcagactgtaataagaacaaacttggcttaatctttcagcagaggccttttttccaaatatttgaaatttatccttagaaagctactggattgctttaattgggtgactaggaataattgataatattgcaagtgttactaattttacttcattatcctttttctcgtctttgaggtctttttaatgttaattcttttctactcttctttccttcagttcctaatattttgccgatgacaataccttgaattattcttcctcagagattaagtagtcttgtcacttggcataagttttcttccccctcccccagaaaaccctaatttaaattcatggagttcatgccattctttattctgggctgctgctcttccagttgagaagcagaacttctcattgggatagttagaagatggtgtttctcatttgcatggttcgagaaatataatgatagaaacttcaaaacaccattaatgcttgctaaactattttagggttttcatttaactaagggttaattgacttgacagttaattatttcaaagttcacatgtaaacaggaaagaaaacctgtcagtatagattagtatgtattttatctactcagcaaatatatattgaaaacattgtgaattttttatttttgtttttgagatggagtctcactctgttgcccaggctggagtgcagtggtgcgatctcagctcactgcagtctccatctcctgggttcaagcaattctcctgcctcaggctcccaatagctgagattacaggtgcctgccaccacgcctggctaattttttagtatttttagtagagacggggtttggctgtgttggccaggctggttttgaactcctgacctcaggtgatccacctgcctcagcctcctaaagtgctgggattatagtcgtgagccaccgctcctggccgacattgtgaatttaataagaattataagcatatgtcttgtggagtaatttattagttattattgttttccccctacttgttaactttgcaagcacttcatcagcacgttttattctgcagtactgtagttaggttgattttgttctagttaatccacttttacgtatatagttgaacattttttattctctctaccttaattctgccttatttgttttgcctgtyacttgctaccccaaacagacttttgcaactactttgactgcagattgaaataactttccttaaagagttggggatcttttatccatctaaatttaaatgtactgacttaggatatagactgataaagtcagtttctcttctggacacagaagctgctagttttttgaaagtaaattggcttattggagttttgttggctcagtttggctgtggtgatctttggataattttgtaaggctagctggtcatttgatactactgtatgaaataaactgtcattagggtttaaaggaaccagaaaactccttagtcagctttgggatatcactaatttcttccaaagcacatagatttcactttagagaaagcaagtctgtgaacttctgctatgtagttagttctcttacagactaggcctaaagccacagttgcaactttagtgtcatcattttgtaactgtcataaattttagtgctttcagagtttgactgtaaacttgcctgggtccttagcagcttcttgttagcacattcagtgacttgactgttgtacaacttttatctggtacaacttttatcttcataggttgtgtcttagcttgggttgctttaacaaaataccatgccatttatttttcacagttacggaggctggaagttcaaggtcarggtctggcagggtttggtttctggtgaggactgttgctagcttgagatggctatcttcttgcagagtcctcacatggcggagacagcaatttctctctcttcctcttatacggccactaatggcatcattaggactagcctcatgaccgcatctaaccctgattacttcccagggccccatctccaaatactataacattgactgtagagctatatagcatgtgactttttgggatacatagttaagactgtaacaggttgagactgccattttgtttatactttttaaagactaatattaataacttaaggaattgtgtagtttttcccttgcctgtgtcaggttttcagaagccagtggttgagccaagatagttttcccttggtatccactgaggatcggtcctagtagatccacagagagcaaaatccaaagatgctcaagtcctttacatacaattgagtagtatttatatataacctctgcacatttttctgtatactttaattcatctctagattacttataactcctaataaaatataaatgctatgtcaacagttgttatactatatttttaaaagttcgtattttttttactgttgtattttttttattatactttctttgaatattttccacctgtgattgcttgaatccactgctacagagggaggactatagttggtggcagtggcctttccagcaggagcctgagaggcactgatggagctaggacagtaaaacttagaggaattgagctttgggcatgttatttgtttttttttcccccgagggtttttattttaacttttagtgttgagaagaggcaccactggccaattacttgatgataaccaatggattggtcggacaatgactttagatgaagcaatcttattgactatgtatgcctggataacagtacattttatttttatttttatttcatttatttattttttattattatactttgttttagggtacatgtgcacaacatgcaggtttgttacatatgtatacaagtgccatgttggtgtgcagcacccattaacttgtcatttacattagatatatctcctaatgctgtccctcccccctccccccaccccacgacaggccccggtgtgtgatgtttccaaccccgtgtccaagtgttctcattgttcaattcccacgtatgagtgagaacatgtggtgtttggttttgggtccytgtgatagtttgctcagaatgatggtttccagcttcatccatgtccctacaaaggacaagaactcatccttttttatggcttcatagtattccctgctgtatatgtgccacattttcttaatccagtctatcattgaacagtatgttttgcctttgtgaaaacacagcatatttttggtgttgttccaggtaaagtctatatcaatatttggataaagaactctttgtaagaaaaaacagcgtgagggtcagatggaaaaaggttgtgggtttttttttttttttggtcttttgaaaatattttacttctctcagctataactttctaagccgaataatacatcgcttgaaatgatagcaagattttctttcatttgaagttctgaataagtccattgacactttgctttgtggttcatgtgcttatagttggcccccatcatttttttaaacctatttttgatctgatgattttctaaatgtatsagacttctttcagagaattaccacttgggctagcaaccaagattaagctgtttttatgatactggattatcagaccattttaatctgggcagaaaggttagttctattaggagttagggtctaactggggccaagctyaggaattcaaacttaagaacacgccagtgggcattatattgtgagccattttttaatctcatgaatccttgtactttgttatagtatagcagtttggctcagtgagtagtttctggtgttttcagggcttgttcctttctgttccctagttctaaggagaagtaaaaaccaaagataatgggcatcattgagccagcacagatatactttagctacctgccacctgaaggagtcagaaataatctccttgactggaaccccatgtagccattatgttcctatctgtgaggctcacattcttgcccagtctgttgttaagacccgctaacaagcagcttcctccacgttgkgtaaatccattactggagcaatcactctgtgtcaagcattctgatttcctgagttaataaaatacatgttccatttactcartgaaaaaatactctggtaaaacccaggttacaattctgatttggtttggtatgctttttcaaaaaagaatgttttcaaatatttgataaaatgtaagcatgtagtgatattttaaatttacttatgttggtaatgaagctaatttaggcaattgtaatccatttcttaggaaatcagtctgttatgaaaccattttcgccatttagcacatatttgaaaaccatgtacagcacattgtatcaggcttcagggcttagaagtgaaaaagacagtttgwgccctctccattggyagacaccagcttgcaaacaactgtgattcaaagaatgatatgtgtctgctcatgaaatgaattgaccatgtgagcctaggcaagccgcttgattttttcaggcctgttttgtcactgtgacacagagttgccctagagcaatgcattccaacttctaatgtgcctaggaatcagctgggctctgttttggtaggtgtagggtggggcctgagattacgcatacttaaccagctcttagaccatgccaaaagcactggtccatccaccacattaaaaaaaaaaattattaaaacagcttttttgagatataatgtgcatatcatacagttcacacatttaaggtgtatcgttcagtggttttcagtatattcacagttgtacacccatcactacagtctaattatagagcattttcatcactctcaaaggaaaacccttacctcttagcattcattctgtattttccctgcctctagcagccactaatctgcttgccactgaaatacatgtgcctattctggacatttcatataagtagaatcatacaatatgtagtcttttatgtctggcctctttcatttaatgtaatgtttttaggtacttcattcatgtatgtcattgttttttactgccaaataattttccattgtaaggatttatatcacatagttggtgaatttaatccatttacacttacagtgattactgataggaaaggacttctgttgttacttgttttctatttgtgttatctttttatgttcctcagtttctcctttgtgcccttctttgttttttttccacgcccctccaattgattttttttgatgtaccttttttattccctcaaattattttctgtgcatactgtttacttattttcttagtgattatatgtggattacaatgaacatcctaatcttataacaatctatttgaagtgatactaactttgcttcagtagcatacaaaatcgtacagcccacacctccctcatctttgttatttttgcaaatgacatctttatgcattctgtgcccattaatatagatttataagcattttatgcatttataagtttaattatataggaagcaaacacaggagtcacgaactcaacatacaataatactgacttttatgtttacctacatagttagcttcattggaattctttatgtcttcatatggctttgagttactttctactttcttatttcagcctaaagggctgtctcttagcatttcttatgagtcaggtctgactagtgatgaactctttttgcttttgtttatttaggattttaaaaatttctccttcatttttaaaagataatgttgccagatagaaaattattggttgacagttttttttttctgaatattataaatgtctgctctttttggcctctgtggtttctgattaggattattaatcttaatgaaaattctgttatgtgataagttgtttctgtggctgttttcaagattctgtctttatctttcaatggtttgattataatgtgtttaattgtggatatctttgagtttattatatttggatttcattgagctccttggttgtgtagatttatgtctttcatcaagttggggaagttttcagccattttatcttcagctattctttctgtcgccttctcttttttccttctgagattgtactggcatacctcattttatcatgcttcaaagataatgcatttaaaaaaatatattaatagatttgtggcaaccctgtgtcaggcaagtctgttggcaccatttttccaacagcatggtgcttactttgtatctctgtgtcacattttggtaattctcacagtatttcgaactttttcaatattatgtctattatggtgatctgtgatcagtgatctttgctgttactgttaaaattgttttggggcatcattaacgatgttcatgtaagactataaatgtaatgagtaaatgttgcgtgttttctactgctgctctgcccgactgctctttccttctccttgggctttcctgttctctgagaaacagcaatatggaaattaagccaattaataaccctacagtggcctcttaagtgttcaagtgaaaggaaaaattgcatgtctttcactttaagtcaaaagctagaaatgattaagcttactgaggaatgcaygtcaaaagctaagataggctgaaggctaggcctcttgcctcaaacaattagccaagttgtgaatgcaaagaaaaaattcttgaaattaaaagtgctattccagtgaacacacaaatgataagaagtaaaacattcttattgtggatatgaagaaagtttgaaaggtttcgataaaacataaaagcagccacaatatttccttaaaccaaacctaatccagagcaggaccctaactctcttcagttctgtgaaggccgagagaagtgaggaagctgccaaagaaaagtttgaagcttgcagagattggttcgtgaggtttaagaaaagaagccatctctgtaacatataagtgcaagatgaagcagcagatgttgatggagaagctgcagcaagttattcagaagatgtagctaagatcattgaggaaggtggttgtaccgaacattttcaatgtagatgaaacagctgtatcttctgaataactttctgtatactcgaatcagaaagttagcaatttatgtaagcatctaccacgggataaaattaatttcatatatcgttttcagtaatacgtaacataacacttggttggtttggctttgagtgttagtaagttaaatacatgaagattttaaattacatttttcttcatttgcataaacagtgaggtatgttaatttttgagaacagaagtaagaaattttatcatgatcaggcagctacaggtgaatattttggaagattgttttctggggagagaaatccatttctaatctgcattttaatgatttgcttttaattctagactcgagaggtgattgccttatcagtgtaccgtatgtcaaaccgttctttagcttaagaacttatttgtagctgccagttgttccatattaacctgaatttttaaaagtactttctgcctttcaggaaacctttgtgactggcatttgatttctttctctctagtgttttatgggaataataatcttgtgaattttccaatcatttttattgtgtacatgttaaatatttagactgtggattatatagtcgtcttgattcttatttatattctgatttttgaactgttttatagcatattcacacctccaccagactgcttgaagaagaatgaaagtgaaaatcagttttcttgttcattaacaggtcttctgagggtttaatacttaaacttctggctggctgtcatggggctgcctgattctttgatttcactttatcctacctttccctctctcatgaatgcaatgaataatgactctaatatctttcttctcagacgaattaaattgtgactttattaaactgtaataggcttgcctaatttattaaattccaccttttctttccctctactccctcaaaactacttcctaggaaaactcttgcaatcactattaagagaaaataacttgtgacttagaaagtattcgtattcaacagatagttgaaatctttgcagattgggacattgtaagatttagacaaatttcatgatcatttgagttttagttgcaaatttataatgatataggaaaaaattagggtcctgagctcctttttcttccacatcagcttgtctgttccaccagacaagggctctcttaagtgattgttgttctgaggctgaaaccaaagagctaggttgctgacagagccatgaaatcatgcttttctctttttaaaaacaacagattaaaaaaaaaaattccttctctgttagtcacttcatgttagtatttatccatgtttaagatttacatttaaagcaaaagtcttcaaagggaaaacatgagttttacttctcttacagaaggaattctgtaaatttctacaagtatttttaaatattagtgggtctctttcctaattaagatcttggaaagttacgtgcaactctgactgttgtaacaagcattaaatatgagcttgctaaataaaatgaaccttatataaatttacttgtaattcagataatacataattttttacatatctttgctttatgtgttatactgtctttttctataagtggttacaaaattggggaggagaaataatttgcagattgatcctctaaataattaagaggaatctggagttaaagtctttcaacactggaattttatctgcatagtgttgtacctctataacgttggatgagttacttaacctttcagtgcctgtaaaacagataataatagtaattacttgcctcataggagttgttagtaggattaaatgtgataatttagcatagatatgtagcatagtgcctagcagatggtaagcaatgaaatgtcagctgatttttagtattggcattatctttgaagaagggcccattttaagatttgtttctcttaccttgctaataaatgtgttagtgtgaaaagttaaatagttccaaggttaacgtggaaataaaagtcaaataaatatgtttctttaataaagaaaaattcacttgcctttgaacatgacaggtgttttttaaatcttcagttgcgttaaggtaatgaactcagatttattaactggtttgtgtttgtatacacaattaatgttaaatgcaaaatcctttaaagtctaaatgactattgatctgtattttaaagaataatttttgtaagcttattttgatactaaaatgcattccactgtcatattatctaaacttctgggaaatgctagcacaattttgtctctttggagttatatttattttcatgatgaatattttaaaacttaacaacctattgtaaactgttatttttgcagttatgtttgcytaacacacaaacacaccaagcatgttcctgtccccaaggtctttgtactttttgttgcctttacatgaaatccactctccctaattatggcccagccttggagctctcaggtctgtcagggctctgcagaggattacctggttttggggaatgttttcttctaaaatgtggctctatctttattatgtttgttgttttcccyctacctggcattatgttatatactcgtgcttgtttaaaatcactttcccattaatatccaagggtagaaactttgtttcattcactgctgattatcctactgtgtatgataaagcacagggcctggcacattgtaagcagtaataaatatttgttaagtgaatgtaggaatgttgttgatcaaattaaaacagttttgttgaggagatgaagattctgtgaaccaatttttaataatcattttacgtgaggttatttgaggtttttatgctcagaagtgaaccatttgaaaagatgtaatttataacttttcaccccccaccaaaagaaaagaaaaagaagatttaaatttagaatacttggtacatagtgtgaactgagagttaagaaaggcctgattgagaatactgactcagcctaaaatatcagtgatactgtgcagtaatttatcctgttttcttaccaggagcttgctcagtgcctaacactgatagtcagtaaatgtttgttgggtgaatgaatgagcctgtaaaatcagtaaagtcatgaactaattcctagtttcttacagagtatcctaaggacccttgaataaatgcttctggaataaaatggatggaaatttgcaacagaatcacctggagggcttgtaaatactgtctgttaggtttactttttccaccctgtgtttgaggtggagcaaaggactcttaacttctaacaagttctgaggtagtggatgtgatgctgtcctcctttcagaagctttgctgtatatctgtattcctgttgaggtgattcatgttaatgtattgaaggttttgagagcactgcagtagaggaagctgtttaactcttaactatttctgacttacttggccctagtcctctccctcacttgttcgtatgtatgtatgtatgtatgtatgtatgtatgtatgtatatatgtatgtatgtgtgtatgtatctatactcataaaattgttttttttttcttttttctgtatgcttgggtaggtaaatactgtgtcaggagtgaagccttcaaaactgagccctgttgcagagttggaagatattatgatagttatgatctgcatgaaagcatttgtatacatttttgagtcttgcaaattgtaatttggaataaacggcatgtataacaataatgattttatgaaaattgattccaaaatgatgaaatgatttctaagtaacatttttcccctttattcatttatcactttcagtcatcgtcgatggttttaatctgccaagccatatttccagaactttaggtacttgacaaaattaggaaataatattttgtcatgaaaagttgagttttctctagatgaagattgagtcttagctagtgtcaaatttttcctagttgtattttcaattttaggctaatctagtctcatggtacagcattctactttgcatgtcttagattttgttgacttaattgtattttaaaatatgattgtactgattctggtcttttagagtgatggttttgatacaagatgtggctaatcaatggaaaagggatgtttgaggaagaagtgatgatggttatgaactctagagatgttaaatgtagcacaaaatttgaatctgggattctttatgttccctaaggctgtggatctttccattgatgagtccagcttgacaggtgagacaacgccttgytctaaggtgacagctcytcagccagctgcaactaatggagatcttgcatcragaagtaacattgcctttatgggaacactggtcagatgtggcaaagcaaaggtaaatttttttcctgatttgaaaaaagcagttcctttgtttgaaactattttctcaattattttttgctgattttatgtggaatttttcaaatacatgacaaaggataaaattgaacttaacccattacatctatttgtgaaactggggagaatctgtgtccccaaagtataatatttccgtagttctgctatttcccagataatggataatcctcaatacctgtttctttttaaagagagaaacagtgttttcatggatgtgtttattattaaataaattttaatttagttaatatgatactggctataataatctgactatatgttgttcacctgttgatcgatttcaaatgcttcctttcctgaattctgatactccaccagtgcaaaagacaccattcactaggggtaaaaagaaactatattaaatgtctcctattgagtataatacatgtttgtatttcagaaatactaatataggcaaaaaataggcctcagaattgagtctgctatacgtttttttttgagacggagtctcactttgtcrtccaggctggagtgcagtggcgtgatcttggctcactacaaccttcaccttccaggttcaagtgattctcctgcctcagcctcctgtgtagtagggattacaggcatgtcccaccatgcctggctaattttttgtatttttagtagagatggcatttcaccatgtgggccaggctgatctcgaactcctgacctcaagtgatccacccgcctcggccacccaaagtactggcattataggcgtgagccacagcacccggccagcaatacgtttaatgtaatgtttgtttccagagtttaaatcataaggggcaaatgctaatgacaggaacataaaaaagtaaatttgctgaggaaatcttaggagtgtgtatgttagacatcttcactgtaggtaagactttgaaagttgttggatgtgtgtgtgtatgtgttttggtttacatttcatctggatgtaaatgtattttcctgtttttccccttagggtgttgtcattggaacaggagaaaattctgaatttggggaggtttttaaaatgatgyaagcagaagaggtgagtacttaatatgttaatgatgtatttgttccaaatctgaaattcttcattgtaagtagagaatgttggattattttatatactattgagagcartattttattcagaatggaaatcagttgtctctgtttagaaacataattggaaagcctgtaattgaaaaggtctaaattgatgttgttagtattctaaaggattttgagctttactcattgtttatagcagaaaaaggcttatagccacttatttgtagatcttattattttcagaaattagtgttgtggtaattttaaggattagtaattagtatatttgtaccttggaatatgtcttctatcaaattttttcaacttcacataattccaagtaagggtggcagggaaaagattgccaagtaaaataacctacaagatattctcggctaaaagtattaaagatgagttcattttaaatactttcttattataaaaagaagcttcattctgcaaatgtcgtgttctccccaaatcctctggatttctcaggtaacctgccaaaactccagtatgcgatgcaaagtgggaactcattccaagaggcgtggcagtgaagggatgaatagagaagagggttagcagttgagggaggattaaaagacctgggttactagcatgtttgtggataccaaaagggaaaaattggaaaagcaagtgagagagcagctgatggtaatgaagtcctgcagtggttggtaggagggagaacagatttttcctcaaaaggaagcatagagagaacggaccttttcaaataataaacaggtttttaaaaatagagaatttctgttcctcactgtgtgaccttgggcattgtgtaaaatctaagtctcagttttctcagtgaaggtgattatttaccttatgggagagttgtatggttaacttaggaattgctttgtcaagcacttagcaagcccctggcacttgataaagcttagtaaatatagctaattgtggtgacactcttcttcaatttatcaaggcaccaaaaacccctctgcagaagagcatggacctcttaggaaaacaactttccttttactcctttggtataataggtaagagaagagtgagtatgtatatatttttatttgagttttgttttttgaatgtgaagggtggtggtattctagttttatttattggcttttcttttttttattaagtttaatactttttaaaattataagactactagtagccattgttcatttcaacaaagaaaaaatagaactctgattcttgtaatcagaaaatatttcttgaaacattttagtatttgtctttctagtcttcaacaagaatgtaatacgatagttttatggactgcttttctatttttatttcacatatcctgtcataaaactcttgtcattaaattgatggtcacataaaacaaacataaaggttgtatagttttctattttgtgggaaaacatataagaagacctcttctagacatttaggattttttgagggtttttttttkgtcatataaatacttctttagtgtggtgtcttctggtaaatacctctcttttttaaggaaaaattcttagaaataaaattatttagtcaaaggggatccatgtaacttttaaatttttggccagctttaagtattgtcattaacttcaactgtaaataaaagagttctcattatttgatttcacagttcattattagggaaaccgaatgctttgtcatgtgtgggttgatcatttttatttcattttatgacctgccaacgatttcttttgtcccttttcttgtgtcttgagtcttagattgataaaagctttttatatgactagattatcaatctttttgttgtataagtttttttttcccgtttaagttgcctttgaggcatgtggaataaacytggtaagaggacaatatatgtaattaaccatttatgcctagtgttccattattggaatgctaagcatgtgggacttatttatatcctactgctcaaggtcattgccaaggtctggttgcaaaaattcaaaaaattgcaacctcagacacaaatgggttaaaacatccccttttccttgagattctgttatcaccctcctattgataatctctgcaattaagttggttttgttctgttcctaaagattttcccaacctcatgtttataagaacatttattaaaacattgttgtatagttttttatttttgacattttactattttatttaaaatttattttagtacatggcttaaggcagagttttaacttttttactcaagttaattatcccattaattctgtaatccagtctttattcattggattgaagtcacgtttttatcacacattaarcacttgcattaattttggagtcttttctcctttaattttcttaccgtgttaattattccagctagtttagtatttcaaagtcagtaatacaatttttttatttgagatggagtctcattcttgttgctcaggctgaagtgcaatggcgcaatcccggctgactgtaacctccacctcctggggttcaagtgatttccctgcctcagcctcccgagtagctgggattacaggtgtgcaccaccacacctggctaatttttttattgtatttttaatagggacgggattttaccacattggccaggctggtctcaaactcctgaactcatgtgattgcccacctcagcctcccaaagtgcagggattacaggactaatgcaattttaaagcaatatttctgttaatacaatattagttgaaataactttgtaaatagtaattctgtttatccatctatcttcattgtaaacataaagtagaaggtaggaagttatcttagttatttttgttttactggtgtgtatgccctcataacttcttccgtttgattattgctcattttctagaaattttatagtgaatttgatagatcgaatgacattctagccaattaaatctttgtagtttctattagcactataccataaaccatttcaaatttagtaataaatatgtttcaactttacgatctctggttatatgttagtatattacattggacataatttttcttgccaaggtcaagagctagatcaggggtcagcaattgtttttttttgttttttgtaaagaactagatagtaaatattttagtccatatggtctctgttggaaatactttactttgccattagcatgaaagcaatcatagaaaatatgtaaataaatgagtgtggctatgttccaacaaatttcatttacctaagcagacaggagacccacagattatagtttgctgacccctggtataatcctttggacataatttctttcatcatgatagtatttgggataggatcttagaaggttgctatttggataattattctttagttatataaagatgaaaaaaaaaacttgtcttaaatgttcatattgatttgcagtcttgagatagcttattttatcaaacctctcgtgaatctgtttgctttttcctcacaaacctgcttgtgcgcccctttccccctattcttttcaaagataaaaggttaaagcaaggagtattggtttaattgatttttaaatttttgaaatgccataaaagtagtgatttttagatgttaatgcagttgtaggtgcttaacgtaaggcacatcactttttgagccaagtcgtaagtgtccctttgtgtgtagtatggatttgctgagaagtgtctggatattgtgttatggaaaataaagttttrgggtttaattttgcatatttgatattaaatagaagacctatatgtttgctgccaccttctttttttcattgtatgaacatactggtaatttttaaaaaaataataaaatattactgctttaagggatggtaggagcagtgtcaaccaaaagtaaaactgtgtgtgtgtgtgcatgtgtggwgtgtgtgtgcacacatgtacgtatgtgagtatgcacagcattcacattaagcagtgttaactttaacctcccctgtttaatggatttttataaaatcttctaattgtgatctgatatgctttcccttttttgtcaagggacrttttagattccttcagcttgttctgttccttctaggtgattgtatgtaaaagggaaaaataactatttaattatctttcaggaatcatcatgttggttggctggttactgggaaaagatatcctggaaatgtttactattagwgtaaggtaagtctcaatactttataattggagtctcttttgcctcttttatttctctaatggacatagcttacgttttattayggagatcagtattacatggagcccataagagtataacatcgctacataaatagttcagaagtcatatattaaaattatccttagaaaaatgaaaatgtatgtatatggtaatgaagaaaacccatactagatgtctggaattactaatgcattattgcctttttatatataaatatacaattaaggattgtcaaattgaaaactagcaacatgaaagagaaagttcacaatatagaaattgaataatcaatttcagaggaaaacgaaacattgaagaaatgatgacaaatttaaaaaccaagtgtttgtattttcagagacttgtgaagaaactgcatccatgagataaattgttgtagaaaaggatcagagaacaaaaagagtttttagaaattaagattatgattgttgaaattaaaaattcaattgtaggggtgtaatataaattcaaagaggtctccccccaaaaagagtaaaaagtcttagaatgagataaaatgatgaagaggaataatttcaggaaataccacttgtaactaattggagtttcaaaaattacataagatatgacacacaagtattttctcaagctaaggcaaaaagtaagtctttatagattgaaaggattcactaaataccaagcagaatggaaaaaacttcaaccttgatacataattgtgaaactaaagaagaaaagtcaggtcatctacaaaggaagggtaactacgctggcatcagacttctcattagcaactgcagtttctaccacaggatctttttgggttcttctaaacattccaactcacaagactttcacagaccacatctgatacctgtgccctgaacacagcagggtaacttcaggcagccttctcctgagagtccgcagcagtccatgtagcaattcactcaagtacaaggagataaggtcaaccttgtgagtgtgggatctaccttgggttaaaatatctcgtgttctatgagagacgtattttgaaacatgcatttccagatgcctgcaaaggacatgtctagttacaagttactacacttgagaaactcaaagctatgatttcctataagataattataactttcctagtccagagagattttattagtcaggggatcccttaatcatagcagtgttatctagcagcatacttgacatattattcttaccaggtcactaggtgaacagaactagagttaatcaaatccagaaggggaagattattttattaactgttcatccacagcaacatcagattgcattagaataagtggagccgtggtaacaaattaggggggcaattgatcataaatctgtaaattgggcctagccaaaggattggtccaattagtgacaaataggtaggcaagtactcagaacattcatttcctacccatccttatatgaattccagcaaaacaagggtgaaagaaaggaagatgataatagacataagaaagggcaagaacttacttaggcatctaagaaaaagaaatcctggtagacctctgttgtaggcatatgaaatatttcaaatattagaacaaaagtcaatgtctttcaaaaagaaaagtcaaatagattacaaggaatcagaatgaataagaagtaaaaagatatttgtgatatagtgaaagaatgtgtttttttttttctcaagggagggggtgaaaatgcaatttgaaactcttggtttaaatttgtgtttaaaaacgccatgggttaaatataaaatacatttaaaatggggaataagtttgagatattaaacattgacatattatccattggatcatttttagtttttgaggatttgggttttttttttttgagttctgtttgtacagattgacatatcataacttctgttctttcttcaaggtcttccaaaggacaagatacttaaaaattttcaaatagaataaaactcattctattttgcaattctgttttgcagtatggatccattggaatcttttataagtataagctacattatgggacctttaatgatcctatttttcctctttcttgaagtattttacaatttcttcaccctaggaattattttaacaattatttgcaagagtgctgaagatgactaaaacaataagaaagcagaaaaatgatggaatcattgagaaggttgatgtaataataaagtaaataatcactattctcttattctttagttttcttattgtgttgcctaaagtattgcatcatttaagaaggtgtaaaagaagtctaaaggcacaatctttaggtttgtttgttacagctttcattgaacaaaaatgagaattcagaatttttcactttctactataatggcaaagagaataattgacrgagaagacttttcacaattattagacaaatcagaagatcagtgcaaagagccaaatagaagcactgtaggccgtaatgatgtgggtgaaattaataatataagtgaaatctcaagactgagtctttggatgatgatactctagatcttctcaaacaccttaattttgatgagtgagcaatctgtttttaaggacaaaaaagaaacaggtattctcttccagttaatcattctgcagcaaggactctatcatgtagtagttttcagcaagaatctggaccatctcttttagctaaacgaatgcatgaccctatttcattcatcttttatgatgcttgtttatcagcattgacttcatactgcttttaagtggagaaatgctgaaggctggtatgaatataaaagtgattaaaaggaaatagattatgcagaagtagaaaaattcattggattcatcattgtaattggtgtttataaatctaaaattgaaaatgttttgcagtcatggaccaaagaagataactgttctcttttcaacacaattgggagccatcagtggttttagaagtgttgcaatttgacagaacaaatgcaagaaagaagaactagattaataagctagcgcctgttagaaatattttttgaaatctgaaatcaatatttataagataaatatgttccaagttcaccaaaagcagtagatgagcagttagttgcatccaaaagatgttacccatttcaggtatagatgccttcaagtccaggaayagttttgggttatcattaaaatgaaaatttagagtgaagtttttttacaatttaattattcctctgcaaagttttgctaagatgacttaaatataaaagattgaaaagattcgttgtatctagattgtaagtgataatgcctgtttttccttaatggaagcattaaaaaaaaaaaaaaaagaaaagaaaaaagaaaaaaaaggattccatttgaactaggaacattctctttgagtagcccaaaggagaaaaggaagtattaatgataatacatatttcttgactcttcagtgtgtattgtttagccaataatgttgttgcttatgtgctttcaactttaaaatcaaccagtaaataaagcatgaaaaagtcaattacggttatagaaaaggatgctaatgtactagattatgcaaagaaaaagttggtaatggaaattaggaagtagaagcagcagagggaacagtggtagaatgaagggttaaattgcttatgtccttatttctagcagatcaagaaatagtatttggaatggcacaaagaaagacttgttattttttaattataaaaggcgagtgaaataattctttaaactgtgataaaatacgcatattataaaatttacagttttaaagagttaatttggtggagttaagtatggtcgcaatgttttacaactgttaaccgctatctagattcagaaccttttcatcatgccagaagaaaaccctgtacacattaagcagtcactccccagttttcctcttcccctagtccctggcaaccactcactaatctgctatctctatggatttgcctattctagatatttcatataaatgaaatgatataatatgggaccttttgtatctgtcttttttcacttascataatgttttcaaggtttattcatgttgtagcatgtgttagtacttcattcctttttgtggctaaagtaatactccattgcatggatgtcacaattttacatttatcagttgatgaatatttggcctgtttccatcttttggctatcgtgaatagtgttgccgtgaacattcatgtatgagtttttgtttgaacatttgtagttatctgtattttatagatgaggacagtaaactacagagctagattagtaagtagcccaggatcacacaagtaagagatggtgaagccagggatacaaatccaggcaatttgatgtcagaacctacattttttaaccactgtgcttaacctggcagctactaggtatccagtaaatgttaactttctcttccttttgagaagtttattttttaggtattgactatattaattttgcgttttattaagctttaagtaacatccaatttaaattttgctgtgagtgctgtttaacctacattttaatactttgtatatgttggttatagtttggctgtagcagcaattcctgaaggtctccccattgtggtcacagtgacgcyagctcttggtgttatgagaatggtgaagaaaagggccattgtgaaaaagctgcctattgttgaaactcygggtaagtctgtgttaagagcattcttatgcaatgatgcgtaagtttatgtcaatagtgaatcatctcagagttttacagtttttatcttagagatttgcataatgatgtttggcttatggcaaaattggatatggttttaacaaccaaaaaaggcaattaaaaattcctatcccttaggtgaggggacttgaagagaaatctttctacatcatgttctaatgcacaaatcatgttaagaaaatccatacaacaactgaaatcttggagtaaaattaatagaatttttttcttgtgacatgtcaaagaagataatgtattattacagatcccaaatgtcatacttgagttgaatttgcctgtaagaacagtaaatttacagtagttatattgctgtaacaaaactttatgtgcaatatgctttgaaactccaaaaatgtactgaatttaatttctagtttgtattttaatatcttctccatatatgagaagctgaaataccttgaaaaatcctgattgaagaaattatacgggtttatatttagaaactctccaaactttctagaaaagatgttatataagatcattacataaagctaatgtgaagtagctttgtagaaactaactgtatataaataagaacatgtcatcatctaatttttatttttaatttcagaaactgtaccttatgctgaaacaagcataatgagagaagttaatctaaaattaacaatgagtttgatttctrtaaaattcagagaagtaggacaggattctagtctttgatttgttttttaagtgaacctatrtttctccttgattcttttggtgacttgtaatgatttaattctttaggctgctrtaatgtgatttgttcagataaaactggaacactgacgaagaatgaaatgactgttactcacatatttacttcagatggtctgcatgctgaggtactctataggtttttaaaaacaaacaaaaacagtatccctttaagaaacttggtgtttaacattcctaacagttccagtgtcttaccttcaaaagggctgtaaattagtagtggagttattttctctctctgtgattttaccaagtstttgtctcattccacttgtacacytgttcartccaaaaactttgattcctccttgacatctctctttcagtcaccccttcatctatccataatcaaatcctaccaattttgacttcctaaagaattttcccagccatctactttatagccagcttctttaagttaccgccatttctcacctgccattctgataaagctttttgactggtctttttccattcttgatgccctcactccataagcagtttgagggatctttttagaaccaaattttaagcatgtcactccataaattaaggtactccaatggttttccattgtgatcaggatcctgaactgtggcgtctcaaagccgtacatgttctgtcccttattttctcctctayccttatatgctaccctttgctttctgtgcaccaagtatactggctttatagttctttcgatgtgacacaattattcctactttaagaactttgctgcctttgtcactgtttaggatagtctaatgcctcttcatcctttgcaccttaattccaacccacttcttcagaacacccagaagtggccctatgttatatgttgtcttagcatttcatacctcttagtccttatcttaggtaaaattttctgtcccttttccccattataagagagcaggagctatattgcctagcacacagcctgcttcatagtaataaatactcgataaatgaatgaatgaatgaatcactttattttaacaattatatattgatacattgtctcttaagtgcacatcactgtgcagtagttcttcctgaaggtgcttatggacaggtctaatcctactcagtctatgcaggatttctgactggaatgctcttaacactacttatgttgggtacagtgatttaaaatgtatttatagctaattcattgagaaaaataagcagtaggcaaattgacagaagttgtacttgggtttatttacgtccattttacataggttttgaaaagagactcttgatatttacggtgttagatctggtcaaagatcccccatgctgtgttggtgaatgtgccctttctggatgattcagaagggtcattgggattacatgtgcttatatgatccaggtatggaaggtagaatattagtttttcttttgttttaaggtcatgctatatgtaatgcattaactatttgttaattgttttatctctcaattaatgtcattaaacattttttatttatttttatttttaatagagatggatcttgctttgttgcccaggctggtcttgaactcctgggctaaagtgattctcctgtcccagcctcccaagtgttaggattacagatgtgagccaccacacctggccactaaattgtatgatttttattgtgaaatttcttttcgtttggcttggtttgttctagacatatgatataaatacctggtttgtctctacctctgatttttaaaattggtgtgtaatatgctgtgttaaagtgatttgtaagtgctagcatatatctcaatgtctccaggcctgcatgtttgcaaaaagaatactgcttttgtctaagtcacagctttgtgttgtatgttacatatggtaatgcatttgagttctttgcaaactgtagtatgctatataagtgtaatgtcatataagtttaagcttacttatgtatattttcatagcttattcttttaacagtatattgtaatyagaaaacaatgtctttttagattaataattgtgatgagaattagaatctatatttctttactaaatgtcctttttaaagacaaattttwatgcttttctaggtgaacacttttaacagtgtcattataaataaaatgaacagaactcattatagtttttgggttttataggtcttgtcaccaccaagtgtttgtagtgtttgtattattgatcccactttgtgatctttaggttactggagttggctataatcaatttggggaagtgattgttgatggtgatgttgttcatggattctataacccagctgttagcagaattgttgaggtaaatatttttttttccaagatggtgactttcttcataataacttaagacacagtgataggttcatagtttatgtgtatttttcttaggcgggctgtgtgygcaatgatgctgtaattagaaacaatactctaatggggaagccaacagaaggggccttaattgctcttgcaatgaaggtacgtacctaaatttctcttctttgacatttgagacactgccctcacaacagaatgcagtgtcatcaatttcagtattactggtttttaggtattgagtgaaaaaaactcatactatttcattgtttttactatcttttaggtatcagttbtattcctataaatgtaaagtatagacttttttcagtataactttattgttcacatgcaagttacaaactaatgagcagtcattgatttcttgtgaagaaatgttcctgtcttccacaatgttgagatctacatgtgaaatactttataaatgtgtgtaattgctgataaatactaacttttgaatgaataaaaggcaacattctttagtatttctatgtaaagataataacacagtcatgagaaaatagctttgttttcccagtctttcctttctctcctttgttaatttctcaaaatgattgtgaagttataatttgttttggggagaagaagtctcagttaacttttcatctgtcccaatccgtctccttatcccctaagtcctatatttgattcagtgagaaacctagtaagtccagcctgtcactcataacaaaaataactattcctacctttaagagtattcagagaaaattttgatacttgtataaagcaagaggyttctaaatgaggttgcttgaaatgagagacagtacagaattacaggttattataacatatttaatgaaataaaattgatagttttagaatatatagtttccttggcagaaaagcacatttctgtatcatttggtctccttacaactaaaacagcatagtactcaaaacatgaatccrttatcaagtatttcctgtgttatgcttataaagatattagtttctttgagggataaagaatatgaaactatctttttatgggcagagacctcacattttaggtagggaatttatattgacattcttgagacaaaaggcagtccaagacagcagacactgaaatcttaaacactgagtcacatataagataagaacaatgcaaattcagagctgggatatgagggctttgaaggataggaagggtttagatgagataagctagggaatgaactaaagtagaagtagagaggaataaaagagcatagagttggttgtggctaatgagttggccaaactggatgaaatgaaacgtatttgcacgaccaggaggatttttatagacgctgtatgtggtgggtttctggagaacctttaaggccaagaagagcctgaacatgtttcagtagaaagtagaaagcaatacatggtagaattttgagtagtttaaacatttttgatatttggaagatattttttgatatttttgatatttagatatttgatattgatgcaaasgctattaggagggaaaacaacaacatgactggtagtattcaggatataaagtggyagagggtaagggactaggatgataacaggtgagccatttgagtccctaagaagtgagagatttaatctaaaacttctattgatcataaaaatacatgctcagaattggttgggtacttttatttatttatatcctgcttcctttcagaatttgagtgggtagagggattaatacagtgtgtatgggaggtttagtcagcgtacaatccagaaaacctgccttagactatatctacatacctgggctttcatgttgaaaatgtatgctgatgtgtagggaagtacagtatatatagatggagcatttactatttcactattaactgaaaaataatccagccaacctagttacaagtggtgacccttgttctttgttaaaggaaaaaataatcacatataggtgagaattaactttctctttgtgccatatagatgggtcttgatggacttyaacaagactacatcagaaaarctgaatacccttttagctctgagcaaaagtggatggctgttaagtgtgtacaccgaacacagcaggtatccatctgtttaaagaatacttatttcctgtttagcttagatgactattttttcatttactgtccacctttgggtttagtcattgtacataataaagacttgttgctttaaagtacatgtaattaatagtacactcatctcttaattgtttgtgttctctttgatagtctttccttatagaatccatgcatagatatattcatggagttgctgctgtgtgagcaaacagcttaaatgagttgtagcctagtctcagtctcctgaagcttgtgacatcagattttttcagaattttttctcttcttcatgacagttccttataaggtctttgcagactgtgtttcaatctgtgttctttcactgaaggaatgtcttatctttagaacaaatgaagccaccttactttttgaaaagtagtttgcaaatgtatgtcattcatgttgattactccagcttacaagctgacaaaatgacataccgatattttaagccgccaccttgttcctgggtgcttgagaaatttttccagttagtgtaataagagttctgaattatctacagtgtataattatatcactcatagttgctattaccagcttgatgatgaaacttaactttaaaaaatattgaagcttgggctggatgcggtagctcacgcctgtaatcccagcactttgggaggccaaggcgggtggatcacctgaggtcaggagtttgagaccagcctgaccaatatggtgaaaccctgtctgtactaaaaatacaaaaattagccaggtgtggtggtgtgtgcctgtagtcccagctactcaggaggctgagacaggggaattgtttgaacctgggaggcggaggttgcagtgaggctgagacaggggaattgtttgaacctgggaggcggaggttgcagtgagccgagatcaccccagtgcactccagcctgggcaacagcctgtctaaaaaaaaaattacacacacacacacacacacacacacacacacacacacacacacacacccttaaactttccttcactcttttgcctaggctgagtgcagtggcgtgacctcgggtcactgcaacctcaacctcccctggcacaagtgatcttcccacttcagcttcccaagtagctgggactgtaagcacgtgccaccatacctggctaattttgctaattttttgtagagatgggatctcattgtgtttcctaggctggtcttgaacccctggactcacatgatcctccaccttggcctcccagagtgctgggattgcaggcgtgagccaccatgcctggacttatttgttatttttatagttcctttgacaggaatgactagttggttatatgtttttacctatgagcaaacacatgatttttgcatgtgatacctatgattacgtctctatagaaaacaggaatgaagggatctcccttcattcatataagtggaaacatacagtttttaaaagaaaggccaggttggttaacactgaactttgaattgaagtcttccaggaactatgttcatgagggccaaaaaaaagatttccgtctattctttaaaggaacttttacaagcttaggtgaaagaagacaattggaaataaaactatgaaaatacaatacctttcactttaaacgttttaatgtaaagctttcagaaattgcattaaacttaggcgattttcagctgatgtcccttaaccacatagttatatggcaagcatatgcatatgactttttttgataggtctatttcattacattttgtaaaccatcacacggtacctcaagatagtgtggctcatgtaatgtttaataattttacttttcaggaacttttaatgtaatctaccaaagttttacattggaagattaaatcttcttagttgtgggagtgggggacagaaagtggcaggatatgtttggaaacatttgattattcttcacacttgctgacctgaagagttcctcttgcaagtgaaaaccaaccagtgaaatgaacaaacaaaacccaacccacagatgtgactcaggatctagaagaagtcatcctgacacagatagggaaacttaacattttaaaagtaacttcagtggctcagatagtttgcttttaaaggactttcacttgaacatgacaatatatatttatctctactatctccctggaacccaccaaaattactaacaaggaataaaagatataaactcagaaagtatagggaagattcaaaggtgccaggtacctttgaaggcagggagtaaggcataaggctaaaaatagtagagaaatttgaaattctgaataaggaaccaatagaactcccccaagtacctttgctgcttctttaggccagacggttagccttcctttacccctgtggaacaccagaaatctggggataagagtagagggtaggattaagccttaagactgaaaacagaatgattaagaagatgtcattgtcctgaaggataaagccctagttcttaacaccatttgtctcttggaatacatgaaggctggcatctccctactgtcattccctaagtaagaagattcaagagttttagaaaagctgcctggtctcgtaaggcagtggtccccagcctttttggcaccagggactggtttcctggaactcttccacaggcaggggatggttttgcgatgacactggtccacctcagatcctcaggcattagattctcttaaggagtgcacaacctagatcccttgcatgtgtagttcacgatagggttcctgcttctatgagaatctcaggccctggctgacctgacaggagattgagctcaggcagtagtgctctcttgcctgcagcccacttcttctttgtggctgggttcctaacataccatggactgtactggtccactgcctgggagttggggagccctgtcataaggggcacctttgagctaagctctttgttcattggaagcacttacctactcctggacttcatctcatcaccctacagcaaggcttaccagttgatccttagctctgccagtgctcatggagcttctagtcttttagtttcttcactcttttttttttttttatatactttaagttttagggtacatgtgcacaatgtgccggttagttacatatgtatacatgtgccatgctggtgtgctgcacccattaactcatcatttagcattaggtatatctcctaatgctatccctccccctccccccaccccacaacagtccccagagtgttcttcctgtgtccatgtgttctcattgttcacttctcatctatgagtgagaacatgcggtgtttggttttttgtccttgcgatagtttactgagaatgatgatttccagtttcatccatgtccctacaaaggacatgaactcatcattttttatggctgcatagtattccatggtgtattaaatacaagtgaacagggagggattactagatacttggagaaaatctttagtatgaaagccaaagaccaaaccaacagagaaagggatcttagagaaaggtagtggcagatgctgaagaaaatttccaaaaaccataaaaaagacaaaataactttcaataaaatgtttaytaaataaagtcaagaaatgtatcaaagtagaacagaaagtcaaagacatgtacagtataaaaggtaaaaatcaaaacaaatacagaagatccagtaattaccccatagtggtaataggaagggtaataggaataggtaataggaagaaagaacagaaaatgagaagattttatcaactaatgctggaaaattttccagaatgaaaasactttagcatctagaataaagtggcccaccaacwgctcagcacaatatgtatgttaaagcagagtggggtgagggataaacacaagacccataattaagaaatttgaggacacttggagagggagaattcgaagagcttctagagagctttaagcaaaggggagatcatataaaagggcttaggaactaaagtatggtagtctgccacttagcccagcgggatacattccaagactgctagtggatgcctgaaaccatgaataatattgaaccttatatataccgtgtttttttcgatccggtaacatagatggctactaagtgattaatgggcagggagcatatacggtgtggatatgctggacaaagggatgatgtccttggcaggacagagtgggatttcatcaccatactcagaatgttgtataattggaaacttatgaattatttatttttggarttttctatttaatatttttggactgctgctaagtaacagaaactgcaggaaattaaaccctggataaggggacactactttaatttctttatacttttcartgaaaacattgacactggaggctggaagataatagagcaaagccttcaaaatgagaggaaatttatccctagctaaacttacaaatgtgaggatagaagaaaaatgtgtcccacaccacrcaccctttcttagatattggtggataaaagaaaaaaaagaaaagggagacttaaaagacttaaaattcagtgaggatagaggtagagggttgttcctagataccagtggtacagcaggcctagaaatcagccaattagaaatggaaagaagactgaaggagggtggtctccagtaataatatagaggtaatagcttatctgcttctttgttgttgtgaaaaaataccatgagaagggttttatattacattgaagagtttaggaagaatgaatgataggtatacagaaaacaaattaaagaggtggttattaactttataaaagacaaaacttgaacaggaaaagaagtatcctatttgagctatcaatcaggataggccatgaaaacaacatcatgctctcctgctgcctccctgtccccaaatatctgctcattrtagttacttgggaatgcaggcagatggaagctccattttaatgtgagcacacactgtcacagcaggggtagaagaataggaaattgtgcactggcacctacatttccatttggaagtgacacaagtactcatgtttattggccaaagcaagtcatacctgaccgttgtggagtgaggacggcaatagggaaatacattcctgcctcccaggagaactgggatatttgtgaactgctatagtcattaccacacttggcttagcagcaaagagtcttgttgtaaacaaaatactggcagattttgctttagctatatcataaagatggggagggggggaatagatagtggaaatggggaaattaacatctgtcacaatagacagtgtataaaattgataactgatggagtagcagtataaacatgttaaaaacatgagggtaaatatcagagaaaacagctaagagagttaaaattattttgcttccatggagtaggactagtggtgagaagcgttgaayaggaaactgcagtatttcattataagcttttgaagattatttaccatgacaaaaaataaaagaaaaagtgcgataatacccataaatacagtgtgattgggagaattaaatggtgttttaggtagatagatatagacgtatatagtagctaatagagaacttgaaccattgtgagctgttatttctcttccatttcctgttatgttgcagtgagcctctttccacatttcagagtgccaaatttggggcttagtatagcattgccttttatgtgtgggatggtgggatagatgttttctatagaagatacagaaagctcccctataggaatatttaatcttcagagttcaggtggcagtcaaaaccttaggcttgagtaacttctctgggaattatgagaaatgaatgccacttaattytggactccaatggcaggtaagtacaagttgaaattaaacttgtgtttggtacattttcttcttaggacagaccagagatttgttttatgaaaggtgcttacgaacaagtaattaagtactktactacataccagagcaaagggcagaccttgacacttactcagcagcagagagatgtgtaccaacaagagaaggcacgcatgggctcagcgggactcagaggtaaggctatttcagcatagtcccctggggtggaaaggtagagccttcttttaattgcagatgaattcatgcttcacatttgagctgtccaactcacttccaggatttgtagaacccttgccagtattgaggtgttaagttttagttggttaattggccctcaaaagatggaartttgagaatgtagcaaaatatgaatcactggttcttttagatctccagaggtctctgagtagctgatagaaattttattttaaacaagtttatcttatgagaagggaaatggatcgaggtaaaatggtgttactctctttttatcactttgttttaaagacaaaaatacttttctaaaaattgagtctgaagcctctaatatatcctttaaggtgattgctaacttgatctgttactgttcaccagggaggtaaagaagtccccagattctgcttacttatatgctgctgactgagcagtgatggggagagggtctgctggacacacacacattaggccacctctcctagggatgtcatgtgtaagactcgggggttggtggttggtgtcctaacctgattcttaccttctggatagtcatctggcttctgcagaatatatgtagttatgtagtctctcacagcagttggaagagttggcttccttaattttattattttaatgaaataggagtctaagcactacaatttctgggaggaagaaaaacaagttatgtgaaaaatgtttttatttgttgttcacttaagcaaaggctttttttgagttttaaacattttgatggatttatagggcttctgttcttaaaataaactaagtttggaaaggtactcttaccagcagagaacattgctcccagcctgctgccattgcccttctctctgaaccttctgtgctgctgaaccaagatcactcctcatacccctgcccccagagcctggtgcatctcatctgggatatgggctgtattgtgaccatcttaacacttcatcccctgtctccaaggaaatgggaggcagagactcatggctgagaagttattttgcaaatggatattttggatggaaaaaaatttaaaggaaaacaacttttccttccccctttccccttttaatgtaagaggctttgatgacaggttctagagtttctggggtttcatcccaaaggcctgaatctggaacatgccctggatccccccacctcagtcctcaagctttctggacccctgaagccaaggcagattctttctcccagcgtcatttctggggcaggaggaatctcttttctggtttacctgggccagacctaagaatagcaggatctctgaaaccacagggttttgatgtgtttttatcaagccaaatgtacaattgccaactgacactctggataattgagcacagggggtgccctcgtacattgtaccgtcactcccttctgaacagttggcagaccaaactgtttggaagctcagatactctggctcagggtaacacttttgttccccttacactcctcaactttccacctcagctagggaaagagaatgacagttaaggcttgacccaggattataatcgttagagcaagtgggagtttcagagacttaaggggcacygcagggaggccttgctgccacaaaattagggtttggattgataaagcctgtgtcggaaggggcagtggcagctccactgagacaatcctgggaagactgtggtgcagagggcctgttactcccctgattcacctgattctggggctttgaccctttctttttaaatttacttttgctaagttgcacttatttattttttaaaaagaccgttggtgaacaaaatgtgaacccatttctttcctcttttgaacttctgggatgtcatcacttccagtttgttggctttgtttccagctattaataaagcattaaaagagtggagaaaaaaaggtagggaagtgggcagagtcttgctactcttagcagcacatagcaagaggttttaaagtggcatggatttagaggacttaaagaggtcttgaaggtctaatatatgctccctctttttgttagtttctggaacaaagttttcctacctcattatattgactaattcttttcatatgaaggattgtggaggtttgtgtatgtgtgttttgtactgtaacattatgaagtagaccagagttggtagaggggaaagtttttgttgcacagagttttgggaaacattctgctcatttgtctcttgcttcatgtcttttcttctttatctacccttgtgctccacttccatcctccccctgagattaccgtaatgaagaacagaaagattttaaacctcagttgatatgtacttacattacatcttatgaaacaagtttcttaaaatactgtggttcttaattttgatattagagtatattttgttttatgtcaggggctctccacatgaaaaaagtttacctatccttgactcagagagtagcagcagattttcactggtgctaaagaagcaaataaatacaggatactaacctctagactagtgccacccctccattaggagtgcgcagagctgatctttccgtcttaggatttgctgacatatatttttgtcactgtccccttctgttaccatcagcctctatcctaacaccaggaactgtgaagtggctcattctctcaagggtgaaagcctttggagcccacatctacataaataattaggtatatgactcttactttggaaaaatagaattacttgcttttaaccttgattttttttgagcatatgtaatctttcataccttctgcttgacgaagaatggatagtttctttggtctctctggggcttttcagtctcctcttgacttatttatgtttagtttgtatgtgcatgttacaagttgttcagtctaatatctcagatgcaggcacatccctttggttaataaaagtagtttccggagttccataattctgagagcaagctaaatgatatttgggaaatgaaaagtactttgtactatatcttacatgcccaaggatgatgacagggaaataagtagaaataataatatgatggcgttatttacatactcttagagaaccaacgttacaaataagaaatgtctgttcatgttatggaaggagtaaaagaatccaaactattgttggtattaatggttttacaaccactttccaaattagctttaccttccaggagttttcatgtacaaagttgttacaggctgtgtataattaactaatacagccttctcttcagagtgtttaatttttctggagatcttggaaatggaaagatgaagatccgttagaagccaccttcaaaggtgtttgcctgtttaaaattgactttaaagcctaacaaacccatagtttctctaaataattaattctattttttaaagaggtagagttcctgttgaaagtagctgcatgtgattactatgtgaaaatattgttcattttctgtctcttgcctactctgcccttcagttctttagtttgattctttttaattaaaacagcttaaagggaccccttatccagaaccattaaactataatgttttggtctgtaatcattttgattttacaaatgacattatagtcttaagtgatttatttaagaagtgttactgtctccaatttctatcaactaaattctgatgttttcatgactcacttttttttgttgttgtttggattttattatttcctaagttcttgctttggcttctggtcctgaactgggacagctgacatttcttggcttsgtgggaatcattgatccacctagaactggtgtgaaagaagctgttacaacactcattgcctsaggagtatcaataaaaatgattactggagattcacaggagactgcagttgcartcggtataactagactgctttcttttgttttcgatagtttttcttaaaatactgtggtgcataattttgtgaactattagttatgaatatgtttatgtaatattgagattatgcaattgaaatcgactcatggttttgctcatggtctatataaagttggcaaaactgattatagtttaaaaagtaataactttgacatgcataactaaatcatgaaatcacatgcattttattcacagaagggtaattatttttaattcatgatcactgtgatgacagagtaaaagcactagatcatgattgtcaaaggaaacatgaaacttagtttttcctttcaacttaagtataattttcaaagcagacttgtgcataatttggcagaaaatagcttgttatatgtatttgtttttcatcatgtatacctatatttgaatgctatttaagattaccgtaagaagtagaataagagcgaagaagagaatgaaagttaatttcccagagcctctaaactgtaattcatactgataaatttaacagttggctaaactccattaattcttatttggagaggggctagtccaggagtttcaaactatatattgtctaagaacaggtcactaggaacattatattattggaagaataacttttcgatgtttattttcatttatgtataactacatgattaccacagatccaccaccattttgtctggcttcggacactgtacttaaaatgcactctgatcttcgttacatttcagctgctgagcagaacctgattggcctagtttcgattcttaggtatgctagcttaaatagtcaaaattctttttttttttttttcctgtagagacagggtcttgctatattgcccaggctggtcttgaactcctgggctcaagtgatcctgtagccccaaagtgcagagattacaagcctgagccaccgtggccagccttgaaaattctttattcttaaatttaaacaaaaatgaaagtcaaacataaaactccagacttaatactgattcagataggtttgtattactggtaggtaacaaaagagaacagataacaaatcatactaaatgagcattacgttgactagcctgtcwagcaaaaacaatttggtttattacattttctctctcatttgctttagccagtcgtcygggattgtattccaaaacttcccagtcagtctcaggagaagaaatagatgcaatggatgttcagcagctttcacaaatagtaccaaaggtaggcctaaactaaagccttttggactgaaaggccttattctaagtgttaccatttctactactatcttaatgaaactgtttaattgtgaacatcagggatttaaataaccaccagatttgttggttcaaatcctgaaatgaagtcttatcattgaattagtcttatcattgattatttatgatatgatgtttatgaatatcagtgcaaaattattaattttagcaagaaccagatttcctctgagaaaagtactgtggaaattaatagtgcttgtatttatgaattagaggatggagagagatcattgatttatacttcttactcttttgttcaattttaattttagcatgagtatgtgattttttttaggtacaatttacatatagtaaaattcgcccattttagtgtatagttctgaacattgagtgatgcatgcagtcttgtgaccaccaccacaatcaagatatagaacagttccatcatccccccagattatcttakgcctttttgtggtaccttctccccctacttccaggacttggcagccactaattctttttttgtctctgccactttaccttttctagaatgcactaaaaattgaatcataccatatgaatgaggcttttgaatctgcttctttcacttagcataatgcatttgacatttatctatgttggttgtgtgtattagtagtttgttgttgttttttaaagtaatattctattataggtgtaccttacctattcaccagttaaaggacatttagattgtttccactttttgatgattatgaataaagatgctgtcaacatttgtgtacaggcttttgcagtttgtacacaaatttattttgcatgaaaatacattttcatatctcttgggtaaatatctgtgagtaattgctgggtcatacacttaatgtatatttaatttcataagaaactgccaagttgttttacgagatggctttattattttgcaaccccaccagcagtgcctggaacttctaatagtcctgcatcctcactagcacaagggattgtcattgccctcctcccccattctgataagtgtacaatggtatcttactgtgattttaatgtgcgtttccctcacaactagtgatgttgaatatcttttcatatgcttatttgccatccatatatcttctttagtgaagtgtctgccctgcctattttttaaaaattatgttttctaattattgaattttgagcattctttatataatgtggatacaagtcctttattagatatttgtttgaaaatgtttctttccagttggtagtgtgtcttttccaagagagaagcttttaattttgattaggtctagtttttcaatttcttcttttatggactatgcttttgatatctcagaactccctgcctaacccaggttcacaaagattttcttcgtgttttcttatagaagttttatagttttgggttttatacttaggtctgtgatccattttgagtgtatttttttgtatatgttgtaatgggttacggtttattttctttgcatatagatgttcagttattccagcaacatttgttgaaaagactgtcctttttccattgaaatactttttaacttttgattataatgcttttctaacaaattatttgtaggaaggaggtatctcctgccccacagcacagtagcttctttaaagccaggttccctgatatgagattaacttactttattatcttgggctgccttgtaaggggcctatcaaagcctggtttgtggatacccaggtcccataggaagtgccccataagaggtgggcagcagtcttcccagttgctgacagttcagatttcttggttttattgttagttaacttatatatgcacatctatttgtatgtccttcaaaataagcacttatctggaatttattttattagctattttgtagccatccattgttactaataaaatgtgctacctcctccttcatttattttacacttacaacttcaagttatatrttcagaatgtggaattttcttaaattgtttctgcatcttaaggtatgtctatacttytttgattagaaaatttattcattagtggtatatgttcaacatagaaaaatcaaataatatagaaaagtaagagctacaatagaagttgtctgtaatctaacccacactcaggttatgcatccacagagtatccataataagttaacctattatgacttaaaaaaatgtgtttaacaaaacctggttgctactttatactgttataattctgaacattcattttacataactttggcatttctgaaatcaattattattagaaaacatgtttttaattgctgtacaatattttgagtataccatgtgtatgtgtgtataaatgcatagcatgcatatatatatakakagagagagagttacataaccattttcctgttgaaatttgagcttctattctttttactactgtaaatgttcctttaaggataatgacaatagcaaccatttattatctgccaatgcatgtattacctacattatctaatttacttcttatagctaccttatraaagataggcagcaccgctttaaaaattctaataattaataagccttatttcttagcagtgttagatttatagaataattgagcagataacacagagttctacattcctactccatctctaccctctactcttacacagttcctcttcatattaatagactgcattactgtagtatatttattgcaattaatgagctaatattgatacattcttatttcatggtttacattaaggtttactttttgtgttgtacctttctaggggttttgacaaatgcataatgacatatatccaccattacaatttcttttgagacggagtctcgctccaccattagaatttcatacagggtagtttcattgccctgaaaatccctgtgtttgacgttttcatccctccccactccgcttgaatccttgacaaccactgatctttttactgtctctgtagttttgccttttccagaatgtgtatggttggaataatatcatatgtagcctttgcagactggatttttttcactaagcaacatgcatttaaggtttcaccatgtcttttcctggcttagtagctcatttcttgtgagcactaaataatattccattgtatgaaagtgccacagtttatcacttcaccttttgaagggcatcttagttgcttccaggtttggcaattatatataaagctgctctaaacattcatatacaggtttttgcgtagacataagttttcaattcatttgggtaaatactaagcacagttgctgaatcagatcatatggtaagagtatatttagttttttaagaaacaggcaattccatttttatagatgaggaaattgaggcccacagtacttgggagacttggctgatgtctcagagctagtaagtggtggtgttggcattggaactggaatccaggtctgtatgctccagagttcatctgttgtttgctgtttctttgaatattattgaacctaagatgtacccaactctgattattattattattgttattattttttaccactgcccttatccatgtacatctgattatttttatacactaaattcctgcatgtgaaatgattggactaatgttcaacacatttgtaaggccgttaacatatattgctgaattgtcctctgaaaaagtttctgtttatatttccataaactacacttcatacagtagcattaagtccctagacctccagccccacttccctcatcctctagcaagtggttagattttggatgttgttactaatagaaatacactattttgcttatccatattttttatttctcaacttctaatcactcatgaatgctgttttcagagagagccaatcatagtcctgaaagatgtaatctctaatgttgaaatcctgaaagattgaaatccataaagtcttaaaatcctgaaaaaccacagtccccaaagatcaaaatcctaaaaatctaattctggaaaaaataattttaaaataaaataatttacatttttaagaaggaatttatttgagaaacataaaaacatgaaaatgcttcattggtcactttatacaaaataagcaataataaataacctacatagttttgcaagcatttgcaagcataaacactcaggcatattatatgacagaaagatataacataggactgttatgagcatatgaactgtatttataaagaaataggtcataagggaaatgcataaacacctatcactgtggttgctaattgtgtgcaccccactttataactgtgggtcatttttatctttcacaaatgcagatgtatgaaaaggacatctgttcatttattgaggaagtttcaacatttttacatacatgtacagtgcttacatacaaagtcaacattgtgatcatgcactttcgtgaagtcagatttgcaaaacatgcataaaacaaattagaatcctttaagtctctataacttacgcttccagtgttggaaatgatgcaaaggtgaaatacatagcatagcaaattgtaaaaaataatactcacaatttaaaatagcggaaaaggaaactaaaaaaagaaaaataatggccgggtgtggtggctcacagctgtaatcccagcactttgggaggctgaggtggatggattgcctgaggtcaggatttcgagacctgcctggccaacatggcgaaaccccayctctactaaaaatacaaaaattagctgggtgtggtggtgggcgcctgtaatcccagctactctaaggaggctgaggcaggagaatcgcttgaacccaggaggcagaggctgcagtgagctgagattgcaccagtgcactccagcctgggctacagagcaagactccttcccccaccccacctcccccgccccaccaaaaaaaaaaaccaaattaacaacaacagcaaaaaacctaaaaagaaaatatgacatggaaaagcatattacagagataaatgatggacagttgcatggagatagtccataaaagctggctgactttcacgatcattaactatattttgaagtcttgcagcatgatgagtagttgcttttttttctttaagaacatggctgtcagcgtatgttcatattcattttctatgtggcactgctgtttttgaaattctatgattcgatgtacactaacatgaacattctctattaaattttcctatcctgtgattgtgattttcaggagtttagactttagggattttgatctttagggatttcagcatttgggattatggcatttggtattgcatctttcaagattatgatcccagtatgttgggatcatagatgactgttgggatcactgccacccagagagctggggcagtgtggatgtttgctttgtttttggggtggggaaggtgtttatatatttgaatagggcttttttttttttttttggtgcacgtcctatcctggtaatctcttcctgawgtttatttctgaataaatcccatattggatttttttagtggtattgggacagagtattagtaaatgtatgtgaaatctgcagttacttaaacattttaccattagacttctgcrtaacttctcagagatgctaaaggtggtgaaactttcattttatttgctttcttcagtttgtcctctggctctcttataaaaattaaggtgaactctggaaaccaaccaaagatagttagggaagaaagaaactaattacaaattacatcatcagcctggacaaatcacattgttggggtttcccaagtagagtgtrtgtgcgttaattatagcagatatcctgatgctattccaaggagactaaaacaaaataagacctaagccctgtcagaagctcgttgaattgcttaaattcatcctrctttaaagtggaattctataaatacyagccctgcctcccaggtattttgtatcttttgaatacctaagtcttttctccaaatattattagagaattttttgtctcattaggttagcaggacggcccccaccctcatcttgtctttttccctacttcattttgtgttcatgtgacccttttatagccaatatgtttatttggccttcagctttttgattagtttagtttagtttagtttagtttagtttagtttagtttagtttagttagtttagtttagtttagttttagagatggtgttttgctttattgcccagactggagtgcagtggcatgatcatagctcactgctgccctgaattcctgggcccaagctatcctctgccttagcctcccaagtagctggaactgtaggtgctcaccactatgcttgggtaattaaaaaaaaaaaaaaagaaagaaaatccatttctgaatggatttttaaacttttttgaaagaaaggatttgcagaaatggagtctcaccacgtgttgcccagactggtcctgaacttctgggctcaagtgatcctcccacctcaacctcccaaagtgctggggttataggcatgagccactgcacgtagcctcgtcttctgctttcctttgtttgttttttgagacagagtctcctgctttgttgactaggctagagtgtagtggtgtgaccatagcccactgcaacctcaaactcctgggttcaggtgatctccccagttcaggtgatccctcatgactcagtctcctgagtagctgggactactggcatatgccaccatgcctaggtaattttgttattttttatagagatggggtcttgctgtgttgcccaggttggtctcaaactcctgggctcaagtgatcctcctaccttggcctctcaaagtgttgggattacaggcataagccactgcactcagacagtttgctgcttttgcttcacatcagtttgaataacttttattattgttacaaataaaacagaccttttgttctaaatcattagcttgttgacattttcccccatgtactagaatcatattaattgtgcccctcattaaaatatttttcagccatcctttttcataattcttttgaacacatttcattctccttttggaatatgaagtgttgctatgtactttgacctagagccagttaaaaagtagtactgaatctcagttttgcttgttattaagtcatctgggarttctcagtgttttccatttatgactttttctagtgtgtcctacattttccattgatccattgatagaagtggtcatcctctttcattcttctttttctgatttttacagcattacttgcatttatatttctactgaatctattcaccaagtccccatattattatcacaattcatatagtctaatttttaataggttgtaaacctttatttcaatcacttgttttttcttcagtgcattagttttctttaatctgtcctagaagatttgaggatcttcggtaggttattctaatgcaagacacatcttttccattaatctctcctttaatattttcctttctttttttttgtaacttcctttccctagtacatcttgtctattaatttccatcaaaagaactgtgagtgctgaccacaaatgtgacactgaaaaggaggactcataagaagagaaaaataccccttgtagattgcttctgaaaatatgtggccttgttctactctctttgatgatttttatctcttcctccaaatctaaaatcaggccaaaatacccaactgtcacaactggatcaagccagctgcaccttttaccaccaagtacaaggctcactgcaacccacggatacccatctaacttcgggacagccatgatccccaataggcagggatgacacccacgaccagcaagaagcagctacagaaaattgatcctcagtgcctctgcctcccataaagatttatggggatcatgtctctcggagaaatgaggcagaatagggaattagggtaatcaagggttaaggcataagtaaaagaacagtagatgcagccagttctaggcaagattaggcagcatttaggccacatccttaatcctgtgataacaagacagtagtctccacttcagcctctgattggctggggaccaagtctccacttcagtctctgattggtcacaggctaatccttcatagggtgtaaccaattggaggcctctaaatggcatctggtagtgttaccaaattcttttaacttaataaaaaccctaggccgggcacggtggctcacacctgtaattccagcactttgggaggccgaggctggtggatcataaggtcaggagttcaagaccagcctggccaagatggtaaaaccccgtctctactaaaaatacaaaaagtagctgggtatggtggcgggcacctgtaatcccagctacttgggaggctgaggcagagaattgcttgaaccaaggaggcagaggtagtgagccgagattgcgccactgcactccagcctgggctacaagagcgaaaatccatctcaaaaaaaaaaaaaaacaaaaaaacaaacacacaaaaaaacggctgggtgtggtggctcatgcctgtaatgcactttgggaggccaaggtgggcagatcatctgaggttgggagttcgggaccagcctgaccaacatggagaaaacctgtctctactaaaaaatacaaaattagctgggcgtggtggtgcatgcctgtaatcccagctacttgggaggctgaggcaggagaatcgcttgaacccgggaggaggaggttgtggtgagccgagattgcgccattgcactccagcctgggcaacaagagcgaaactccatctcaaaaaaaaaaaaaaaaaacacaaaccctaaagaacattgtagttgggactcatgagccgcttgctcgagcccgttctactctatggagtgtacttttgcttcaataagtttgtacttctgttgcttcgttcttttgttcctttgtgtgttttgttcaattctttgttcaacacatgaagtacatggacaactcacagtcacaacctttcattcgctaacttattttgcagcttttgccaaacacttgttatatttcagtgctgtgtgctacatgattaatttctgcagtaattagagttttcacttggaaggttaccagtatgttttggatatatgtgtaactcagtcttttttttaaaggcacactgaagagtttctgaatggatttttgaacttttttgaaagaaaggatatttcccaaatataagttatgtgattcatgatatttggattgcctagggataatcagtagtgtgatattacagtgcagctgagtcttttgtttaagaaaataatactttttttatttagacctttattaaaggagagaaccagggaacagtctttatggtagtactgagatttattcagttgttcattcattttatttgtctttatagagcgctgttggtataggacaaaaatctctggcttcatgagtcttagaagataaatgaatataatgttaaataagtgcttaagagcaaccccccccccccacaaaaaaaggcaaaatttgaatgatwagagagggagattgaaatttttatatagtaagactagggagggcctcactgagaaggtactatttgacagaagagggacccatgttatatccgaggaaagagcattccagacaagggcagaggctggaagtgagtgtgcctggcatgtgtgaggaacaacgaggaggccaatgtagttcagtcaggaaaagattaatgataggagtgcagtgaggtgtgaacttcatgagggacccggtagataataaaggacttaggcatttgttttgagagagatgtgaaatcatttgagggttttgagaagagacacgygatctcacttctgttttaacagtgccactctggctactgtgttgcaaattgactgcaggaaactagggcagaaataagaaaatcagtttggaggtattggcccagagtgtgggcaatggttttggagtaaggtggttgaattctggatatatttgtgagtggagtcaacaagattcgctgtcaaactgcttgttggcacataagaaaaatggaggaattaaggttggctcccaaaatttggagcctcagcaactgcacatatgtacttttcactaacagaggataggaaggagcaagattgagacatctaagaggaaatgtgaagtagggatgggaattagttttgctgatctggatttcagaagaaatgtctgggcttgagataaaaatgcattcaaaaaaatgcatgtaagtaaaatccaaagccatgtgcctgggtatgctcacctgaggcgtagggaattctgagacctcttatagagaaaggaactgagccctggggtgctccaacatctaggcatcaagagggatcaggagaagtctgtacaagaggaacagccaaaaaggtaggaggaagaccagtatcggtggtagtggaagccaagggaagatggtgtttcaggagggactaatcagctacgttagggtgcggctgagagattaagtcagatgagaaatgactgtaggcattagcaatgtggtggtggtggtggtggtgcaggtctttgaaagtcatgaatcgtgtttcactgcagttgtggtaacagtatgatcatgggatggattcagagagaatgggagacagcaagtataggctacttgctaaggagctctgctccaaaaatcctccccgttcctatatcaaaattttttccttgctgctgcactttaccatcagtatacaaacatgtttcctcttccatttaaaaaaaataaagaaaaaaaagggaaagggtggcagctgaaatgggaagggaagagaagtggtttttctttctttttttatatggaagggacaacatgtttttgtatactgacggtaaagatatagcagtgaggaaaacattttggcacaggagggaggagaatttctggagtaatggtcttaataggtaagaaggtagaatctttgacctgcagtagatgcatattgagttcatctgtagtaaaaccagaggttagttcctggatacagatactgagttgggggaattgtggaaattctcttctgattctgatttctccaaagtaggaagcaaggtggtcggctgagaaggaggctagagaaaggggatagattgcaggtacgaggagagaaaactaatatgaactaatcctctaggagaataggaaagagaatggtgtattatgtatattgaaatcaccataacttgtaaatattgttggagagagtgacatggtagtgaggcagaagttaaaatcattgtgaaatgaggggctgtgaactccggagcagtgaatgcttacagttagtgagttacagtctcatctgacattcagaactgaggttttatgaagggagaatagcggataccgtgttccacctgtaggctcccccagtggtactatttgaggaggttatagggatggtagtgttttgtggaaacactaggttagagcaaagtactatttgaggaggttatagggatggtagtgttttgtggaaacactaggttagagcaaagtgaaaaagagtaaaaaatagaggagatttgttggaacacagtgaaacgattttagatcaggagatggggtcagaaaaaaggattaaatatttattttggagagataaaaatcatataagcaatttagaagtacagtggaagagaggctaatgagttaacctgagtaaaagggaatgagcagacacttgacactgtaaaaaatggctctacagacactgagaagcagctgttctttattgctcctgaagacagaacaaagggaaaaggctattttagttgtatgcgagtgtcataggaaacagacgcaagagaatttttcctttttttgtctctggaacatttcaagaataaggctgttttctttccagagtttacacataatgatataaattggatgacttgtttarattgtgtatttcctgtggtacctttggtaaagattgaaatgaccatgtcagattaatgtcttaacaaacatatgtcatattgcttaagcttgatctcagtggcaaattaaawacagcttaaattgatgagtttttcatcattagttatgaatgcatgggttattctgtagaaatcttaatattgaagatttttagtgtatcttgtattttaacaggttgcagtattttacagagctagcccaaggcacaagatgaaaattattaaggtgagtgtgtaagaatcagattgttttatttctgtatacaaaatgctgctactttacttttgttatgtttgcattacagggagtagagcatcaaggtcagaaatactgtgaagcaaaacagttttttttttttgtaagagcttgacatagaaacactaatagagaatttagttggcataagatgtagaagaaaacttgaatgaagtatctgcaaatacagccttctttaaacagttagacagtataaaacaatgttctaactggggtccatagccgagtcatcccagcgtaaatagcagtaattagttagaaactaaataaatacagcaaggaaatagtgttgtgacagtgtgaacagtgcttaaaaggctatgattatttatattaattagtcaaatgtatttaaaccaactgatagagtatccagtagttaatggtcttaagttatgatagccagccattgtgtagttcagagtttctcaaccttggcaccattgacattttggactggataattccttgttgtgaagggctgccccatatgttattgaatgtttagcagcattcttggccccttcccactaggtgccagtaacatcccccaaatcctgatagtccaaaacatctccacacattgtcagatgtcccttgggagacacaattgcccctggttgagaatcattgtatagttgtttgaagaacagaatttagagatacagttctcacagatgggaatattagtagcaactttttctaagctttatcttactgagatctccatttgttgaagttcattgaacaatgggtggtctatattatttctaatcttaattatgtgaaaaaaatagggaggatttgtttatcgctttgtatggaagcaacatttttatcaaaattccttcctctcccctgtcctctgctccactctagtcgctacagaagaacggttcagttgtagccatgacaggagatrgagtaaatgatgcagttgctctgaaggctgcagacattggagttgcgatgggccagactggtacagatgtttgcaaagaggcagcagacatgatcctagtggatgatgattttcaaaccataatgtaagctttgtttcagtgaatgcctatcagagaatcttcccctatcctttcctgtcccccacccctagagaattcaactggaaaagaattagtatttaaacattaggtaaactaaaccacttttctagggtaattatcctattttatggtatgaagaagatgatttgtgtggctggaacaggcatagtaaatggcaggaccctcatttaagaagtatttgccaagtgccagccacatttcacctttttctgggcactaatatgatggtatagtaatggcctttattttagttaaattcaggtagttagaaatatgcatatgtatggctctttttttggctttataataaatattgaaaattatgaagtttacatccatacctgttttttatatcagtaatttattcatcttgccctcatttaatgttataatttattaaatttaaatagctctatttgtgtcagccacagtttccagttgatttaagactccagtgtaatacatggtggtgtcagtttcacagtgttcaggtggggatcatgtgaatcccatttatttatttatttatttttttggtagctacctgttggatgacctgagtttagtgataaattccaattatatgttccaggctgctttattactctgttttggcctacagggaaacatttgggagcttaggactcacagtatttgccaagcttttgcaaggatatgagttttttctttccattattataattatatagaaatcttagaagaaatggggagttgattaaaaagcatagattttcctggattcagctaaatgaatgagataatttatatgaatccttgtaaaccatgttcttcatttaattcctctgcaacatgtgatctacttgatgtgcaggagcaacacgtagcttaaattctataattcctatatatctcattgccatttgattcctgacatgcattagtttaaacctttactctgcattttgtaccactaagaaaaatgagcttagaggaaggtgaagaagataatcatggctgggcagggtacctcatgcctgtaatgccagcactttgggaggctgaggtggatggatcacttgagcccaggagttcgaaaccagcctaggcaacatgtcaaaacccatctctccaaacaatacaaaaaaaatagctgggagtggtgatgtgagcctgtggtctcagctactctagaggctgagctggaggattgcttgagccaagaaggtcgaggctgcaggtaagtcaaggttgtgccactgcrctccagcctgggaagcagggcaagaccctgtctcaaaaaaaaaaaaaaaagataatcattttatgtattatgaatgtgaagtattttctcttgtgtgaagagacaatgcatgattttaatgttgaagtatcttcttcagaataagaattttaatattgtgacaaattagttcaggtagagcttaggcttgactttaattctttgctaaaataaatgtttccatattgatacatgtgttgtattagttggaattttattttatttatttgtttgtttgtttgagtcagtctcactttgttgccaaggctggagtgcagtggtgtgatcttggctcactgcaacctccgcctcccgggtttaagcgattctcctgcctcagcctcccgagtagctgggattacaggcatgcgccaccacacccggctaatttttgtatttttagtagagacggagtttcgctgcaccatggtggccaggctggtccgaactcgtgaccccaggtgatctgccagtttcggcctcccagtgtgctgggattacaggcatgagccacagtgcccggttggaaatttattttcaaaattagctctacagtgttttagtatagatacatttttgtatgataatattttctcacttcatctttattttttaaatttcaggtctgcaatcgaagagggtaaagggatttataataacattaaaaatttcgttagattccagctgagcaygtaagtttgcaagaaatttgtcaccatgggtcttctggataaattatatgaaaagtagaacttaagcagaatgcctagaaacttctctgccttatatttgtgagcattgttcatatgtcagttttccaaaaagaaaatttattgtattctgaaattttaaatggcatgataaataggttgtaaatgtaacagttagatgtctgtatcatcaaaatgtataaatctttgtgatttatttaatagctcacatctcattgtttcctcttggtatctttttccaaaagtagaaggggtattgtgtagtcaaagaacagttaccaaaatattgttgaaactatcatgcagatgtaaaaattctttatttgttcctgttgtctaaacatcttgaaaatcctttgttaaaatactcttagctttaaaatgtccacgtgactgaagaatagtttacttgaaacagtcktcctttaaaagcatagtagtaagagatttttaaatgctaaraaagtggtatcatagaatcaacagatttactctactgatatttttaaatgactctctttttcaacaggagtatagcagcattaactttaatctcattggctacattaatgaactttcctaatcctctcaatgccatgcagattttgtggatcaatattattatgkatggacscccarctcagaggtacgagttttttaattgcatgagctggaaagacaaggaatgtgtactaccctgataattaagttttaaaacttgatttatggacagtgttggaaaactttgcagcamatgttttaacatttatgttataaattgtgtgatgtgtgtattttattaattctttttgagtgtgcrtgcagtgtagatctgagcctttccactgttagatgcctagcctaaggttgagaatagatcaggaataggtgctatccctgtcctcaggaagtaagtaagccttttatttctaagaaatgggtataatggagaaatttctgggttcagttttattatctaggttctactgtcagttttagagactttgggaaagtattagaggacctgagtgtcataacttttttaaaaaatttaataataatggggtagttgagtgatagatgtcatttggccactccagcaaatcatcccagttaaaacctctttatatgaaagatatttcaaaattcagtcggtaggtcatgtatttcacaccgtatttgaaataggtaaacttacatgtaaatgaattggatggttttttgaaagttgattatctatcccctatcaaattgtgccaaacaaataaagaggagagaaaaagtgacaaaatcagtggttatttttgcgtaatcagccagcgttttatgatgcaacattttgtttctataagaaagcatttagtttgccgaataattgaggttagtgaggttgtgaaagtaacaaatccagaccttaaaacttgaaagtaatttatttttctgtttgtttttaagccktggagtagaaccagtggataaagatgtcattcgtaaacctcctcgcaactggaaagacagcattttgactaaaaacttgatacttaaaatacttgtttcatcaataatcattgtttgtgggactttgtttgtcttctggcgtgaggtatattcactggccaagctgctatattaacatgaattctgtatatctgataggattcttagttattttgatgggttacccagaaggctgggaagttaagggagctcttttagtgaaaaatataagaacattttaaaagagtttgatttccatctttatggataaataaaattattgattcatgtattagaataaatctgcagagaagtatcagttacaataaaaatacatgaaaatttagagagaagttggaaaatctgagtcttaaaatcatagagccactttattatttttaaataataacagtattttaatatctaatacatagttcatgagaagttttttttttactttttattatgtagattacagctattcactaggtgatttatagraaatttaggtagcttttatgtttcatgtgttaggctaaagttatttcttcctaatggaaagaaaatgtttatattttttaaaaagcagcgatttatccattaaattcagccactgaaaagtaattttgttattgcctcttgacagctaygagacaatgtgattacacctcgagacacaacaatgaccttcacatgcyttgtgttttttgacatgttcaatgcactaagttccagatcccaggtatgtttaggtgaacttagttgattgacttgattgactcacttgagtagagtgctttctaataagtaggcaaagattatgggtttttagctttgcttaattttgtagccacagattgcagccccagacacagccttcttataaacatgtgccattggtcacaatgaggatggggcatttgtgggaggtaagctttatgtctgactagaacataaaagtattaataattcacaggtgttgtcatctgcgtttagctggctatagctataagatagatcgtggttaacattatttgagcatagaacaaacctcatagtttctgttgagattttattagtctcattttaaaagacagtattgctaggagtataagagcagttatgtgcctattttttttcccatcactcctgtcactgtgtcaaagcttaggacattctaattttgcttttcttcccttgttgtatcttaaggtgtgactgctgcttcttggtctaagtgttttgatagaaaataatgggctagagctttatggtacttttttagagcatattgtccttaaaaactagtttcatttgaggcatgactattcatttcagctttaaagcactttatgaatccttaactatattaccatttgccatgctggaacttctgagtacagcgaattctcactaattgaccaatttttgaagaagctgtaatatttatttttttatgaaaagtggttttactttttcagtacacacacaattaggtccattctccaagaaaggattttagattatctaccttagtgaatgtatagaaatgatttagcaaaatacaaataaagtttcttgatgtttgggatgttaaaaggtttcttttctttctatggtctaaattatatagtgtcactttttaagcaagccttttcttgataaataaaataaaagctactttaatatttacttttattccatctgaattattccaaaacagtagtaaaatttaagatatttcatagaattgacattgcacaattcagtgataaagtgacactgcttgttaaaaattagaagtgaatataataaagaagttatttctgtgaccaaggagtaataaatgaactctctgctctgccaacagaccaagtctgtgtttgagattggactctgcagtaatagaatgttttgctatgcagttcttggatccatcatgggacaattactagttatttactttcctccgcttcagaargtttttcagactgagagcctaagcatactgggtaaagaaaacgttatctttatcatttatgtattttagataaatcatattttctaatgtgtttgttttaattttaaaattcttttaaaatagcaaaataagtaactcacttgatttgaaaaaggagtctattttttcacttggggaagctcaggggaattactctcctaactccagggttttggtttttgctcttttataggttatcaattgttataaaaatcataatacgtgattctcaaatatagcaaatcaaaacctgctctagagtatagtttataactttttatgtactatgccatcttgtatgaagagaaaactagacttaatctccctgaaaaccaagttgctctcttctttaaagttagaattttcagtaaactaataatttcattattctttcttgtttgtacattctaatttcacaaaatgtcagtctgaccaaatagcagaatgttttataaagactatttggaaattacacatttttcttacattaccatttattaaatgtataatacagtgcatttaaaaattagttttcctrtgtaggtgtgaggaatgatatatttgacagtaatgctatcctttattgagttctcaatttgggtatttatgaaaaggagttatacagtttcactgtattttttcttgtaagttaaaatttaccttaaaattgaactagttgaatttcagtattttaattccatattcacatttcttcctctttttaaaaaaatggcattttaaggaaacatctgcaattttccaagcagtaaataagaattgagatagtgtggatagtattgtaaagacaagtcttctatgctttgaaatagaacatattaatgtcaaatttttaatcttcagataggcattgtcattcaaattgtctactactgttgatacagtacttttttaaagggctgtgtgatctatgaaataaactccttttgttggtgatactgttaaaggctagccacataaggtttcagggaaagtggtcagaggacttgggttctaattctggctgctgcctttcctagttatgtgactttggataagtcacttaatatctttttttcttttcttatttttaactgagggtgattgtgcctgccytatggaatagttgtgaaacaatgtgtttgaaarctgtggtggccaggcgccatgcctcacgccagtaatcccaatacttcgggaggctgaggcaggcagatcacttgaggtcaggagttcaagaccagcctgtccaaaatggtgaaaccccctctctactaaaaatacgaacattagccaggtatgatggcacatgcctgtaatcccagccacttgggaggctgaggcaggcaaatggcttgaacccaggaggcggaggttgcagtgagctgagatcatgccmctgcattccagcctgggtgacagagcaagacttcatctcagaaaaaaaaaaaaaaaaaaaaaaagttgtgttaaaatgctagaaaaatgtaagctattaagctttgcaactgtaagtttcaaagaaatgtaaaacccaacttattttctcttgcagatctgttgtttcttttgggtctcacctcatcagtgtgcatagtggcagaaattataaagaaggttgaaaggagcagggaaaagatccagaagcatgttagttcgacatcatcatcttttcttgaagtatgatgcatattgcattattttatttgcaaactaggaattgcagtctgaggatcatttagaagggcaagttcaagaggatatgaagatttgagaactttttaactattcattgactaaaaatgaacattaatgttaaagacttaagactttaacctgctggcagtcccaaatgaaattatgcaactttgatatcatattccttgatttaaattggcttttgtgattgagtgaaactttataaagcatatggtcagttatttaattaaaaaggcaaaacctgaaccaccttctgcacttaaagaagtctaacagtacaaatacactatctatcttagatagatatatttttttttatttttaaatattgtactatttatggtggtggggctttcttactaatacacaaataaatttaatcatttcaaaggcattctatttggtttagaagttgattcccaggagtgccatatttcagctactgtatttcctttttcttgtaatgtaagcagctcagataccatgtgctatcatttttgtatcaagttttttgcacaggatgtgaccactgtcagatcactgttcttttctttctttttgtgattgaaaagcctatactacaatttgaagtaaatttttgtttttcttagtaagtgtaaatggttgctttatttttattttaaaaaggtatgtctttggtttggcagaattcatgcagggctatcaagtggtgttctagggtaacagtgtccataattaacgcttagtcatagagtcaaaaacatttaagactgattgggttgaagtttataataaattatattaacatgtcttcctttttgaggtaaagatatatactttgtcaaatatcattttgtcatcctctaaatataaatccaaatacctcagctaagtaattctattttattatttttactgttatgtatgtttttaatcatatttcttaggaagtataggctactggacttagaataaaaagtccccaaacccaaacaaatggtttatgaaccagagtatatgtggaagattctttgctggtcttgctctgtgtgcatctgaagcttctttggcctagattttagcacaaacctgagtatatctcttctactttcatcatgtgttctgtaccttctttttgtttcattgggcatgctagggaaataggtggattttgtgtgtaatgccatcagtttttatgaaagcttgatgaggtataggtcatttgttttgagtatgtgggccagaaatttaaaattagaaatttgtttttctgttgagtatataaacaaaaattggtcccaattctaacaggtttaatccttcttgaagccaataagttttatcttttataatctgtcaggatgaaccactccttagcttttatccaatattaaactgcaagtgttagcactgaaatattgtcattgatagggaaaatatctattctttgagtcattgttactgaggcagttgagtgtaaggagctggctgcagtttattctacttaaccctttaaggctgaattgtcaaatgtacattgttccatgtcgttagatggaacatggaagccattgtctaatcaactctatcattagtgacttgatgtctcataccttaattttgtaatgatttttattctctgttacaaagacttgaaatacgtattaaatgcacgttaatgttttgctttgcattttaggttcagattatgacttgattgaaataaatgtgcctatacattcatttgctttgtactataaaaataaaaatgatttcttaagttaatgacatcccagtggggactattagcattaaaattatccatatggatgctgaagatacagaaattaaaattatccatatggatgctggagaatgcatagtacacagaatctatgatttaaaaagaagttgaatgtacagtacagatccagattgcaattttccataatatattaatccaagttgacatggatgagttaaatgggctagtrtctaaattttaaatttttaccctatttcctaatcctaggacttgctagagtccctaacaatactaacttacttgatgtttttccctgttagactaccttatggagttatttggccccataatggctaaacatcagggaagaaaagaaaagaacttaaaataattcactgattaggtaaacagttctgaaatgatcaaaactggccacacagaacaaggctgaacatgttgtgtcacatttgtgctggacattgcatgacccagagatgaaacaaaagtgaaaccatgaaacccgaagaccctcccctctcaggatacaggctttatttatatagcagtaaccaccctcacaagaataagacacattatttacctgccatgcccatgtagggtatgtattttacattggtagtctttttgagatcacttaagttttggtctccttgatatactatataagtaaagtaagtattggtcacacttaaaaatagtttctcactgaaatgaattggaggcaaacaataaacataatatttaggaaacttaattaactctaccttgctttctgcctctgtcacttggcaattcacttccacatatgactcacccatgaagttagatgatgaactggttatcttttcattacatttttttagtacctggagtgtgctagaagtagaacgataatggcatccctgccctgtaggagcccatgaacacagatagcaggggatataactgctaataagctgtttcaagaaagtaaatagggatctttgcccatttactttaaaaatacacatagattaaaatgagtccagtgcacttttcactagatgtttccttgacattggcatttgaaaatctttgaagtgctttttaagactgagctcctgcaatccaaacagcagctgatttgcatactaaaacgtggtatggatgttcatccttaactagtacgtgattggacagacagatcattctgatggttaagtttccttgagctcagttaccacttgaactattaactcttatttaatgacattgttttgggttttggttgtcaagagttggttattgttaataatggataatggttaaccagtccctggtattaatgtagatacaattgtccataaacattgttgtaggtttagatttaaaaagaaaaagtagtatcatgccttcaggaagttttcagtcagttctggagaccaatgtgaaatatatccactagagtggtaaatgctgtccagaatgctacagtagttgaagtagagaaataacttcatgggatcctcaaagaaatttgtcatagaaatttcctagaactaatgacagctgaatcaaattttaagttgggaaactccagctgagaagcagtaggacagtgcagccaaacagcaaagcctctgcagaggtggtggtaggggctataaggaatctgtgaaaaccacaatgagtttgacactgttaaggcaggaggtacagtgtgaagggttggagagataggcaggaacctaatgctgaaagcagagacatttgatttgtctgatagcatgccagggcatttcaagagtttgatgtgagtttggatttttgtatcgtaacatgctgatggaagcacagagggtcaattgtgaagactgaaatagggagaccaattagaaaatcaaggaagcttaaggagtaaagggataattgagctgtggcagtcaggatggagagaaaggcatggaatttgaattgtcytttttttttttttttttttttttgaggcagggtctcactctgtcccccaggttggrgtacagtggtgtgatcttggctcactgcaacttctgcctcccaggatcaagcgatcctcccacctcagcctcctgcgtatctgggattacaggtgcacaccaccatgtctggctaatttttttgtattttcggtagaggcagggtttcaccatattacccaggctggtctcgaactcctaagctcaggtgatccaccagccttgggctcccaaatgctgggattaggtgtgaaccactgtgcccagctttgaatttgtatcttctgagagatagcattgacatgactggacaggagaaaaggaaaatggaaaagatactagtctgtggcctttggcttgaatagtagagctattagcagaagaacctaagctaagcagggtttagtgggacacaggtccatctgaaatgtacagcttgtggtgtctttgagatttcccagacggatgtgttaatcaaagctatagctgactaattataagctagtagaaaaacaagcatccattttttttgttgttgttaaattaagcgataagtcaaagtaaactcagctttcacaaaataagattttctttaaaaactttcctttagcatagttattaatcagcaaacagttgtgtaaattcaaaatgcagaaggacaagataatatttcaatctcctttgttgttgaatgttaatagggaatctgttattaaggttactgactggaaaacactgatctgaattactggtagcaatttttttgatacatgtagtaagacactttctaagaggtgagagcgtgtgtgtgtgtgtatatgtgtgtgtctgtttatgtggcataccacatagcttaaggtatgccacgtaaggaaaccccaatgagtaaataacattaccattagaaaacagctactkactctgaatgagtaattatggcagaagagtagaaaacaatgttggtttttcatttgtttgttttttgagaaggagtcttgctctgttgcccaggctggagtgcagtggtgcgatcttggctcactgcaacctttgcttcctgagttcaagtgattctcctgcctcagcctcccgagtagctgggattacaggcctgtgccaccatgcccagctaatttttgcatatttagtagagacagggttttaccatgttggtcaggctggtctcgaattcctgacctcaggtgatccatgcgcctcagcctcccaaagtgctgggattacgggcatgagccaccacggttggcctgtttatttttttaaattttactcgtaatttttttggcctttctagcctcatatcctacacaatgctccaatacagtccacttccagatcattttggacagtgttactttaagttgaaatcgttttttctctgtcccaatgttgagaatcagagcttttacctctacttcagagcccagtgaaatgccaacaagaataacctttccagatttctagtgtgtgtttgtgtgtgtgtgtktgtgtgtgtgtgtgtgtgtgtagtacagtttcttgtacactttttttttttttggcagggtgttgctctgtagtgtgatcatggctcactgcagcctggacatcctgggctcaagtgatcctcctatctcagcctctcaagtagctgggactgcaggtgcatgccaccatacctagctaattttgtgtatttttttttggtagagattaggttttgccatgttgcccaggctggtctcaaactcctgggctcaagcaatctgcccactttggcctctcaaagtgctgggattataagcgtgagccatcacgcccagcctcatttcttgtaaacactctttgaatgtagcaataagtttgcatataaaattgtgggattttatgttttagaaagcattaaaaatttaagttgaaaacacttgttgataaatctaaacagaaatttggtgatctctttcattcaaaattaaatgtcaaagtttggggagaaaagtgaaaacaattatttgagccattagtttttatccttagaaatccttttctaatgtaaatctgctggtgttctcgtgtacacgtgaacatatatgatgtaacagcctgtgcttgcacagctgctccaggtagatggtgtttcatttgcaggtcaccgtacacacctgattttgctattcctatcctgttttacgcaaatctggccaaactgacaaatatactgacaaaggcccacatttctgtggtggcttcatggctgttaggcctgacagaacttcttttcatatttaacccaagggtgccccagaatcattatttcttaagcaatagttgcattgctctacttaataacccttttgagtagaaaccacatctcattgttatgagcactcaatgccagaaactgagcaaactgttctatataaattccagagatccatttttgggctctggatttgtagcttttgaaaaatgtgccttttaatacagttttttaaaaaattactaatcttctcaactacattaaagaactttctattaaagttttctctgataagtataccaaagtgccctttagttgacaagtgacaatttggtgccatcttagggtcataaataaaataccatataatgcctggaccattgctcttatcaggtctgcatcttgcaggcatactgtgaaacacgtgatatgtgcatcttacaaataggtgactgtagaaaatgtatgtctgataggaaagacatgacaaactttacatttaagcattattagatcaattttaacaagctataaattagtatgttttaattcctattcctgtctcattcatctgtgtggttgcgtaataggattgcattagattttgtaagtatttttctatgtggagtgggtctggatggttggatggtccatgcatcagctagaggtattacaagttagggaaatagtttaatttgatcttgtttaactcacccacatggagctattatttagttttggtgtagaaactatggccaggcatggtgactcacacccttaatcccagcactttgagaggctggggaaggcgggttgcttgaggccaggagttcgagaccagtctggccaacatggcgaaactaaaaatacaaaaatctgtagagcgtggtgatgcatccctgtaatcccagcttcttgggaggctgagaaccagaactgcttgaacctgggaggtggaggctgcagtgagcctagattgcgccactgcactccagcctgggcaacagaacaagactgtctcaaaaaaaaaaaaaaaaaggaaagaaaagaaaaactgtgccatgctggtcaaattctcctgttgcttatttttgtaaataaagttttattagaacacaactatccacattcatttacaatattgtttattggcactgtcatgctgtggcagcaaaggtgagcagttgcagcaaaggtgagcagttgcaagggactatatgacctgtaaagcctaaaatatttactatctagccctttgtagaaagtttgcctactcatttagatattcaaaaagaggaaaataggccctgtaccttgcattcagtggattagaaaggaagtaccatcaattttctctaccctccaatctcccaacagtatattctctcttgaatggatgctcttggtagcagatttgatgtcagtgactactctgagtctccatcaaggcccccatgtagagaaagtcagagtgtctcagactgttgttaaaacatcatcaaccaggaggacatgccatcacattatcaaggcttcttgttcttacagtggctggagtgttctgatctgccgtcccatctgaattgtgcttcccatctctctctctttgctcacccaattttttatccatctgaagcagtctgctcctatctggttgatgggctcacttctacctcttggatgcacaagagaagtggaggtttccctcctattggttgtacaaacccagagaaataaagcttaatctgaataggcttaagtatgttatcttgcttagagaagacaacatttagtaatagcagaaactaaactatcctaacagctcagtcttagggaaaaaatatactcactaactcattttttcagaacagaacattctaaaccaaaacatatttgcatagttcccacagataccaaaaggtgactgtatatgtgcatgtatacataaatataaaaatatatttatattttgagagaaagacttagctattttaaccaaatagaatgttttcaggagtagcaggaatagaagagattgcatgtgcattgtagcatgttcatttttcatttgatttctgtccctaaaaacagaatccagtgaaactagctggaaatacttctttcatgtattatctcattcatttacttctctcattttaacagactgttatatggcctggtgcagtcacgccttttaaattttaaaacttccttccttaacatgaagttctcgtcttagaatttttacagctggatggacttgaatttggtattactcacacctctggaaagaaatgcagaagcagcttatcctgtatggctcagaaagctgttgctgaaagtggggtgtaatgtttttaatacatttttccaagagtagtatttaatttcaaattggtacaagatgcagaatcactttcagctgtgatgactgaaatgtgtcattaagacattacgagataaacaccaagtaccccacatctgtcttattgaaaatacagtgtcatattttgagtcaggcaccactgaaagtttatccttttatggaacttcctggtcttggtagtgacagctttccaggtgctgctcaggtaaatggtacaccagccagccaaacagcatgtggtagagagcagcacccagtgaaatctggcaaacttgctagggggaaaactgggtttggcctccttaggattatggagtagggccaggttataaccctggtagttgcaggaagaggaaattcctaggaaatggtaatatctgctcttcatctttttctatcttttttttttttttttttttgagatagagtcttgctctgttgcccaggctggagtgcagtggaacgatctcggctcactgcaagctctgcatcccgggttcacaccattctccggcctcagcctcccaagtagctgggactacaggtgcccgccaccacacccggctgatattgtttttgtatttttagtagagacggggtttcaccatgttagccaggatggtctcgatctcctgacctcgtgatctgcccacctcagcctcccaaagtgctgggattacaggtgtgagccaccacgcccggccacctttttctatctttaaacatgccaagggctctttcaaattgggctttaaaaacactacagaaaactctctgaacataggaaaaagggctcaagggggacaggtactcacatggggataattccttctggtcttttttcattattttcyaagtttgagcttggctgcccattgaaattgtcttggtagttttctaccctttccagtgtggctacggctggagttgctataatattctcacattcctgcccatctttcttcttcaccatatttgatagtgttgatctcctttgcctctgcaaaattctgctcttaaacctgtggcaactctggtctcacgttgtcttaatctttgtactgcttaacactcactcacttcttcccacattccttgctttgccctggcttttcatgtgcggatataacaatggctatcacttataacacacttttagtatcaggcactgtgctaagtaacttaaatatacttgttattgtatcttttacacaataatttggactgttataatccttattttgcaagtagggcaactgaggcatagtcattgatttatttccttttgtgcacaaaggagaaaaagataattctaagggctttttagctatggtctttatcttctgaaattcaaattcagatgtcaaaaggttaatttgaattctttccccatgatcaaatggcatgaaagacctgtgattatatttacaggatgcatattaaactttcaaggtccaggtgtctcaaaaagtgcttttaaaaaatagacttccagtataattttatcaccactaaatacagaacatgattaggttatagtaaaagttttcctgtctctgcagctttctctctaaaatttattcatcttagctgcccagagttccttttgttacttgaactgctaattgaagacagtttccaaagcctaagatgagatttcatttgttagaactgaattagaaagagcaggacctaatcacttgattgcaaacataggaaactagattttgsaaagggaatatgggatgtacaatattctgcttctacacaggtgttcctaatgtatatctgatctcaattttaaaattcctattctttaaagccaggtcaaaagccaggtctgagaatcttcttgtgatttaacctcttctcatcctggtgaccgctgtttccttaytgtagtattcagtctgcactttgccattttgcacttgacagactgctttatgtaagggtaaaaaccacagttacttttgcaccaacttaataaaataatctcttgtcatttcattgtgtgttgtctcccaagcagcctgaacaagaatgtcttctgcagggggttcaggtgctatgtcatcatttttcggtgaaccaccttacatactcctgtgaagtgcctgtgacctctcatctaatacatgtaggagaagatatacaccagagtagtatacttaaagggacattattagactgtcactgctttactgcaaggctggataatttcagtggaatggtcctgagtgccatggttagagaaaggaacctgacttattacttctgctggaggaggacacttttaatgaaagaaaaacatggtagatgtaattcagtggttttaagaagcagtgttgatgataacccaggaaatgggacagttatattaatatagtctccagattagcttcaaactccaggaatcaaggtagggaggatttgatataacaacggtcttacatggtttttcttttttctttttttttttttttttgagacagtcttgctctgtcacccaggctggagtacagtggcgccatctcggttcactgcagcctctgtctcccgggttcaagcagttctcccgcctcagcctcctgagtagctgggactacaggtgccctccatgatgcccrgctaatttttgtatttttagtagagacggggtttcaccatgtcggccaggctggtcttgaactcctgacctcaaatgatctgcctgccttggccttccaaagtgctgggattacaggtgtgagccactacatccagcaccggtctcacatgtttatagtcctcattagataccttattttccagtaacatttcttctcaaaaatagatgtacttgactactcttttcttgattcttctgggartaaccatctctttggagatggttgttagtaaggttataaaaataaccttactgaggaactcccatgcaatcctctgaaaataataaaaatttccttatttcaagaactcttatttaacaaagtaattgttagggttgaatactctaggggcaaatgatttattgtgccttttgtaaaagtcaacacttggcaggtgtgtgtttgacactggctgatgctgggcttatttctctaagagtatggtaattctagtaaagtaaagaaaattgtttatcagatattaggaactgtacataggcctgctcaaaatggcagctttaaagctacctttagggctattcctgatggaatataccagtgggagagtacagaaggaagaacacaatttgtatgaatacaagtaaaatgaaggttgagtatattttcagatcttgcccaatgcatttattctacttggttctctttattttcaagttctcatttggaactggccggcactttcagaactctgggtatttctaattttagcagcctctatttggcagtattttccagagcagtaccttttaaacttcttccctacagtccacagtaaggaatatattttacacaatcacctaatacatgatatgtatatctgatattttccattctaactttttcattaaaaaatgctgggtatgactcattaaatactttcacatctcattaatgggtcaaaatctgtagtataaagagggcatagggtctggtattgctgcatatatctcttgatattttcacttctcactgtttcctccttctccaggtctaacagctcaggatgctgtttcttatttggctgaagccattagtttcaacttctcctttaaaacctggagtgcacctaaagtgctcttcaatcctgtcatggtctcattgactaagtacttayttttagtagagacagttttctgtctggcatcctcacttctaactttcattggccagacttcatactaaagtacaaagaggaaactgtttttaaaactttttgaaatgataaccagctgctacttaaaggcaataattgagtgagacttctactttctgagaatgtagctggctaaattgctgcaatttaaagcatatagactatattaccattaacttgctgaaatggaacatgagaagtataaacatggtttcaaacatatttagaaatacagaagcttcttaaatcaggttgtatttattaaaaacaaaatacaaaataacttggaattcagattattgtgatgtttatcccctaacaggtcagtcctaaagaaaaagctaattgtttcaagggtggtaacggaagaattttaagtaaggattatattaaatacatctagtttgatgcaaactgagttttattcaatgttggaggcctcactatgttcctctaagttttcaaccattaacaacccaaaccggttgtttccctcataccaacacttggtgtgtgcagtggttctccctctgttcttagaacagctggtattctgtttcttctgcctttttttttttgaatttgatctaccttttggtaggaatatttcagcgggggcatatgaccttgtggcattgaatagatattcataaagttgcttagcctcaggacatatgctcaggagactttctacagaggtcgatgctagcagttgctggcatagtccgtgcaccaggcttccactgtacagtctgttcaaagcaagaaaaamgtatgttgttaaagaagtaattcagtgcaacaggataactaccattgacatagcttcaacaaatgcatctaaacaatgagagctcttattgctctataatattatcgaaattacttaagaataatctgttctttgaaggaaggaactgagctggtatgacaaagattctttgctggtgatacttaaaaacttttcatcaacaaattacgtgatgcatgcttagtggttttgcagctagccccagactgagcaggtgtctttaacaaacactttaattttaaagaaaaggaatttaaaaggaccctgataaaccaaacaggcagtttgttagaatatgagaaaatttattggcatcatttgcaaggtcattcactgagactaaaaacctacttcacaaatagaagatgggattaattggaatccacaagtttattatggacaaagctgataaactggtaccttagcaatccatgtagaaccatcatttaatcagtgtaacatctctgtgtaaaaagccttggttatgctaagattcaagaacaatcctgctgtttaaatcattattaagagaactgttttgttttgcatttcctgttttgttttaaaaggatttgtggtaactaaagaggatccagtcaagaatggccttaaattattaaacgaaagaaataaagaatccaggggtcaaaggccaattagtcttatttgtgttagctcagatataaggcccagagatatattaacaacactgtttactgccaggaggctttttaccttgaaacatgtaaagtcccaccatattttgtatgtgtccatatatcctcattcaaagtattgaaggcactggggctgcaacagcaaataaaatagacaagcccctccccccacagagtttacatctgagtggagagacaaacaaaacacaatctatctcctttttatcttcatctctccctcaagtacctcctggatggtcaattaccaagatgtccaatccattgatcctatcacttttttcactgctccacaccctactgctgctgtcacttctttttatcatacccagcttaaactccacagacaaacattrtaattactctgtggcacataggctcaactcccttattgtccttcttgcctggtaaagcaaacatcctaggttaagttcacttgggcatctactcatcatctcacttagaatgaaagctccattagagctgagattctgtttttgtccctacaccctagcacagggtaggcatttaatatctgaatgaatgagtaagccatatgccaagtggtaagaaatgcaattaaaaaaaaatagagtaacaggactagagtgaatgagggtagacagtgtgtctcactagggtgggttatcagaaaaaggctctacaaagtgacatttaaagactgagaggaaaggagagagttgtatcctaccaatgattgcctcccctctcccacatattaatgtattacttaaaggaactgattttttaaaattggattgaatcatggaaacattctttgagaatatggaaataatttaatatttttcccgtttccagctcttcagctgtaacagtgactcaaaatcaattacattaagattagtttttttttgttttggtttttttttttaagtaactttgttgctttaaatataagtgaaaatactgtatttacttttgtgtgcttccatctgaactaaagtttcccatggtgcttaccgagttaggtctggctctgggagaggagtggacagcagctggttgagatacatccccatctggagacaggactgccactgacagaagatgtgagctgtgtctaagtccagtcttgtgcccagccgtgtctgcgccttcactctttggaactckgcatacaacatcttagcaccatcttcctgcagctcttccttacctaaataaagaaacagcccaagggcagtatttctaaaagcactgtaacagcttttcattttctccacatatactacaaattctataaagaaagaaattaatttaaaaaaactaagatgtttttctcttctggcttcataaatgccttgctgtataaattgaaatattgatactgaactgtctttttaatgatgacctaactttattcaacccatcggaatttactttttccctgaaataagatcttttccactggtctactacctgaccataaacatgtctgcatttgaattctctaaaccctaaatctgtgtctatgaaaaatacaaatgactattaaatattattctctttactgttctctttcaccgaaactcccaagctgtggtgcatttgtgttaaagaaacaacctgtgtgttcaaaacacattttgacctctgtgttttataggaggaagctaaagtatgacttggagaatttggcaaataatcattttcttttcatagtagaggataaggggcaagaagcaacaatcctaggaaataaggaatgttgtgtgtttttagctgtaagtttctacagatttgtttgggcaggggtgcacaaaataacatctggaccaatttgaaaataataaaaaggaggcccaccttttaccaactagcgaggagcaagacactgagcctgcctgggtacagggtccacatttcctaaaagaaaagaaacagacccttgacatgccccttctcttggactcaggtaaaaacttaataggcttgtgctctgagagctttcttatactgtatttattattcaatcagaggaaatactctaaacctgtgttcataaagcagcagtgggacttaactgatttgttttgtgttaagttggctgtcatataacaacagtccctctgacagctgtcaagcttgagccttaatactttagaaacaggaatccatgctgtttcattcttttatctaacttattaaaatagtaaactagagtagcacgatctaatagaactttctgcagtgctgtccaatacagtaggctagcctatagccatatgtaactacctgacacttgaagtgtggctagtgtgactgaaaagctgaatttttaatttaaatggaatttaactttggccatgtgtggctagtagccaccatattagatagtactattccagagtataattattatgcatgtttatacagtgttagagcattcataatctttaaagaggatattccactgaggtattaaagtgtcccagtgtttcagcatttacttcacctggtattatatgcagatgaacttgcctcagtgtatttaagagatattactggccgggcgcggtggctcatgcttgtaatcccagcactttgggaggctgaggcgggtggatcacaaggtcaggagttcaagaccagcctggccaagatggtgaaaacccgtctctactaaaaatacaaaaattagctgggcgcggtgacaggcacctgtaatcccagctactcggaaggctgaggcagaagaatcactggaacccaggtggcagaggctgcagtgagccaagattgcaccactgcactccagcctaggcaacagagtgagactccatctcaaaaaaaaaaaaaaaaaaaaaaaaaaggacaaattactatttctgccatcactacttacatactaattgaaacctacagcagagaaaaaggaataaaaagatgtataagcaagaatgtagtggttgtaggtatttagataagtttcacttctgggcaagtttcttgtgatgacgttgctgctgtgctaataactggataggtaacatggaatacaaaatgcagctggcaaaatacactgtcacaattcacaagttaaaggagtaggtgccaccaaacagatggaagttggcagtaccccaacacatctcactgctgtatacttaagattcaagccctccagcactgagcctggcacatgaagtgttaaaaaatatttaccaatgaatgaatgatattttggtgcctccacatctaagttgtgatacaattaatgggagtaaataatccaagaatacttttttgtttgtgtaaactcgagtaaacagtttgcaagcaacatgccacaatatactcctgtaatttccagttacctaccagggctgttgattatggcaatcaagggccccactagcattgtgagcagtaaggattgtagatgatgtagctttgctttggtctcggtgtgctgcaaccagtagcaactgacagcaatgggcaacttcagtgaagtagggattggctccagaatggtctgtttcaccttcagggtttctaacagaagcatctgccgcctcctcaaggagagctgaaaatacacaccaagtatcctgcaagttactttgggaaatgtctgttatttcttttttccaccatagcatgaagagatttaatgctactgaaacttctgtcagctgttaaacttatcttcttgtgggaaaaaaaatcagccacactcacagcatttagaacattaataagatgctttataaatatggttggttgaatgggtgtactgcctactcctacacctttacttatgtcattccatcctctttgtatacgctggtgagcatcttcagtgcacgtcacctgggaagctcattaaaaattcaatccttaggccctactccataaattttgattgactaatctgagagagagcccaggaggaatatacattttaactagcagcccaagtattctactttgagaaacaaagctgtatactcaacaccacctgtatgtgcctgtgcaacaggcatttgccttcagcatgatgccattactaattgcctccagaagacaaacgttgcttttaggaaccctatgtggcatatactctatttgtttgggtcctgtctcatgtcccttccctgttgaatgctttattgtctttgcataaaagacacacagggattgtcccagggtggctgcttgtagattagaggtatattcaagggagataggaatattttaaggactacttgcattgtgcttggagtaacacgccatacttttacttcatggtttagcgtgtacttcaaataaaagctcagaagtaaaacagctataagagcactgaggttcttgttgaaataattttaccttaatgaattaccaagaccttgtaagaaccagaatggggaccttacaggtcatgcactcaggaatattaaaaggtcatcttctgggggactttataatcaaactttaagaaaaacaaaagttgtattcctagtgtctgcacacagccagaaaaagattttctgctttctggaaagttgagatggtaataacatttctcagcatgtaacatctagttagtagaaagagtggttgacagctgagactaaagatattaacctgaaacaaaacacatcataaatgacaaaatagttttatcattaatgcatgaaaactttaaatagtacgattatttctaaatactgcttttaataatattgtgatacaaattttaaaattagaaatatgcaaagaactttatagtataaccaattacccctactggaagtagttttaactacttaaattttaagtaaagtggaaactaaactcttaaactggtttttaaaatgcactaagtagagctaagaaaatacaccaactcttttctgatatatatttaaattactgaattatagagccaagttacaacttttcataaacaaagcagtctgggctttgacttcagagatgttccgccctgcactaaccctatggctttggtcgaaaggtttctgaccttttctacagtctgtctgacttatctgtaaaatggtcattataatgacttgtataagatgtttcatcaaacccaccagtccacagtcccttccaaaaggggaagtactcaactcacagcccttaacgttagttaggttttatcccatgtgacaactactttccctcttccccagggggagcgaaagcacaagcctgcagaagcagctgccccgagaggcagagatgcccagagagagactggtcttggctgccttactccttaagaatgatccacttttgtgtctccttatgattaacctcccattggttaacttgaatggtgctctgtccattgcaactaacataaccaaaatgaaaccctatcccatgtggttattgtgggaattaaatgagagactataaagtttttattaacaacagctggccaaagcagataatgtattacaagatctaaaaaacaaaatgaataggtactatcacaaggtttctatacttgtacttgcatttgtgtttggaatcacatgagcacctggtacatttataattttcaggggctaattagaaccattagcactgagctaaattcagaattgataagtttatgccaagagaaagctgggtgatagcagagcgcagagaatgaactaaaatttcactctattttgaatccaggtaaatgatgagaacacttaagtcatctctacttagcaaggaatataagcagcctgctatactcatggattcagttggatttccatgtggggggaaaaggtatcctgatccctatttcacaccatacgcacccacaaaaaaccaattctagatacattatagatctaaatgtgaacagcaaaaaaacattttcatgaccgtggagtaggcagtttcctaagcagttcacaaaagtggtaaccataaataataaaaatttaaattagagtatattaagaacttctgttcatcaaaacatactaaagagtgaataaacaatgggagagactattcacaatatgttatttgacaaaggacccgtatatgataaaaatgagcaaaaaactgtacagaaacttcatataatagagtatcacatggctaatgaacacatggaaatggaagattggaaagaacccaaatgctcataagctgtgtaatgaaaaaaaatgttcttaagtgtataatggtaatataccaaaatagaaaaatgttacagcaatgagaaatgaatgatcaactactcacagcaatgtgaatgaatctcatgtggaataaaagccagatgaaagaattcatttctaaagtaataattcagttaaaactattgtgttgttaaacaggagagtgattatagagagttgcagagcgagtgactggaaccagacactaggagaagcttctagggtggcgataatgattcatctggatcttctttgcatggatgtatagaccttgcaaaaatttatcatgctgtacgattatttgggcactttactgtgtttatactcaaggaagcatgaattgcaaaggaacaagatgaaactttaggggttatggatacattgattattttaattgtaggatgacttcacagatgtagacatctcaaaactcatcaaagtacacactttatgtgcactttactgtacactacttatttctcagtaaagccattacattttttttaaaaaactccccaacagcaccatttatgcttgagtagaaatgtaatttcagcaaaacattaataatgtagctagtttgaattttattggtgtgggtaaagttttaataaatcccttgtttgagactgacttacgctccactttctagttttgtacccctggaaatgtgctaaaggtagattgtcagttgtgttaccaagcattataaaaatgacttataaaattgcatctaagcttaaactatatataaatgaactataaacacctgatggggacaccatatcttggggcttccctgagtgcagtgtcttgtaagtaggatgtcccttgcagggacctagctatgtttatggaattattataagaaagactggatcctatagggaacggggcttttaagctactgaaaccttttcttctcctttatctaactgaggtataattcatatgtcataaaagtcatccttttaaagcatacaattcagtgggtttagtgtatatatatttttagagacagggttttgctcaacagggagcacaatcatagctcactacaggcttgacctcctgggctcgagcaatcctccaacctcagcctcttgagtagctgtaccaccatgcctggcaaaaaatttttttttttttttttagtagagacagtcttgttgtgttgcccaggctggtcttgaactactggcctcaagtgatcctcccactttggccttccaaagtgctgggcttacaggcatgagccatcttgccttggtttagtatatttataaacttgtgcagccatcactaattccaaaacattttctta

SEQ ID NO: 93204 - DNA, 21179 bp, Homo sapiens
  misc_feature (1)...(21179): n = A,T,C or G
ttctgtcagacataattcctcagtttagccttcccacctctatacagtctgataacagaccagcctttattagtcaaatcagccaagcagattttcaggctcttagtattcagtgaaacctttatatcccttatggtcctccgtcttcaggaaaagtagaacggactaaaggtcttttaaaaacacacctcaccaagctcagctaccaacttaaaaaggactggacaatacttttacgactttcctttctcagaagtcagacctgtcctcagaatgctacaaggtacagcccatttgagctcctgtatagacgctcctttttattaggccccagtctcattccagacaccagaccaacttagactgtgccccaaaaaaacttatcatccctattatcttctgtctagtcatactcctattcaccgttctcaactactcatacacgccctgctcttatttacactgccggtttacgctgtttctccaagccatcacagctgatatctcctggtgctatccccaaactgccactcttaactcttgaagtaaataaataatctttgctggcaggactgtgctgaatctccttaggcactctctaatcagatgtcctgagttgtcccaattcttagaccttttatacctgtttttctccttctcttattccatttagtttttcaattcatacaaaactgtatccaggccatcaccaataattctaaatgacaaatgttccttctaacaaccccacaatatcaccccttaccacaaaatcttccttcagcttaatctctcccactctaggttcccacaccgcccctaatcccgctgaagcagccctgagaaacatcgcccattatctctccataccacccccaaaaattttcgctgtcccaaaactttaccactatttagttttatttttcttattaatataagaagacaggaatgtcagccctctgagcccaagcaaagccatcatatcccctgtgacctgcacgtacacatccagatcgccggttcctgccttaactgatgacattccaccacaaaagaagtgaaaatggcctgttcctgccttaactgatgacattttcttgtgaaattccttctcctggctcatcctggctcaaaagctcccccattgagtaccttgtgacccccactcctgcccgccagagaacaacccccctttttcctttaccttcccaaatcctataaaaccgccccacccctgtctcccttggctgactttcttttcagactcagcccacctgcacccaggtgattaaaagctttattgctcacacaaagcctgtttggtggtctcttcacacggacgcgcatgaaatgtataatgctttgtcagctccaaatcataccctcaactttccattttacatctccgaaatctggatgtatcttagagtcgatgatgcaattataattggtagcttcctttctttatgttagtacataaaaataagggtgcatcctacaaatgatggcttctgagattagataaaatacctttctattagctctgtggttctctgcctgtgtattgccaggaggaaggaagtggagcatttcaggtgaggcacagggttttggtatcaattcctaagattcctttcatggtccagcccctggtgtgcattatcctacagttcctccctctatcgcaccctcagccacttggtgtgtctccttatttctgctcctcttgcctaccagcatgtgcctgatgactgaatcctgcccacccaaatgtcaagagcctgccagagatggcttattctcctccactctcctcagtgcatgtgggtatgtgtgtttggagatgactggaaaagcacagtggctacccattaaactgacttaggggtcacactagagaggaagaccatgaagaaaactgagttccagcctgacagcagaagggcagagctttctgggctactggctctaagggcaatgcatatatctgctgatttaaaataataataacaataatggctttgggtttccttaggttatcctccaacccaaagaaaccagtgggcagacatgtatacatggagtggactgggtcagctctttggcttcctagcatgttctgccatctctttttttctgatgacagaacaagcccttgcccacagggtaaaaacctgatgccagcctggccccctggagtccttctaggaccctggaagagagctgttctctttctctttgttttgttaattttaagctgcttccttgccatgcaaagagagaaagcccaagcaaagaccagcataggcagagagccggtagagcggcctgggtccttgtatcctgtgaagcatcacggttatccttctctgcacatgggccagtgcattcctgttctgcttaaacaagcttaagttgttccttcgagtcaatacaagataagatattttaaacctctctctactttaaactatccctctagcttagctgttctttttgaaagttatttgcaacaaacaattcaagtttgagatttgggagggcagaatgcccatattctgtgttgattgaaaggagattcctgggccttaggtccctgctttggttgagaagttgtgatgataattaaagagcctgcgtagattctcactagaggcagggctctgccttgagttgggtcggggtgccaacaggctgctctggatttatccgaagtccttatcagggtaccggatggggcattcaatgaagtttgcaccataaagccctaagaactccaggcttgaagattctctgcaaaaagtgttaccatagccagtcattttggtttgccataacygataagggcttatctttctgacagcacttaccaacctagttcctctgatttttgagtcatgtcctagaaaaagagctgagcccaaggaactacagcttggaggatatatctgatctatctgcgatggcaggaaagcatgcatctagttgatctaaaaactagatggcattattgaggagttggacaggcggtcttaggaacaacctcgttttatactttttaaaaataggaatttacttaaaggcaacttccatctgctctcattctggcagaggtattgtgataaaggctttcaggaatgtcaacagctcaggattggcattagctcatagataattcccgtctactaaattaaagtctatgagagattgatgcatgcaccagagtcttgaattattaggcaaggatcttgctaaagctggacatgggaaggttgctatgaaactcatttcaaaggctgtgtaggccaactcacctctgggaaaccaacgcttattattaaaccaatgcaactgctcaaaaactaaaactccatcactatctaagttccccatcatggtgtgtgaaatcatttccagaaaactcttcaaaagataccgaataaaaggcatcacaggccgggcacggtggctcatgcctgtaatcccagcactttgggaggcccaggctggtggatcacctgaggtcaggagtttgagaccagcctggccagcatggtgaaaccccatctctactagaaaaatacaaaaattagccgggtgtggtggtgcgcacctgtaatcccagctacttgggaggctgagccaggagaacctggcaggcggaggttgcagtgagccgagatcacgccattgcactgcagcccaggtgacagagtgagactccatctcaaaaaaaataaataaataaaaataaaaataaaaaaagccatcacgaaaagacatttctttatcaggtcagcaaattgattgctggtttcaatctctcaagaagtcagattctcttcagacactcctttgtgtttctttacaatgtaatcagtcattccagggtcagctatgaggcacactcccctggcctccctcataagcaatttaattgcaaagggttagcatactatttcttctctgctattctcagaattctcaattatgaaaacaaaaacaataattaaaaagttcttccagctgattttttttttttttttttttttgagacagagtctcacttaaactctgctgcccaggctgtagtgcagtggtgcaatctctgctcactgcaacctctgcctcccacgttcaaccaattctgctgccttcccccctgatccccgagtagctgggattacaggtgtgcaccaccacgtccggctaacttttgtatttttagtagatggggtttcgccatgttggccaggctggtctcgaactcctgacctcaagtgatccgcccgcttaagcctcccaaagtgctgggattacaggcgtgagccactgcgcctagccccacgtgcatttttttttttaagggaggcaggaaagaaggcatttgggcctcttatctgcaattttcttccgtgtaaacttatgtgaaggatctggagtgggacttggtggcttcaagccctggctccacttcttgatggctgcgcgacctgggttaagtcacgcaacctctctgaaccctagtttattcatctgtaaacaggtcaataatagcacgagattcgcagcgcgagtggagctcaaagtgcagggttgtccctggtgaacctatcacttttatatttatcctttgatgaagccagtacaattcctacctggttaaccagatacatcccacctcttccctcgagttcgcccttccccccgcctcgtgaagtccttgttctcttagctgtcttgaaaatcctatgcatcagcatgtaggaaagggcgcgccaggcgggggaagccacccccgcccaagcgcctccggcttcccttataaagggagggcccccttcgcgaccgcaagcgcgcccaggaagaccacagagccgccggtgcgcassgaggtggcgatacgcgcccgggctcggcctgcgggtggtggcccaagcgtccgcctcgctggcctggcaggcgcgactgtgcgtgcgcagccgagggtggtggcggccggcaccccacgccaagggtggtggtggccggcaccccaccctcggccgccgcctccgcgtgtcaggtgccgtgagaagcgcgggaggagcggccgcaggcagcgcccagggatatgactggagccgactttccagaagcggcgcacgcaaagcccagctccgcacgcaaaggggaggcgacassagaaacttcaacccgataaagttcgccggagcgcggagattcgcctcctcctgccactctccgccccgctcgggtcccgccccgctagctcccccaggcccccccagtcgccccagcttggctccccgccctgcgccaacggcttccatcgcagcctgggcggccccgcgcccaccagcgggcggcgccacctggagtggcctctacgcgggaaatctcagggccagctgcgccccaggagcctttgtgtgcccaagcactgtcggggccccggggcgggggagcggctacttttagggattcctgatctcgccgcaagaactggaaaaaatttagcatgccaaagagcctccactgaggtggcaatttgtttgcgagaacctaagataaaatttaaacaaccaaccaggggcgctgtgaggcaaaccgctgccactacactggctttccgggaagcaagctcaagtcgcggagagggaagggaggtcgtgcgctcggggcgrggcgcgctcccaagtcgagcgcagcggccggggcaggttgtaccgagcgtggttctggggacaccgtgcggcctygattggaggtggctgtgatgaagcgcggttaccgcacaatggaaacgtgggcacctccgctcccatgaaagcctgctggtagagctccgaggccggccggtgcgcctggacgggagtccgggtcaaagcggcctggtgtgcggcgcgccccgccccccgcaggccccgccctgccaggtcgcgctgccctccttctacccagtccttaaaacccggaggagcgggatggcgcgctttgactctggagtgggagtgggagcgagcgcttctgcgactccagttgtgagagccgcaagggcatgggaattgacgccactcaccgacccccagtctcaatctcaacgctgtgaggaaacctcgactttgccaggtccccaagggcagcggggctcggcgagcgaggcacccttctccgtccccatcccaatccaagcgytcctggcactgacgacgccaagagactcgagtgggagttaaagcttccagtgagggcagcaggtgtccaggccgggcctgcgggttcctgttgacgtcttgccctaggcaaaggtcccagttccttctcggagccggctgtcccgcgccactggaaaccgcacctccccgcaggtcagtctgtctgccgaggcgctgcccggcgacctcttcagatggattattacaggtagcgggtggcgtggtaggtactttaaaggaaatcaagcgccaccgcctcgatgcccgcagcgttgtccccarattgcaggaaccgttacgcgccttgcggggaggggaagggtttggcgctgggttacagcgaggtggaaacacgccccttctyttctccaagggagagtgggttggggatgggaaggggcgtcttcggccatttctccagagagtcagctccgacctctccacccaacggcactcagtccccagaggctggggtaggggcgtggggcgcccgctcctgtctctgcacccctgagtgtcacgccttctcctytctgtccccagcaygggcaccagcctcagcccgaacgacccttggcygctaaacccgctgtccatcyagcagaccacgctcctgctactcctgtcggtgctggccactgtgcatgtgggccagcggctgctgaggcaacggaggcggcagctcsggtccgcgcccccgggcccgtttgcgtrsccactgatcgraaacgcggcggcggtgggccaggcggctcacctctcgttcgctcgccyggcgcggcgcwacggcgacgttttccagatccgcctgggcagctgccccatagtggtgctgaatggcgagcgcgccatccaccaggccctggtgcagcagggctcggccttcgccgaccggccgkccttcgcctccttccgtgtggtgtccggcggccgcagcatggctttcggccactactcggagcactggaaggtgcagcggcgcgcagcccacagcatgatgcgcaacttcttcacgcgccagccgcgcagccgccaagtcctcgagggccacgtgctgagcgaggcgcgcgagctggtggcgctgctggtgcgcggcagcgcggacggmgccttcctcgwccygaggccgctgaccrtcgtggccgtggccaacgtcatgagtgccgtgtgtttcggctgccgctacakccacgacgwccccgagttccgtgagctgctcagccacaacraagagttcgggcgcacggtgggcgcgggcagcctggtggacgtsatgccctggctgcagtacttccccaacccggtgcgcaccgttttccgcgaattcgagcagctcaaccgcaacttcagcaacttcatcctggacaagttcttgaggcactgmkaaagccttcggcccggggccgccccccgcgacatgatggacgcctttatcctctctgcggaaaagaaggcggccggggactcgcacggtggtggcgcgcggctggatttggagaacktaccggccactatcactgacatcttcggcgccagccaggacaccctgtccaccgcgctgcagtggctgctcctcytcttcaccaggtaaagcctctgggaggcgtgggccaggtcttttctcctctgaaaaaggcggagtagagacagaatatgctgagtttgcaagcagggccccgggtttggggtttcgctccaggtccccacccctcaaaaccaagatcgcgtcggtaaagggactcacagtgagggctgcgacacgcgcacgcgccccacccagcggtgccccgacccctccggtctcctatcttgtctctatcgtcccctcccctgcttgcgagtgagaacacatttgcaaagacccctccaccccccggaaaaacaagagtttttaaatgcttggagatgagccctgatatctctctccctggcgcattacaatcagaactggaatagttccgaaagaaaaggtaatgtcataaatatgttaaacacagcagcctctcctaggctagtcctcggcgtgcatccgaggccgcccagccctggcgctaaaagcgggccgcccgtcagggctttgttccaggccaaggaagcccatggaggccgggccagccgacaggtaacccgcacagaaactttcagaaggcggccacaactagcgggcagcgctaggtttataaaacctccgcgctaggagtttgagaaatgccggggtagaagacaagaagcagtcacttttacgaaagcagagtagcattcagaaaggcagatgggatatccaggaggcgcctgcagacgtttctggcccctgcgcttggctcagttagcggaccccctgatgcccacgttggtctctactaagcacggattcaacaggtccctggtgtcgggttgccagatttggcaaaagaaaagtaagttttacacgggaatactcacactaaaagattagcccttgttgatctgaaatccatatttaactgggcggcctgtagtatttactgtggaaacactatccctaggggcaaatgtttcgcaaggcaaattttgattgccgaagagaccagaaatcctggttttgtgtcatttcttggagcacaagtgagcagttggagatgctgaatctgcaggcgccacagaaaggtgtttggaaggcagagaatgactctttccttattaaaatccactgcaatctatatttccttagatactgtacagctaccttcacaaattaaaagtttctgtatacttaaaatggctttttagtattaaaatcatagaaacacccatggtgggtgagggagaggcagaaatcgaataaagaaaagtcaaccagagatcagggaaaaggaaatcccggaataggttccataggtttttgtgcatccgcagataggcattttaacttttgaaacggcctttgtttttcattagaaccacaatagttctccgagtactccaattaggcggcaaaaagaaataaaacaatttggaggtcactttcaattcaatatgctgatacttttttttcctttttagtgaaaagacgtatgacagggcttggcaaattacacgatctgtttttgtatatacgttttattgacgcagtcatgcccattcatttatacattgtcgatggctgcgttcactctacaacacaaggcagagcagagtagtgcaacaaagagggtttggtccacaaagtctaaaatagatactctctggctctccccaccatacatgtttctatgaaaaaagttggcagactcctgcaatataatgttgaagaagcgattctaaaaataactccacttcatcacatacgtgtatacattttttttcggagttgcaaacaatcagttacttgttttttgacttctaacactttgactcaaggtagtggacatttctaatcttttaatatttattttggtaatttttgatggctatatagtattttgctatgataatgtatagttatatataatcatttattgaactttaatgttggtcattggccttgattgcatttttaaaatttttattttaattttatrtatttacttaccttagagacagggtctcactaccttacccaggctggtcccaaactcctgggctcaagcagttctcccgccgctgtctggcaggtagctggggctacaggcgtgtaccaccatgcctggctaatttttagaattttaggtcctgttgtggttacatatttttgtatctcttaaattattttctgaaaatacatttctaggcatggattactgggtttaaaatgaggcgggaagaggttaccttcatgtctcttgcctcgtattaagattttgttttttaaaaagattgtatcagtttgtatcatcaacagtgaataagtactacagtttgtaccataattttatgaacattgggtatttgctttcaaatttaaaaaatacagtatgtagctttatccatcaggacaccaattatctttgtataaaatgagaacagcatgtctgttggaattgtccagggaaatgagggagaaaaaaaatttactttcacattgtaactttcgtgggccctgggtgcttttgcctttgtagattccttatactataaaaaaattaaaaattaaatttcatgactaccctgatataaagatgaatgcattaaaatgatgtatgaaaatattttcttctamctaaaagtgagtttttttaggtctgaagattgtaaaagacgtaaaaatattttcatgggcccctaaaaagtgttgtgagccctaggcactgtccctgcggtacccaatggaaaagtcagccttatctactattgtgctttttgaggctgggaaaacttaagagttttttgacttataatgggaaagacagcattagtcatgcaaggcctattacaggaaatataattcttaaagtccatcttgtaatttagtgagaaattaggaagctgttttagattttttttcccagaaatattaatttagtcactgagctagatagcctatttaagaaaaagtggaattaaaataaattataatgtgctttctagatgaaataagaattttgctcacttgcttttctctctccacattaaacaccaaacaggtatcctgatgtgcagactygagtgcaggcagaattggatcaggtcrtgkggagggaccrtctgccttgtrtgggtraccagcccaacctgcyctatgtcctggccttcctttatraagccatgmrcttctccagctttgtgcctgtcactattcctcatgccaccactgccaacacctctgtcttgggctaccacattcccaaggacactgtggtttttgtcaaccagtggtctgtgaatcatgacccastgaagtggcctaaccyggagaactttgatcsagstcrattcttggacaaggahggcctcatcarcaaggacctgaccagcagagtgatgattttttcwgtgggcaaaaggyggtgcattggcgaagaactttctaagatgcagctttttctcttcatctccatcctggctcaccagtgcgatttcagggccaacccaaatgrgcctgcgaaaatgaatttcagttatggtctaaccattaaacccaagtcatttaaagtcaatgtcactctcagagagtccatggagctccttgatagtgctgtccaaaatttacaagccaaggaaacttgccaataagaagcaagaggcaagctgaaattttagaaatattcacatcttcggagatgaggagtaaaattcagtttttttccagttcctcttttgtgctgcttctcaattagcgtttaaggtgagsataaatcaactgtccatcaggtgaggtgtgctccatacccagcggttcttcatgagtagtgggctatgcaggagcttctgggagatttttttgagtcaaagacttaaagggcccaatgaattattatatacatactgcatcttggttatttctgaaggtagcattctttggagttaaaatgcacatatagacacatacacccaaacacttacaccaaacwactgaatgaagmagtattttggtaaccaggccatttttggtgggaatccaagattggtctcccatatgcagaaatagacaaaaagtatattaaacaaagtttcagagtatattgttgaagagacagagacaagtaatttcagtgtaaagtgtgtgattgaaggtgataagggaaaagataaagaccagaaattcccttttcaccttttcaggaaaataacttagactctagtatttatgggtggatttatccttttgccttctggtatacttccttacttttaaggataaatcataaagtcagttgctcaaaaagaaatcaatagttgaattagtgagtatagtggggttccatgakttatcatgaattttaaagtatgcattattaaattgtaaaactccaaggtgatgttgtacctcttttgcttgccaaagtacagaatttgaattatcagcaaaraaaaaaaaaaaagccagccaagctttaaattatgtgaccataatgtactgatttcagtaagtctcataggttaaaaaaaaaagtcaccaaatagtgtgaaatatattacttaactgtccgtaagcagtatattagtattatcttgttcaggaaaaggttgaataatatatgccttgtntaatattgaaaattgaaaagtacaactaacgcaaccaagtgtgctaaaaatgagcttgattaaatcaaccacctatttttgacatggaaatgaagcagggtttcttttcttcactcaaattttggcgaatctcaaaattagatcctaagatgtgttcttatttttataacatctttattgaaattctatttataatacagaatcttgttttgaaaataacctaattaatatattaaaattccaaattcatggcatgcttaaattttaactaaattttaaagccattctgattattgagttccagttgaagttagtggaaatctgaacattctcctgtggaaggcagagaaatctaagctgtgtctgcccaatgaataatggaaaatgccatgaattacctggatgttctttttacgaggtgacaagagttggggacagaactcccattacaactgaccaagtttctcttctagatgattttttgaaagttaacattaatgcctgctttttggaaagtcagaatcagaagatagtcttggaagctgtttggaaaagacagtggagatgaggtcagttgtgttttttaagatggcaattactttggtagctgggaaagcataaagctcaaatgaaatgtatgcattcacatttagaaaagtgaattgaagtttcaagttttaaagttcattgcaattaaacttccaaagaaagttctacagtgtcctaagtgctaagtgcttattacattttattaagctttttggaatctttgtaccaaaattttaaaaaagggagtttttgatagttgtgtgtatgtgtgtgtggggtggggggatggtaagagaaaagagagaaacactgaaaagaaggaaagatggttaaacattttcccactcattctgaattaattaatttggagcacaaaattcaaagcatggacatttagaagaaagatgtttggcgtagcagagttaaatctcaaataggctattaaaaaagtctacaacatagcagatctgttttgtggtttggaatattaaaaaacttcatgtaattttattttaaaatttcatagctgtacttcttgaatataaaaaatcatgccagtatttttaaaggcattagagtcaactacacaaagcaggcttgcccagtacatttaaattttttggcacttgccattccaaaatattatgccccaccaaggctgagacagtgaatttgggctgctgtagcctatttttttagattgagaaatgtgtagctgcaaaaataatcatgaaccaatctggatgcctcattatgtcaaccaggtccagatgtgctataatctgtttttacgtatgtaggcccagtcgtcatcagatgcttgcggcaaaaggaaagctgtgtttatatggaagaaagtaaggtgcttggagtttacctggcttwtttaatatgcttataacctagttaaagaaaggaaaagaaaacaaaaaacgaatgaaaataactgaatttggaggctggagtaatcagattactgctttaatcagaaaccctcattgtgtttctaccggagagagaatgtatttgctgacaaccattaaagtcagaagttttactccaggttattgcaataaagtataatgtttattaaatgcttcatttgtatgtcaaagctttgactctataagcaaattgcttttttccaaaacaaaaagatgtctcaggtttgttttgtgaattttctaaaagctttcatgtcccagaacttagcctttacctgtgaagtgttactacagccttaatattttcctagtagatctatattagatcaaatagttgcatagcagtatatgttaatttgtgtgtttttagctgtgacacaactgtgtgattaaaaggtatactttagtagacatttataactcaaggataccttcttatttaatcttttcttatttttgtactttatcatgaatgcttttagtgtgtgcataatagctacagtgcatagttgtagacaaagtacattctggggaaacaacatttatatgtagcctttactgtttgatataccaaattaaaaaaaaattgtatctcattacttatactgggacmccattaccaaaataataaaaatcactttcataatcttgttatgaagttttatgttgtagcaaatatagtctaatgtatcactttatttcaactattactatggattattcaattaaaatattgcactgtaaacattttatttgtccattctacatttcaggccgaggccacatgcttttttttcccgtaggttttcatcaaccaaatttctaatctctatatttttgaatttctaagaaccaacacggaggttacatttcaatcaaacaatcaagccaaatgagaattaatttgcaatgttgaaagattgaatagattgcgactttaagttgctgatcgatttctgcttcatctaaagaatgcagtacacatttttcttcctcagcctcataccagtcctttctctgagtattttcttctttcatttttttaaaggtacatgtgcctcaattagtgcaattaatgtccaataaaataagatgggtacaagtattctgtcatgtactatgtggaaatgttttattgccaatctttttacttggtaaaaatacttgacttcacagggcctaggtcatgactctccaggccttcactgtgccacactcacagatgacagggcttgcggtaccaaaggctctttatcttccagactacagctcctattaatgtgaaaacaggaaaagaagtaaaaattgcacaaaatggcattgaaactttggcgtgggaacctcactttagcagccagaaggtatggctatggagtggtttaagagaatactcactagttttccagatgtatgacagtaggatcttggaaatgtcaggacagttaagaataagtgaaggaaatattttcatgggaaaaatattcctttaaataattataattggggccagtttttgcacaactgtctagcagagttggattctacccaatcaatccaacagagtataagaccggagtacagggtgggaaatgaatgcagctttggacataagtaagacaggcgtggttgttagaaactcacagaggttgtttcttcaacctcaacgccagtctgtttttctgcaccagtgcaacagaagttcactggctgttaactctccgttttttggctcagtgactctcacatgctctctgctctccagtttcagtctattagttataaatctcagaaagtgaaaaggaaagaagaaaaaaattaaatatattcaaatacatttaaaagcaatttttttaacttggaattatggaggaaaataatctagtttacataggtatggacacgctatgggtaacagctcatgcttgtagcacctctgctaagcgacatacaggctttgaggacaaatgctgtgctcttcatgcacacttttcaacatgtgtcagatatggagggaagaaatggaactaaaatatgttgagcacttacaatttttgcatcactatgctaaactctaatgcattattgcctaacagtcttcagagggatgcgataaagtaatgggccaaaattatatatttagaagtattctcatccagattttccctggagatgaactaattcaaagcccattatctttgtaccctagtttgtcccttcccagtgtgcctgtgtttggatttatagggtagtccgtctatttttttaggccataagatcctgggagtttcgcaagcaatttacttcctttgtctaaggcacattccacactacagacaggcagtaactgacattgtgcgggaatcctcaccacactgctctcttctgagaaaagcccctttaaactgttctttaggcaaaaccaaaagccaaacaaacaagcagtcatgctttgtcttataatcctaaaacttctgtcctagaacctgtctggaccaaggttccttgttggagccagggccatccttaggctggtccagtttcctgggacatggcctgtccatctgatagccatgcatcacctaagtgttggtgtatgtggctcatcagaacccttccgtctctcagagcccgtgaacactggccagagggagagagaagaaccaaggcacgaaacaagctttttgatgggaagcttgcctttgcaaacagaatgactggacctaccagaactagttttgaatcatttgaggcccctttaggtgagacaatgttatacagtagaagcctaacagcactgagatccctttgggtcagagctaagagtcattgagcaagcccgaaaaatcagccagcctctttctttttcttttttttttttaaatttattcctatttccttacatttgtttctctctctctcaatggataagtattacaatatgcttaatatgcactttttgtttgcgtgttccagcaaaatttgtattattgttttgaatatatatgttttactttatgtaagtgctgtacatatctcatcctgttgcttaatcttttctcagctccatccctgtgtaattccatagcttatagctgctgcctagtattccatggtacttatccaccacattttttctatccactctcttgggaatagatacctggataacttccaactttgtgagcccctaaatgatgcagcgaggaacagcttggtatgtgtttacttgccctcctatgtaaactttgtaatgcatgccatacgcatgattagaagtgttgggtcagcaagtgagtgcgttatgtaatttaaatattgcatgttctccagaatgccaaatctgtccacactcccatcagctgtgcatgaggggaagctgtacccacttccccaccaacacatggcatgacctctttatttttaaatgaaatatatcctcttgggagagagatgcattacatagatttttttttttttaacgaggaaaaagacatctaccctcatttttcaatacttcccatagtcatatttgtgtttacatcatatctccactattcgatggtatattcattgaaaagcagggactaagtcccaacaattttgttatggaatcatattgtatatacagaagcaagggtgaaaaaaggggagtgagttttgtcgcacctgcttctcagcactgatgatctcttcgccttctccatgactcagttttcaattggtactcttgaagtctaacctgtttctttctttctttttttttttgagatggagtctcgctctgtcacccaggctggagtgccatggtatgatctcactgcaacctccgcctcccaggttcaagtgattctcctgtctcagccccccgagtagctgggactacaggcatacaccaccatgtctggctaatttttgtatttttagtagacacgaggtttcaccatgttggttaggctagtctcaaactcctgatctacccgcctcggactcccaaagtactgggattacaggtgtgaaccaatgcacccggcccctaatctcagtttcttctctttgcttacaaattgagcttattcaaggtttttaggtttctgcttagtcactatgaagaaagcagaaatgccaactcaatggcttccaattttttaaaccatagcctcacagtatgcaatatattttacatgatttagtacatatctctacatgtgattgtgtgtacttcatagatatatatttatgtatgtatatatacacacacacacatacacacacacaaacaggattcactattttctgtgatggaatatatttttaaatttttttcataagaaatgcagcacagtgaaatactactacaaacctatcatagtggctaaatttttaaaaaaatgacaaaactgataacatataccaagtattggggaggatgtgaaactactggaactttcatacattgcttgggaaagtgcaaaatgctacagtatgagaagtgtctgttcatatccttcgcccactttttgatggggttgtttgtttttttcttgtaaatttgtttgagttcattgtagattctggatattagccctttgtcagatgagtaggttgcaaaaattttctcccattctgtaggttgcctgttcactctgatggtagtttcttttgctgtgcagaagctctttagtttaattagatcccatttgtcaattttggcttttgttgccattacttttggtgttttagacatgaagtccttgcccatgcctatgtcctgaatggtattgcctaggttttcttctagggtttttatggttttaggtctaacatttaagtcttcaatccatcttgaattaaaaacacatgaaaaaatgctcatcatcactggccatcagagaaatgcaaatcaaaaccacaatgagataccatctcacaccagttagaatggcgatcattaaaaagtcaggaaacaacaggtgctggagaggatgtggagaaataggaacacttttacactgttggtgggactgtaaactagttcaaccgttgtagaagtcagtgtggcgattcctgagggatctagaactagaaataccatttgacccagcaatcccattactgggtatatacccaaaggattataaatcatgctgctataaagacacatgcacatgtatgtttatagtggcactattcacaatagcaaagacttggaaccaacccaaatgtccaacaacgatagactggattaagaaaatgtggcacatatacaccatggaatactatgcaaccataaaaaatgatgagttcatgtcctttgtagggacatggatgaaactgtaaaccatcattctcagcaaactatggcagggacaaaaaaccaaacaccgcatgttctcactcataggtgggaattgaacaatgagaacacatgcacacaggaaggggaacatcacacactggggactgttgtggggggtgggaaggggggagggatagcatttggagatatacctaatgctaaatgacaagttaatgggtgcagcacaccaacatggtacatgtatacatatgtaacaaacctgcacattgtgcacatgtaccctaaaacttaaagtataataataataaaattwaaaaaaaatgctacagtatgaccccactcctgggtatttatcctagagaaatgaaaacacattcacacaaaagctatacatgaatgtttacagcagctgcattcatcatgacttcaaactgaaaacaacctaaatttccttcaaagggcaattagttatacaaaatctgttacatccacccaatggaatactactcggtaataaaaaagaatgaatcattgatacacacaacaacttgaatgaatctcaagggaattatgttgagtaaaataagtcagcttcaaaaggttacacactgcacaattccattgctacgacagcctctgagagacaaaagtgtcatgatgaagagtagatcattggttgtcgagggttaaaggggagggagagtactacaaaaggatagcctggtggagttttggaaggttttctgattgtgacagtggttacatggatgtatacatgtgttaaaattcacacaactacaccaaaaagtgatgaaaagtgattggaaaaaatgttaaaggggaattggtgcaaatgaacttaagtgaagctgaactgacattggcaggtagcatggcagctgctggcagacaaggaaacgagatggcaacactgaacaaagaaggtcaggcctagagatgtgaacaaggatcatggcctgtgctgaagtccttgcaggagaggtaaagtggtgccagattctcagagcagaacaggaggcagaataccagcctttgggatgagcaacagctggaacctcccagccgaggcaattttaattcaatgtcataagtgttaattgagcacctattagtaggcagacactgtttggggcactgatgatataataatgaacaaggcacccaggccctgacctcatggagctgatattctagtgggatgggtggcaggagagaaaataagatttcagttaattataagtggtatatgtgtgtatgtgtgtatgtgtgtgtgtgtgtgtgtgtactgtgtgtgagggggcactgtttagaatgagtagtcagggaagccttcctgaaggaggcaacaccaaggggtgggcattaaggacaagcttcctcttacatcctctccatgtgaagaaaatacaggcactgagttaccagatagtataattaccttaaaaaaaaaagagggttgcaattcattaaattgatttttatggtcacaaaatcagggcagtctgaagtaaaataatctcagcgcactccacagcagatgacattggcccataatcagcactggcttctggcttggccgatggcactggtgggtccagaccgttccctgccattgactcttgagctcattccaatcatcttccccttggagcactgaagcaaatctgataactcagtgcctgcatttccttcacatggggaggatgtaagaggacacttgtccttaatgcccactccttggtgttgcctccttcaggaaggcttccctgactactcacttgttcctaaagaataaccagagaacaaacaggctcttggaactaacatacttttcaacaatgcctttaaatataatttaaaatggcctgatgattctttaattttatgtgcaccaaaggactccacactgattcttttaagcacttaatggaacttctcctggaa

SEQ ID NO: 93205 - DNA, 76745 bp, Homo sapiens
  misc_feature (1)...(76745): n = A,T,C or G
tttattttctttatttcatataaatataaagttgaattcatatcttcaatgtgataataaaagactcaaattaaaatttttagatagacttggtgatattgtttacctaacattttattgattctgctatttgtgacattaaaatttaccctttgctttagttataaaatttggattgaaatatgtgtggtttctcaagaatatcacctatccagttttccttcaatcatacatctagtgatcttaacaccaattgttaattcttaactgaatgagtatattcatcaaggtatgaaaatttttttctgctgtgttattccttctacatatattagttgtctttcttctttaaattagagttgttccataataacagggcttttcctcacaaatagtcttgtattctattaccagattgttgattgaattcacttattatatttacagccagagaaaagggaatgttcgtagatcttaccagagtgttaagggataaaggacattggtactacaaataactgaaataattcagaaaaaataatttgtaaatgcacatattttatctcatgtataaaggaagacataactgaaaatggcttaaaatattaacacatggtgaatctgagtaaatattatatagaagttgtctgcactaatttgaaaatttccataaatttaaaattgtacagaaataaaaagttacttttaaacacctgaaatatgggtggtaacagttataagcaaataaactaaaaatagtacatttttatcaaatgaaatgacaaaagatatgtaataataaattgcgtttttgagcatgagaacaacatacactttcctagacagctggtgagagtataaattgctgatgttttgtgaaggtagttggttgatatgtcttagccataaaagcatagataaccttttgaagaattctgatttaagcaattattccatagaaaataagaaatatttaaaaatatttataattactaagtccatttttatgttactatttccaggaaaaatttaaaatagccttcatatacaataaaagcaagttagataaattatattgtacttatacaaataattaatacataggcatataaatgaagttaaaaaaatattcgatagcattattttggaaaaacttaagataggttatatgaaagtaggctaccaaagactatgtatgatgtatttccaaattagcttgaagcaaaaggtacagttgtgcatgagaataagcaattaaaaaaaagaaaaagcatatatatatatatggtagcacaaaaatgtccttagtatccaagctccaggactttgcctcttagtgtgtagtttgtgaactccctctatcagcttcacagaggacagtagtataacgctgtcctcaagtctactgaaaccaaagcccagggatgtggcctagaaatctggatgtttaaatagcactttgatgaatttgataatgtgttactttgcaatttttctgagagtgagactccaaagatagtcaagggtttgggaagagtaaatttaagccaattcagtaaattaggtgataaacaaagaagcttgctgtttttctctctttttttatgttttaaaacaatgagtttctccttttttgctcaagccctgaacaatttagttcagaatttgttttcttactttgattctgctggctttgccaattccatgaaaatccacttggcaccacatttccttagaagctcttgctttttcttgattttctttctgttcttagagtctaatattctagtgtctcaccaaattgttgttgtctctttccaaaactcctttaaccaaactatctgtatcttcatgtaaaaggcaccacagacctcccatcactcactctcccttaaccccaaaatatctatgtgttatcccttacagatgtcacttcctgcaaggccttccatattagttgctacaacatcactaaagaattttattacctgtggctctggacctacttctaatatctctggagatatccaccttcaaacacctgccacatccagctatgagggtctagtacctgggctccagagacatgttcaggttagttctgattataagaacatttctcttttttgccagaattgttggaaagttatctctattcaacagtctgtgtaggatttcagaagattgaatatacatataaatatatatacatacacacatgtatatatacacacacacatatatgtatatgtactttgtccatgtcgtatttggttattccaattctgggaaaataaattaagaaaataattaaaagatgcactcaaatatcgatatacaaaatgcctattgtaataatacataaaaaaagtcagaagctaacctcggtatctgtatgatttggagcaagttacttaaactctttgtggctatattttctcaaatgtaaaataaggttaataatagtgcttattttaaaggtagtcatgagttttaaatgaattcatgtattcaaagtggatagaatagtgctttcaaataatatttattacctaaaattattattatcatcatataagtaacaagagatacaatgaaccataatatgcccatatgataatatatcacacagtaatcaaaatattttaataggaaattaatatcataagataaaaagcaagaagaatgatgataagccatttgactaccactatatttatctatgtaactataaccacatacacatattttaaaaaattgattggaatatacaaaatggtcttttcattctctgtgatatgtaaaatgtagaaatatacttttctgggctggatgcagtagctcacacctataatcccagcactttgggaggccgaggttggtggagcacctgaggtcaggaattcgagaccagcctggccaacatagtgaaatcctgtgtctactaaaaatacaaaaattagccagatttggtggtgggtgcctgtaatcccagctactcaggaggctgaggcaggaaaattgcttgaacccaggaggcagaggttgcagtgagccgagatcctgccactgcactccagcctgggcgacagagtgagactccatctcaggaaaaaaaaaaaaaaatcatctatctatctatctatctatctatctatctatctatctatctatctatacttatatatacttttctttgttatccatattcatttcagagaatgcagtgctattgtaaaaaaaatgaataaaattaatataagtttagagcacttttttggcatcagtatgcctaaggaaaactaatgtataatacaggattaatgtttttcacaccatctcaaatcttactgaatgctgctatctagaaaacagtggtaactgagttacaatgggaccttaaaagcaaaaaaccactgtgactggctaactgaaagtgatcatagagccaaaaccataatgattgtcctgcccaagcttcagcatatatggttgcaaaatgtgcgcagtgttaatgccgtgtcaagtgtcttgtggtatttcatcagtgtcgcttacaaggcatactcaacatttaacagcaggatcattaaccatccatgctgtgatgtaatggaatagtgcttccctactaaccctgaaacaagctcactgtgtgtgacctacatccttccgctggatgagtgtgagaaaatgatgacaccacagaagcaaagcagctgctgtaagttgagccacaaggaagaaactctcaagacaggaagaataaatgctttagaggtgcactaaaataatgaatgaactaatgtggcatagctgtgaaatcatgcgaggaaaagaactacagggacagtaacagaaggtggttctttgaagtaaagacattgagaagaagaaaaattgccaacttgtgtaatcagttgatgttgctagttagccagtttaaacatgcgttaaagataaagatctgcttgaaaccaattattttattgtttggcttcctgtttaaagatgaaaatgaaatatgtgtatatatgtgacatattttacctagcagtgagtagatgcaggaagcatgtaaaatgctttgctgaattcactaacgtcacaaaatattccttaataattgccgcgtttgataggctgaccgtatgctagcacaggaaacaatgcagtggacttgggttggagagaagaattttgacatttggatttttaaaaatcatgtatattgaacccatgaactctcatgtggaacatcagatttactatattttaaacagaaatgccatcactataaaaaccattgcaaatttgtcaatatacttccatttaaaaagccttttcctgcttttattgatttattgattaatttttttttgagacaggatctcactctgtcacccacgatgaagtgcagtggcacaatcgtggcttgcagcctcgacctcctaggctcaggtgatactcttacctcagctacctcccaagtaactgggaatgtaggcttgcaccaccatgtctgacccattttcttgcagaaattgagttttgctatgttgtccagacttgtcttgaactcccagactgaagcaatccgcccacttaggcctcctaaaatgttgggattacagtcatgaaccactgtgctccacctcctttttctccttttcagatagattatgtattctgtaccttttgtgtaactaacttgttattacataaactatattctaaatacattataaattattgtgatcatgatatttatcattgaattaacactgcctaagtagcaattttcacagaaaagataattttaaaagaccaaaatggttattctcttggaagcagttgacataaaataacagaataatacagattaaaattctgttttccaacagctactagtggtaagaaatatagtaagcttctgatttgtagaaaccttagctttctcatctgatgaggtggttaataatattaactctcatatttgctgaaataatataaaatatttaatataaattgtcaattataatgactggcataaggtagaattacaacaaatgctaattatatttgcttgtttgaaaatttaacactctattaaaaggcaaaaaagtgctcacctgcaaatattaatacatgccttctgtttagtccatagaaagcccacaagtaagagattcaaaagtgaaagctatcacttacagaagattaagaatatattgcattgagaagatagggattaaggagttcatcaaaggttttttaaaaaattattttcctgaacatcatttcaagaaagataagcgccaaagacataaatatattctccagagcatgtgcactgcaagttgacaaatgtgtctcttttatagagtttggtgaaggttattcattttatttttcctgtcttgaccagaaaattgtggtttctcatcatgtatgactgcctgcagggtcttctgaataggaaattaccaatgctgaaatttgtatgacttaaataagtgttgaagtgtgggggttgaaaggagatacatatcagagacatccattcagttaatagaactaagtttttgatttgcrtagcttatatctagagcattgtgtttcttattttctatattactatcttctctaactatataattagcacagattgaagctataatggatttcaataatagcactactttagaatgatgtatacgtctttaaatcttaagacaagcataggaaatatgtatattcttaaaaaaaggaaaatttttttaaagtttagagttaaaagaaacatgcattttctgttacatttcagattattttagttaaagaatcttctatgctttttttcttcattcttagaagactacctgcaattgtaaagcatgaatcctgtaatacttctgtaaatgaatcactattgcatttataccattagcctctgaacagatttcaagttgctgctgccaactctcgcgagctttgtcagtaacagttgattgttacattcagtaacactgaatgtcagtgcagtccaatttacaggctggagcagcagctgcatcctgcatttccccgaagtattacatgattttcactccttgcaaactttrccatctttgttgcagagaatcgggtaagttgctctgaatttacaccttcgtgtagagatccaagttactgtaaagctcattctgtgggatgagagtgatctcttcatgtgtttgttgtgtccctttggtgctctgtggggaacagttactgaagcttgcaaatgggacagaggaagtgagccagcaggcacatgcatcaaatcttcctattattcagggaacgcagactttgtttatttaactgctgagaaaataatgaatttattcaactctgtataaaggaccatagcacgtgtggaatcactgtgatatatattcttagtgagtttcctaagaaaaaacatttcatactggcttacccttaaatgcattgtttattgaatctctctgtaaaagtaatctttgattagtcttcctttttttttctttttaaatgggataaagttagtagttaacttactttttcctgaacaaaatacttttctcaatcaacattttgtcacctaaaactttaacagtaacaactggcaaatgagaggtctgtttattttatgtaaataaaaacaaaacctgttttctaatttgatttacagtgatttatgagcgtgtcccctttgccctttgtgttcactttttatatgtttgtttaaattgtagcaaaatattttacatttgctattattttactattatagaaatagtaagcaaatgtactttctgctcatcctataatcttgtaaaactattattttgataacatcagttccactttaaccagggaattaaatattaaggattataaaatctatgaatgactaaaagtaaactgaaatgtgatttcattgtttatgatttctatttattatatatttttattttatgagtatgtcttctacatttttatgaatatatttcatgataataaactcaattaggagctcctgtcactagtctgtgtaatgccttccttaatataaactatctcatagttacaataaatacaatgacagtttacttatataagtagttactttgtttaaggataagcgtgagcttttaaagtgtgactttaacatttgaataaaaatcttcagaattttctctggatataaaataaagtagtcttttggatgccaaataaatttctaattgggttatcaaagttctgttttgttctcctaattttttgttgttgttgtttgtttgtattgtcctagttttttaattgtataaatatgtttgggatgtattccatatttcatttytataaaacataagctactaatagctaaacaagtcacatcttatctataaatttggttccttcttcgagtcatttcttgataagtataatatatatttacattgaatattatcttcatttcgatggtttcttgccagcatctgctcattcttaccaaaattagacggtcccagatgttaagagaattgtaattraawagatagcaacctaagagragatttaattttcagagaagactcaagaaatctctctaataaatgttcaaattattcamacaatgaagtttgcaaatgttcttcctaattgaggacagataaaacatcttaagtttcttatatctaatgtagtgtcttctatatgtatacatgcctaaagcatagctgaagaatccctgaaagacagtgatgtagtctatttataatcagacttcctcaattccccacttcacttagtctgcaacaaaacaagctttttaagtttgatataaagacgtcgttgttccaatttcttcaaatacatttaagagmgcttgttctagatcayattaatattatctagatggctctttctctaccattttaagaggrtttatttccaagtagaaataaatatttatttaattgtaactttttaaaagatagggaaattatacacagggaaaatattttgaatatttgcttgaacatcttttaaaaattcttggcttgtcccttattttgaaaatctggttgatattcaagtatcccaaaaaatagctctttatacaaattattttatcacactcacatcttatagtataacatttagtattttttgttaaaatcagctagggaatattaatagtactttcaaaattgaattaaaaatacaaaaaaaaagatttgtcaccttttttatwtgaaagttattgttataacagtttagcattttcaaaaattgccagtaaattttcttaattccaaacaaaaactcagttcctcaaaaactcaaattcctcaaaaactcaattcctcaaaaactagaatkgtctgaattccaaacaaaaactcctgtctttatttccaatattaaatactattttgataagcaaattgatctaaattcagatacacagctgtatttgtgaaaatgtgccccatttttatgataatgtttatgctactatgttctctcagaatcatgtgagacagtatccaattgcaccagaatttattaaaagaaaaacgatcaaacctgcacgttgtgcacatgtaccctaaaacttaaagtataataataataaaattaaaaaaaagaaaaacgataatgttttgttgaatatcctaatcattaataaaaattttgagatatcgactcaatatttttattctattttcatttatttctctttcgattgctcaattacatgataaacatatcaaaatttttaaagtcttttaatggcaaaactacagagtagcatgttagaatagataataccagattataaaaagggcaaagtgatgcttatttaaaaaataaagtactgcaattaaatataaaaacattagcctacaatacactaacagtatatgaacatctgcatatttttatattaaagtacacattaaataatatgtcatatgacactctgcaacaatacatatgagttagcattatattgtcatttttgcaatgaatgcatgcttacaagaattgctttgattgttaccaattacattatttgcaagttgataactcagatatcattatcgaaaaattaaagattttaattcataccatattattatataacaagacctactcagcataaaatataaatatcaacatataataaattttgtattaaatcaagtgacatgggaagatattacaaccatttagatgttatagcaactgtttaacataaacaatgaaacatcacatttcataattacacaaaacacaaatacagttttgtagcaactatagtacttgctttgcaataatataaactgtttgtagaacaagtttgaaaactatcagagaccaaaatttatttcaatttggtgtttggtttctaaagacaaactaatattcaaataaaatcaaggaaaaaatagatggcttttgcattagacttagaagaacattgactgagctaggcaagagggagaatgggtacaaccagggatgatgcaattaatttattaaattgcagcttagaacgaaccgcccaatcagctttgcaccttattcactttttcttcccagaggatgttttcaaaacagaaaataaaaaaatcatactagcactttgtttttctccagatgctctcctgcatttattaaagagaaaaggattagcggttatcagaaagaaaaaagaactgaagcagtagagtgcctctaaaactttgattatgtctgaaatgttattagtgtcaggtaacaggaaactttaagtcattgttatattttacttatttatttactgtgatttatgatacagtcatacaatacataatgatgcttcaatcaataatggtggtcttatacaattataatatagtattttcactgtaccttttctctgtttacatacacatacagttaccattttctaacaattgcctacagtattcaggaacatgttatacagatttgtagcctagatgcaacagcctataccatatagcctaaaggtgtggtaggctatggcatctaagtttgcgtgagtacacttataatgtgtgcacaatgattagatcgcctaacaatgcatttcttagartgtatccctgtcaataaatggcatatgacaaggatacattatataatagtacctaaattatatataatagtacctaaatatcatgaatgtagaaatgctgctaaaaatatattttaattatgttttattgatcttagcacacatctaattgtaccaaacagaactgaaaaaataataatcttgtggcttgatttttttaaaaccttattattatagcagtcattttatatgtaaatatatatgcatatacatatgaatattgttagaattagatatagaaatagatatatccattaagtatcaagccctgaaccaaatgctccagaccatggattaataaattgagatatttattgggataaaaaatacttgtaggtcactagatatcctatgaccattggtgaattaggctgatttgaaatatgataccctacgtctgggacataggcattagaatagttatttattctctttctttgagaaaatctaaattaaataaacaaagacaaaactaatacaaatgcttagtatttgtaggattcgtttattggttgtgtaggttggatttcagcaacctaattacagcatgagaaaaaataaagggaaggctttgtacattaatggatctttgttattattatgtgaatgagaatcagtatttgtaattgactattttagttatataaacacattagttcttctatggccgggcgcggtggctcatgcctgtaatcccagctctttgggaggccgaggtaagtggatcacttgaggtcaggagttcgagaccagcctggccaacatggtaaaaccccatctctactaaaatacaaaaattacctgggtgtggtgccatacacctgtaatcccagctacttgggaggctgaggcagaagaatcacttgagcccaggaggcagaggttgcagtgagccgagatcacaccactgcactctagcttggcgacagagtgagactccatctcaaaagagacattagttcatttaaatgatatttgcatcacattttgctgtccctctttgtcacasagtttccaaatctgatttttaatttcttttttattgaaaagaaactcacatctgcattatgaatttctgataaaacttagatctcttctaatagtctatgtcatccattaaatattatttcataaatgtcaaatacttatgattttgtaggtcacaaagattatttttgcttctgccatgtggcccaatagtttctaagctttgatcctctaatttcagtcatttttttcattataaaaaatgcaaataattctgactgtgctaacacatttagcttcactagttgcatatactttaatctgttaacaaattgctataacaaatatgaatacatattgagtaatactgagtataaaattcctcttaagccacaatcttctcccagacattataatgctagcccctggttctctctattgacattataaatctggtaaagagtccctcatgtttattaaattttggagaaattacctggaatatatcctcagccttcgctctttattttttccatagcccttactagtggtagcatgtttgttagtttttacaatttgtagaataaatggtgactaccatatatttgttacttaatattctgtgaataaattgtctaaattctcttcagtttgtataataggattgtatagaggaagatgtcacttggcaaaagggaccacagaaaagacaaggaaaacagaaaaggacaataatgacaatctattgatccttaaaagttcttaacctacttaacaattctgccaagaaccagccagtcatgatatttcagagaatatatgaacttgtattttctcctcttaccaaggcagaaattatatctgatgtaggtagactactgtttactgcttttttggtggagctgtacatatagtcagaagtaacattaaatttggctaggacaaacattctatttaaaatactagctcttccttacaaagatttgacaataaatatccctaaaatgaatattttttattttccattccactatttttttttctaaattgaaaactaaaatatctctgttttctattttttcctatgtaggcctttacagaagcaggtttatttgttttcataatttgtagaattactaacgactatattttaggtaattatcatcaataaagtataatatgctatatgcagaaggcttataaaacattatacttacctckctttcagaaatcaatatgcatagcaaagtcacaatcatatgcatcagatttctcttttggtttcttttgctctgcatgcttattgggaagtcacatactgaagatgacatcataattgcaacaaagaatggaaaagtcagagggatgaacttgacagtttttggtggcacggtaacagcctttcttggaattccctrtgcacagccayctcttggtagacttcgattcaaaaagccacagtctctgaccaagtggtctgatatttggaatgccacaaaatatgcaaattcttgctgtcagaacatasrtcaaagttttccaggcttccatggatcagagatgtggaacccaaacactgacctcagtgaagactgtttatatctaaatgtatggattycagcacctaaaccaaaaaatgccactgtattgatatggatttatggtggtggttttyaaactggaacatcatctttwcatgtttrtgatggcaagtttctggctcgggttgaaagagttattgtartgtcaatgaactatagggtgggtgccctaggattcttagctttgccaggaaatcctgaggctccagggaacatgggtttatttgakcaacagttggctcttcagtgggttcaaaaaaatatagcagcctttggtggaaatcctaaaagtgtaactctctttggagaargtgyaggarcagctycagttagcctgcatttgctttctcctggaagccattcattgttcaccagagccattctgcaaagtggatcctttaatgctccttgggcggtaacatctctttatgaagctaggaacagaaygttgaacttagctaaattgactggttgctctagagasaatgagactgaaataatcaagtgtcttagaaataaagatccccaakaaattcttctgaatgaagcatttgttgtcccctatgggactcctttgtcagtaaactttggtccgaccgtggatggtgattttctcactgacatgccagacatattacttgaacttggacaatttaaaaaaacccagattttggtgggtgttaataaagatgaagggacagcttttwtagtctatggtgctcctggcttcagcaaagataacaatagtatcataactagaaaagaatttcaggaaggtttaaaaatattttttccaggagtgagtgagtttvgaaaggaatccatcctttttcattacacagactgggtagatgatcagagacctgaaaactaccgtgaggccttggktgatgttgttggggattataatttcatatgccctgccttggagttcaccaagaagttctcagaatggggaaataatgcctttttctactattttgaacaccgatcctccaaacttccgtggccagaatggatgggagtgatgcatggctatgaaattgaatttgtctttggtttacctctggaaagaagagataattacacaaaagccgaggaaattttgagtagatccatagtgaaacggtgggcaaattttgcaaaatatgggtaagtgctgatttttgtcattgttctctggcttggtttgatccgttttgcttagctttgcttggtctctggggtagactttagtataaagacacagaaatgttttaattatttgttctatttgtaccaaagctggttttattttttcttatgaactgcatttcaactccctgtgtcagagtgtttaaatcatcatcttagaaattttataaaaaatatcttctgatttcatctccaaaatatttcaaagtatttcaacaatgttagccaaagtttttatagaaaaagatgcttagttggagaactaaaattaatgtgagaatactttttaacctgcaagtttacaatgttcacagatttacgtcagagtaggactatttcttcccaagctcttcagcttggtaccatgatacctgatacatgaagtaatgtatctctgcttaggaaattgaagggacatgatggtgatgcagttggccctcagtttacccaaaatatacatttgccattgtattgtttggtttttctttttttcctaataggcctgatcagatttgaggcagcctgtgtttgactggggccatgagggtttagctaagccgttctccacctgagcagtcttatggctgacattagataatcagagacattacaaaaaacatatttcccccatatattataagtattgtgatagtatgtccaaaagagtcagaaaaaataaccatttagaatatattttctaaatatgtatgtgtatctatagaaaataaagtagtttttttttctcccactacatttgtaaaccaaaaccacattttatacatgggagtaaattgcaccaatgtgaataatttaaaaaaaatagaaatttagaaatttacttatacaagaaatgtttacataaatcataagttgattgattcagtaattcagtctatcacactatcttttataactaaacaaaatgccgatagttacattattgctttctggtgttcttttccaccctccatttggaattctttgtatttcatgttactgtatgtatgtttctacaatatcagttgtacaattcttttcaaaatggtttaatacttattcactgtggataaagttataattcttccacctagcattaaaaggcctctgtaatcttgctgcaactcacattactcagtaacaccaggttctgggtaagccagttatctcactaataccaaagattctgagtttaactgcaccttagaactttcttctctcaatgtgccctgtttagaacacctacctctttcctctttaatgacaaagtcctacttttttaaggtcttaatctactacacatctcatgcaacatttctttaattcctagagttgcaattgcttcagacttcttgttcactctcacagaagttgactgtaacttgtctatttcctctttcattgtaagctgttcttcctcaaccatactaaactacgttcttgaaacagaacctgtggttttgatttgatattcattgaagtactatgatgggtatgtatcatatttaacaaatatttggctaatgattgaatgagagctggtaaaagatagtatgagtaaaaaatattatattgccttttcaagatatgtgggttattatattacccgtagctgtaaaatattttattccttctcaacatcagcataaatttctgctcaaggaaagaacgatcagcttatttttagaggtgtattagaattacttatatctcattctgctctctccctcaagactttatccatattacatcatttatatatgtttttaattctttctttaaattctaggaactgtaaatcatttaaggatttaaggatgatttttgaaattattgaaacctaaacttttcaaaggacttcatttttttgcatgttgcaatcattgaggaatttatattttctcatttcacaatggagaacacaaagaatcagatgtgttaaatgccttgtttatggcacccatataacagaccaaagaagaaaatctttgacacttaataggattatttaatacttaattatttaattattaattaattaataaggttatttaatattaaccttataatgggaaataaataaaaattgacattttaataataataatacatatatgtcatggagatcataagctataaagagttaaactgtaaagtagtgtggcaataacaagatgttattttagtaattttatttgcagacgatatttgcacagttgaacagagataataacattatatatttgtgttaagggttgatttgatgtcaagcataatgttaatatcctgatgttcgttatctactttcaaagtatacatgcgaattaatatagaagctttgaataattaagtgaacggcagtggaaacaaagttgataactgttaggtctggaaatctatccacatctttctgaccacagacttgatgtcccaaatctgtaatttccaagggcaaagactttcctcctaggcccctttctttctacccaccaatgacatttaacaatgtctggagccctttttgagtgtcagtactagggaaacagatgataccagcaaggtaaaggcccagcatgctgctaaacaccctgtaatgcacacggcggcattccacaatgatataattattcattccaaaatgtaaataatgccaaggttgagaaactcttctagtctctacttcctcagaacttcaaaatgtcttattaaggaagtaaaagtagaattggagctgtaattatcatttaggaaaatgagttttcaagttcatgattcacgaaatgttttaataaattcttcttaattagtaaatctatgtctactatttataatcttcattgaaatataatgtacatactgtaaaaatatacacaataaacataaagatcagtaaatttttaccaatatgtacaactccataaagataaagcataattccattgcctcagaataaagtcccccccsacctctttgcaaacagccatcttactccccatgtccagtcaatcactgattctatttttattatagattagttttaccttttctagagctttatattcatggtatcatagcctatataatcttgtgtctcgcttcttttgctcagcataatagaattgcaattcatctgtgttgtatgtgtaaagtagtttatttgttattcactgctaagtgctatttcctatggatgattgtaccactacttgtttatccattcactcatacgttgtttccttttggggatattatgactagcattctacgaatatttttctggaagacttttgtcttgttgtagaagatgttttttttctcttattttgagtaaaaagtgagaggaattgcaggaacacatataagcacatgcttattttttttaaagaaactgttcaactattttccttagttgagaattttatactcccaaaagcagtgatgtaccagagccccacttgtttcacatcttcagcatcacttgcaactaatcaatcttcaattttagctgttcttctggctttgtaatgacatctcattgtgcttttgctttgtttctatctgatggatatagatgtgaaacatcttttcttatgcttactggtcattggtattttttctattttgaaatgtttaagtcttttgccaatttttattgggtttatctctcattgacttgtaagaattcttatattcataggtggaaattgaacaatgagaacacatggacacaggaaggggaacatcacacaccggggcctgttgtggggtggggtgagcggggagggatagcattaggagatatacctgatgttaaatgacgagttaatgggtgcagcacaccaacacggcacatgtatacatgtgtaactaagctgtacgttgtgcacatgtaccctaaaacttaaagtacaataaatataaaaagatacatatcctatgtattttcaatattttctcccagtttatatcttactttgatttttaaaatgttgaatttcaatgaatctcagcttattaatttatttccatcttatcaaataaatatttccctacaccaacatttgtgaagactggtttttttttctgttttcttcttgctttatggktttagctttttacttttgattcataatatatttacattcatatctgtgaacttttaatgtaggcattgaggttcattatttcccatataaatattcagatactacatcactattctttagaaaagacacttctttacttactaaattacttaggctactttcttgaaaatcaactgaccatatacgtgtggatatgaatgagtacattttattctgtcccactaaatggtctcatgtctattcttatgccagtactggagtgtcttatatagtatgtctacacagtatttttttaattggagagtttaaaggagtacactatgttttcacaaacaaaacttttgatttgaaaaaaaaacagttatgtctattttagttttgcatttccaaataaagattagaatcagcttctcagttttcacaaaagctgattaggtgttgaaatgattgattaatgtaaagagaatgttcatattaacattactgcttttaaatccatgaatatggtatacctttccttttattttgttattttttaatttatataaatatttaaaagttttacatgtacagtccttggatatatttaactaaatttatccctaacagttttatgtattttaaaatttagattttgctagtatctaaatatacacttgattttctacgtcatgcaagcttgctaatttcacttataaagtttggtagatttatcaattttttaatttgggggttaaataagctattttctgtgaatgatgggggacagttggcttcttccttttcaatatttatatctatcgttttcttgatgattttgttattgcattctctaggattgttagcacaatattaaataatagatgtggagcatatagtttcaaatcttagagggatgagttcacmattttggtattgtctatattaactatagttttgcccttcgtcaaatttaggaaattctcttctattcctatttcttgagagtctttattataaatagatattaaattgtgacaaatgctctttctgcttctattgaaaggaccatcatatttttgttgctttgtcttctcattaattttgttagtgtggtgaattatattaaaacaatcttgcattcctagaataaaaacaactttatcataatatagtgtcattttaatatatttttatattgttttctaataataatataatttattgatgttttcctcttattcatgaaaaatataagtatacaattttgtttattttaatttctttgtaaagctttcatgtaagaataatcttaggctgaacatggtggttcatgcctgtaatcccaccactttgggaagccaaggcaggaggactgcttgaagcccaaagttatagactagcctgagcaacaaagtgagagagtccatctctacattaaaaaaaaaaaaaaaaagttggttgggtatggtgggtatggtgccacacacctgtagcctcagctacatgggaggccgaggcaggaggatcacttgagcccaggaattcatggctgtagtggactatgatcatggcactgcactctagcctgggtgacagaacagatctcctctctgagaaaaaaaatatgtagtaatcttccttctgcttcaagattttttagtttgcaaaccattgggattatttaagtctttaaatatttaacatatttcgtcaatgaaaccacttagatctggagttttccttatgggaaaatatcttattataaatataatacttcataggacatagagctatctagacatctattccttcttgattcagtagtgataggttatagttttcaaggattatttttccagttattccattatcaattggcattccccttttcttaactgtcataggtttgcattgcccattatccagtttctgaaattcattgccttgtttgttctgtccagtattataattgtttatgatgagaaggctaatctcaccttatcatggatgaaggtgaaagtccaacactttcctctccgttggtattttaagggcatcttaacatttatagatctcattcagttatataaaactcatttttcagttactttataaattatcaaagagatacaagatttttaaatttgatttcttaataaaattaaaggttattttgagctagcactaaaggacatgcaaatttgatgtctttggtttcagtgttttaagatttcttacagaatagaagtcataatataatttaggcctttgctaactggaattgctacctatacatattttacttcgttttgttcttcctctaatgctacctgtagaaatgaacttaaaattttacctaaataacacacaggtctatatgtgcattatgtcttttatattataatatatgtgaaaatatcagtacaacataatacgtctaccaatcacccatccaagaaataacttgatagcgaaaaaaattaagtcaaccagaacttaatgaaatgttgtcaatactatcccagtggtacagaaaattggtgaaattaaacttgggttatgagaaagaccagagcactaaagaaggaaaatatgccaaatgtaattagtaagatagtataaaatggaagttatcattatttcaaaacccctccagcttctttctactcttgcagatgatcttttctttacaatatcctcccttggtgctgtattcattcagagcttcttcagtgtaaaatctcagagagaaccattcacagtgcagttacacagccttccagatcatgtgtgacagccaatgtaatgttcccagtgtcaatctttttacagatcctttgtatatgtaaacttaggtaagctacttaaaattccctgatatttttttcttatctgtaaaatgggaatataaatataactctctcattgccattaaaacttgtcattgacagaaaattgtattccacttctctatttaaaaaagtcagttcttcctcatgctctattctcatctaagattaaacttagcttccacaccaaaaaaagtacaattgtttaatttcctgactcaaaactacttaattaatcaactaagctttcaaataaaggtaaactttaatattgaggcaatttacttgcttctatactttttcattcattcattcattcatagcctcttatttatttatcatttatttattcagaacctctctgaaatggttaatattttctaawgcttttttgccaggaataaatgttctgacatgtcacttttattttgtcctgttttgatatcataaaatcacaagctacttaacaaagtaatttggaagtaacatcacagcacacatgctgctattctcatatcataatattttatttattatttattcccttacactttaaggaaatttatcacagaatgagcaatttattaaacttgaacaaaaatgtattaatacatttttcaccactgaagttaactgatctggaaaaaagtaaatgagaacagttcttgatttttgtaatggggagtgggtaagacaattacatgctaagccaaatgytgttaatacacaagrtattttaaaatgattgggacaatttgaaaatagatattcatctttttactaaattttaattgtaataatcagaaattgcagatttgacagattcctaaaggaatcaattttgtttctgatttgagatacacacacccacactgaaggaagggtggccatacagatggccataacgtcattaaagtacctgaaatacactcaataatttgttctctaatgtttttaatgtaattttaatttaatatttagcatttaatttgtatatttttatatgacacagtaaaaaatggattgaaataacagtattttaacatcacttatttcccaaatgggtatattttcttggtgcgctctctctctctttttttttaattggaatcattccatgtttttaaatgacaacagaaaaactggggaaaggtcaaagaaattatggatggagaaatcgtgctacttcattctaaatgtctgtgtaggaatttagcatatatttatacttattatatagtatttgtgcaaatcccttcaccaagaaattaatttccaaattataattgaatttactttttgttatatttttcaactaataaatattatagaactttaccacaatacaattcttagaggtctcttcaatatatcaaaataatatcagttaaagatactcttaacatgaacagtgtactatcacaatgacaaggtgtgaggtatatgcattctattattagaattttaaagtgctgaaatgatgagactatctaactttttttaagtgagaaaattgtgttccatagaagaaaagtgaattgcaactaacaggtgacagaacaatgattaactgtgactcaaggctattaactttcatttccttgtattatacattcgccaggctgccttcaccatgaattcttaaaagcagtcattaagtatgcttacaaaatgcatttggttgtaaacttgtaattttaaatgttagcatgcttatacctgcttggttaatgttatagaggtaagggcagagaacagactaaaattagacatcatgagacttagaggcaagtttaagtttgtgagactgtcatctggccatctagtccaattattatcagacttataattagattttcygacagataatagttcacgtggcttccagagtgaagagaaaaattcttaccctctgattctacaattatttgtggtatattatcataattaacccaatggaacattttcatgactttaaaaaagaatcagggcttaaatccccttggatttattttattgttatcataacagcatcaatgttctatcactttaaatctttttttctccttagaaattaatttaggagttactcagaaaagaataaggcaaaaatgccaactgtagtattcctgtaacttaccttaattttaacagatagaatataaatgtaggtttaaaaaaaatggatacccattagtgtaatgtatttgaaaagaaataattgtgttatgagacaatttaaagtgtatataagatcactttcagaaccatttcagagtgcagcaatatttttcaatgaatgacagtggaatgagatagagaaatccgatgtcccccaaaggggcaaatctacaaagagagctataaaactgagatatgtttgatcaagtatttcagaatactctctcgcagtgcagcagaaaaaaactaatgcactcagtataaaatggctcattaaaacatggaaaatctcatttataggatcgatttacttggaaataacctgatttgttttctatgtttctgcacatgttttttagttggaaaaagtataacattcagtccacttgtacatattaaattcagtctaatattaataaatcatttttttagaaatcaaagtaataatttcaggaatgtacacacagatgtaatgcttcaaaagacctgtcagaaataatagcttaaatattgcaaagtaacaaaacatagtaaataaaatgtgaatttatatatttttctgtatggagtttttctgttccacaatcagatatgactcaggctaatgattctctatttattgaatttagcaaaaacataagaacagaaacacacctaaaatatttttaaaactacaaacacagaagacaaggttaacagcataaaagaaaatagtggtagcagcaaaacagatagagccttaaaataaataagtatgttgattaaaaactattttgtggttaacactcttctcattgtataaaccatataaaaagtagtgtcacttactggtaaatgcatttatgaaggaatgtacttcctagaaaagaattggaatgataattttttaaattataaacacttttaagagatgtaatactatttattttaattacttttaattctaaaaatgttgaaataatcccagttagaagttaaaaacctaggccaggcatggtggctcatgcctgtaatcccagcactttgggaggccgaaacgggaggatcatccgaggtcaggagttcgagatctgcctggctaatatggtgaaaccccatctctactaagaatacaaaaattagctgggtgtggtggtgcacgcttttaatcccagcaactctggaagctaaggcaggagaatcgtttgaacmcaggaggcagagaatgcagtgagccaagattgtgccagtgcactccagcctgggcaacaagagcaaaactctgtctcaggagaaaaaaaaaaaaaaaaagaagttaaaaacctaaacacacagtacttaagaattaatttttttgtttattttttcacctccaaagaaaggccttgacttttaattgaatttccaacatagcatgatgcatcaaaagagcatggcattagaggaaaatagcttgattttgaagccatgtttgccacatagttgccaagttaattgttccctctatgtctctatttctcttataaaaccttcctcacatggttattgtgaaaacttgcccagtgaataatacgtatatatgtattttattgtagatgcaaatagatctgggtatacctatagataagtctgtaagcaacaactagattggtaataggatggtattgttgttcttttcactaacgtctcttcctctgcttcatgatcttcgtgttggtagtttccatttactagatgtttcagtaagatccaagcaagagtctaaatattccagatagactttgcatgtagtctttacaaccactctgtgtaaaatgcattaatatccctattttacaaagaaagctactgatgattggaaagtttaggtcacacaactaacatttgtctttaattttttaatttttaatttttgtgggttaatttttccacctgcatgtcttgatttaaaaatgatattttaaattatggtacctaaaataatgctttagtagtcctaaaatcagaaaaacagtagttaaatataagaatatattgttggcagaaatatgtctcatcctccttatgaagttaccattctcagtgtactaggtaaactttatccaaaatgacattttataatttctaatttcaaaatctatttatttattttatagtttatattatatgctttgtttcatattttgtaattatgtatttatataaaatgtgaaaaataaatttgatcataacaatttacctgtagctgtaattataaagcagtataaaatttaataaaacaagatgcttctgattcttcagcattccctcagatagacatttttgaatgaaagtcatgagattgtttccaaggtacactgcttttaaaatcacaagttattaaataatacttttcagtataaaataattatggtcagattgatgagttttaagaaattatacctgctgcaattttccttctttagattgtaaggcctttgagggtaaagattttctctctgttctccatgcctcactgttttttatttgctttgttatctttgcctatttatgttgtgtttactgctgcatccctattacctcaataatgcttgatgcatgtgagctttcaaatatatttgtgtgttatcatggtgagagttctggaaaaactataaaacacagaagcatagagcaagatgcagatagaatgtgttatcatttgtaaggcggtcacgtaaagcttctgacaaagttctattaaaatagagggacagagtaaatcatgtgaatatctggggaaaaattttcccagaagagagaacaacctctaagactaaagtatttgggatgttgcaggaacagcaagaaagatagtgcggctggaataggtatgtgaaggggaagtgataagaggtaaggtcagagaagtacaaagagccaagatatatgatttgaagcttggatgagtttctgaaatctttcctgagtgagacatttagttatgaaatattcaggaatttgagtagcatattttggctcaaacattataaagaaatctctgactggtaggtacacaagaatgaagtgtacagaagaactaggaggttattacagcaatccagttgagaaatgatcatagattaggtaaaagtgggaaaaaatgatcagaatcaggttatactttgaaggaaggtctgacaatatttgctgagatattggatgtggaatataagagaataaattgggacaaggatactacactgcaaaattttttatttgagccaccagaagagtagaggtaacatttcctgagatattaacaactattggaggatatggttgggagagtgaaatcaaaagttctatttcagacatttcaagtttaagggacctgtttttccagaaatatttaaattaaattgtttaattcatatttaaatttttattgtgccaagacatctgaaattcaagggagaaaaaggggctataaatttggtatctaaaagtatgaagatggtgtttaaagctatgagacaggtttatttcacttacggaggttttagataaaacacatgtctaagcacctcaaggttagagggagggaggaggaagaaaaaactgtagagagagaatggagtagccaaatgaattggagggcaactaggagaacatggtatccactcaagactaaataaagagaatatttcaggaaaggagtatccgtatagaatatagaatgagtacaaagaaaattatgtgaaattgtgtatgattgtgggtttggaaatgtggacatattggtagcaaagatgtggtgttttgatgggatggtgggaactaaaaccttaatagagatgcaaaagagaatgagaggagaggaatcagtaattgcaatttgaggcaactctttcaaagagcattactctaaagtggatcagggaagtcaactcaggggatggctggacaagagagggtagaggtgttttcgattggccttgctttttcatggggaatattgcaacatgattgtgaactgatgggaatggtacagtgattataatgattaatctggttttgtgtaatcatcaactctatctacttaattttatttactttccttatagaaaactatcctcataaatacaatgcaaaccacttggttagaacttaggtcatcagtaattaagactatgtggatctaaaataaaaggaatcaagagacaggtagcaaagagaaaaacagacaacatcctagatattctgaacatcaaaaaagtatgacaaatgtttctttgatatgtattccatagaaaaggtcatattgaaacctattgacttgtactgtgccctaaattttaagagaattactcattgatttttttttgatgaaagacaaatcagaaacaacaattttctaagaaggcataggcagaaggcaagtaaccttacaatagaactgagaggtcacagtctaattgcatgacaagaaagcgggggaaaataacttctcataagcaacctggtataagtagtgacaaaatattgaccctagaccacaaaacatgtacgtgctgctctctgtgtgtccttgaacattcatagaagtattatgtaatgtctaatagaaaattaatctgttaaaatataatgaatatgtagtaataaaaatacttgtccttaaagaatatacttcttatgtaatatgtaaagaataataataatttagcctattgtatagtcaggatattctaaagaaagtactgaccaggtagcctttggagtcataattttaaatctataatattaaaaattacatcaattaaatttattattgctaacatttgctagctattgctaacatttgctagctccctgctcaggacttcactttcatggttgtagcaattctctaaagaagtatcatcatcctcaacaggtgttgataaggatattgaggcttacagagctgaagctactcaaaattccacagctatcagtgaaaaccggaactccaaattgaactttgtggtgtgatggaggaacccagatccatcttccctaaactttgctccctctctattagaatttttgcgtaccactagggaaggaaaagagcaagaattcaatctcctttgcccttatttttttttttttctaaaatcaaagtgttaatacctatctccttggctgttatggaaatttgagaaactatatgtaatatgcctgacattattccagatacatactgtaagtaatattgccagataaaatacaggacattcagttaaatgtgaaaaataagctaaaccaggaatatatatatgtaatatacattgttttaaatatataagtatgatactaatactaacatatattggtatgaatataatactaatactaatatttaattataaatatttactaacactaatattatagatataaaatttataattaaatattagtataagttaaaaattagtataaatataatactaattctaacatatattagtataaatatgacccatacgtctgatgggacataattatactaaacattatttgtattttagttggaattcacatttaactgggtgttttgctttgttttcactaaatctggtaaacctaactgcaagttagggactaaagagactaggaagtagccccaaggaacaaaattttgacaaaagctgaaaagtatgtcagacataagtttagagaagttcagcaaagggcccaggagttggtaggcagaaaagaaatcaggccagcaagkgttggaaaatggggactctagggacaagctgcatttctaagatttggctgaattcctgaagattggcccttggctaggcagggctcagcatgcacgtttcaggtttccagtaagtattagtgagctgaggaaagtaaggattaacatcataagagcaaaaactaaactattaacattatgattaaaataaacttgccttctcctttaacctgaatctctaaagctataactatgtatttgcatttattttattgctttggatttttctttcattttatcttcttaaaaaaatggtaacatctggagaataaatatttcaaagaaggtagtcataaaaattttgaatcatattaatgaaccctgaaatagagaatgagaggagaataacataaaccagaaaatgtgttatttgtaaaaccttaaactaattctatttacagcactagactgcaatctcagatttcatgtgcaaattatttattactaaatttactaacaataatcttatatacttagtatacaattaattcagatatcgtaatatgagggatactacctatatttattataatgaaatcattgtggaagtcaaagaaacctaacacttacgaaaaattactgtatttctgggatgtacaaatcctaatcttgctttctccatcaactttggcgtcagatattctgttagttactcagacttacattagagtatatgtaaattaagactttttttaaatctctaccttaaattataggtgatagctgaactggttgttttttatctttcttaatttaattacattatttatcttcctttagtacaatgcagaccatttatatataaagaataaataatattagagtcagataaatgattatctactaaatataaaattaaacctttataattgtcctttgttatccttgaaatttctgcagaaaatatgcttttaactcatacgtttatttttattgtgtttcaacattttttccttcttttctggactagaaaagattttgaagtaaaggaatcgaaatgataagttcaatcacagttgtaacacagtatgcttgtaataaacttttcaatgagatttcaaaaagaataaatattattttgtaaatagcattgactttacaaaatattggtaaaccagaggtttgaacctactttagatatagacacataatcaaatatctacaaatggaaaagaataagatgatgaaaatgcaatatttagtaattttagaacgagatattattcatttaataaggaagaaaatatgagtataaaatatatgattattataaaatagtaaacctaatgatttgattacttaatacctaagcataatataaaaattcattcagcaatagagagatttcaactacatattaaattatcttgtaaattttattggtaagtagtcttatttaatagtatgattcagagcactgtttattataattttgcaacttctcttgctaaatccacagtagtctctaattttatgatattttttctggtaaaaaagttttaaacaattatcctgatagaaaaaaaaggactctcatggaatgcttcaaaccaaaagtaatgatgatagagtaattagaaaaatgtaaaaatcctattgcattatgaaggatattgaacatttatagtagctttcaatgaggacacagagaaagaggtatagaaaaaaattctggaagaactaatgctggtgtaaactgctatggaccccagtcctttaatgaccagactatactttcatatctgagggggcatttaaggaagcacctctccaatactcacacacgattagagtatatgcatattcactgtattatgctttctttgagagaatattgaagcctttttcattatgagaaactaccacattaaaatacagcccaagtaaataacaattatgccactggcaatgaaaaacaacatggaaatttttatgtaaaatatttaattcttttttttatttttctattgttctacagtagttgagttctaaatacaaacaagagataaattttcaaatgaaataaagatgtgattatacagaaaattgtaaatgcccatgctaaatccagtttaagcatggaacactccatttgtttgaaagtatactaaaatcattttattgtttccctatgtgtaacatgcaaaataaatggttagattatcatgccaataagaatagataatgtctaaaattatatatagagtaaaaatgttgataaatacttgataaactgtgtgataaagatttgataaaatacatgataaacgtagtgggacctcaaaaaaaaaaaatcaaagactcatgagatccatttttttttccattgatagattgatgtctaagaaatagttggataaggatattaatagtatttttagtacttccaaactgttcagctactgataaaattgtatatcttagagttggtactaaaatattgagaatgcaaaaacatttatgtatataaacttgtttattcctgatgtaattcaggtggtcctccgtctgttcttgaaggtcagtattcacagtctttagtatacagccttcagatactttgagcttgaactaatctacactaaaaggaatctctggagattgaaagatgagacggacagaaaggaacaaaaggagtaaaaatagtcaaaaggctagatatgctttgaaatgggcttctgtatccaagtctttctgacaccaaagcccatttctttttactagaccacctagctaccttgtcactctaaatttactgttttgattattatttcttaatcctcactgggctcagtacttattattaataatatttctgtgtttaggctctaactctatgcattaggaaggtaaaactatggttatctgtgtacactatcatcttgctcaggaaatattattctaaattattatattgttttatttgaaatttataaattaaaaatgtaatactgagaacagaattccaaaaatagaattttctaagagcaaatcaatttttgtcagttcagtgttttttggtagacacagagaattcagttattcctagagcattaccattgtctgttcatgcaaaacctcccttatgtttaaaataattttattattttttcatttatcacacattctttcattccacacacacacacttacactgctctcttaggcacatctacatacaacttgttatccatccatgaatatgtaggtaaggatgttttcacttttttatcagcctggtttccttaggtatcaaatgkaaattcagatagaagaagccttaaacatgcacctgcatatgtagagatcatttctaaatttaacctttctgtcaagagtctaactgcctacaaaatggagcggtctaatcctcaattttaaattcacctataattttactttttcacttctgagcaagatagtttcgattcttgggtgtttatattctactaattaaaatataacattgctgctattttcatgacygattttttaaaataaagatttcttgcgtcttaaatatcaattaggtaatgcagctctacttgtatcgtcactgtgcaataaatttcagtcaatttaacgtataactccaataagatgtagaagaaaaaggatacttcactccactacgtattttagttagagttgttatatattaatcttgagccaaacctctgttcttagaaaagttccccatcagttttatcagctggatatgtcatggtgtgtcctttgagatgaaagcaccacaccagttcttcatttaacagtatactaaagaccaaaatattttgaaagaaaatgaaagagtaacagcaagcttacctcaaacactgctaaggaagccaatgttgaaaaacttaccattcatttcaaatggaggaacttaattctccagatagccccaaaacagagctaacgaacacaatgcatccccactcccagcagcacgtcgactagtggtgtttgttttcatatttcctatcatgtttgtcatgcctttagtagatgatttggctggcacaatatcctagcctagcctcagtgtagaaatctggcaataaaataacacatccaaagataaaataagaaccaatgttaagtgatgaatccatgcaaagtactcagtgaatctcttaaaatacgcctatctgcacacacaggaaggaaatggatgtgctgggaatctgcattcttctggaacaccatatgtaatgtctattgagatattttgagtgggcataatcttcctaggagggataatatggaaaactttcacagacactttctgtgaactagaatctgctgctagaatatcacaacttgaacagaagaatatccttacctcacactgggtgtaactgaagataactaacacttgttatcagatatttatgtttaaaaactcagtaagcaaaagatagcctatctgaaacatactactttgtctacaaaataaatctcaactctgtaactgatgttaaagaattatttcaatctgtctgtcacttagtaagcatgactaagaatagtaattttaatagtaacttatgctatcaataataataaacatataaaagtttcctaggaatgtgtaaaattctactgacccctgtaaaatactaacgaaagagtggaaataggagcattttcccataagctgtgataaaataattcttagtatgataatactttttaaaaagttgacagttgaagaaatttaactaagacaatgatgtactagacatccttaaagtgagctgctgctattactgtaagtttaatcattataaaggccatgacacttctcttagaggatttgtgtacattatcattggggagtactatattatgatagtaagctacccttgtgttatgaaaatgcatggaaatttgggtgaattattagagtaaaatatacctcacaaacatttgccttaatacaatttgccttaatacatttgccttaatacaaatgataaatttgtgcaatggatctaaaaagttatacatgtaggattatatagacatatacatagtgagaaataacattttaatgcacattgcatatacaaaatttaaaatctgctcattcatcctaaatgtttagtgcataataaaaacattaaaagtatacaataagtaagttttactcagaatgccatacaaaaaaaacacatgaacattcaaatttggcaatagtgtaatgctttcacaaaagctgaaaactctcatacatgtttaaaatttaaaccacatggaagttgggtttagctatggttttatacttggatttaaatacgtttgcttatattggcttaatgttgtccatccaatccctcaagaggaccacataaaatacaaattaacatttttgcgatatagaaacatgaaagtccataacggtttttttcttccataagctaaataccaaataacattatgatatccattaaaaaatttaataatattttgagaaatacatatggatcatttactttttaaataaagtaagcatagtcattggctttcttactttttaaacttaatataatatataaagtcaaaagggataaaaactgtaagtacattactccataattgatagtttccttttttcttatgttttactttcttaacttatccagagagaaaattatatttagcatttttctgcagtatatgcccgtgttttgtagatatgaatggctctttagaagtacatttatagcaacctagatgtgattcaaaattagtctttttggttgtcagaaataaagtaaccacagtatagtcatagccttttttttgaaaagacaggatcttgctctgtctcccaggctggggtgcagtggtgcaatcatggctctcacttcagcctcaaccacccagagctcaaacaatcctctcaaagtgctgagattacaggaatgagccacctcacccgatctatagtcatagcgtttcaaattaaatatttatttatcatgtttataaaaaaccaaattggtattcaagtaaaatacatttttaatcttacaacatcatagattatgtagcatttgttcataaaagtgactaaagtattacaaattaaacatatcaacagctactaaaaggaatatatgactttctcattattttcatatggtacaggtatctggtatgcaaaaattaggtatgtatttgacatattaaaataaatcttgaaatctattttccatcagcatatataaattaatgactagaatctgtcactgtttttcaatagctggagttggaacacttaacattatttacaacaagcaatatcgcgcctgtaatcccagcactttgagaggcagaagcgggctgatcacgaggtcaggaaatcgagaccatcctgactaacacggtgaaacctcgtctctactaaaaaaataccaaaaattagccaggcgtggtggcaggcacctgtagtcccagctactcgggaggctgagacaggagaatggcgtgaactcttgaggcggagtttgcagtgagctgagatcgcgccactgcactgcagcctgggcgacagagcgagactctgtctcaaacaacaacaacaactacaaaaaaaaacaagcaacaatataccaggttgtcagtttccattaaaggaaattcaaatcaacaaatgttaagcatacaattttcactatgagtaaataatttttgcattaaaatacatcagccaggtgtagtggctcatgcctgtaatctcaacattatgggaggatcagttcggtgggccacttgaggtcaggagttcaacaccagcttggccaacatagtgagaccctgtctctactaaaaatattgtacaaaaaaaaaattgccaagtgtggtggcatgtgcctgtagtcccaggtactctggaggctgaggcaaggtaattacttgaacctgggaggcggaggttgcagtgatgagccaagatcatgccactgcactccagcctgggtgacagaataagactctgtctgaaaaataaataaataaataaaaataaataaataaataaataaataaataaatctcataataacatttctttatctttatctcaatcattattaaataaatatctgagtgtactatgccgctgatggtaactggttgttgaaaacaactatgttttaggtatattaaagtattattgtattctaaatagggagaactttatatttcctaaggaaatttattagacaaataaggttctagaaaatatgacttgattttaaaaatggcctttatcatgagagatcgcagaaaaaataaaaatcatattatgtcagaaaggtagacaaacattataattcaattataatttacctcaatcttcaaggtttttgcaatgaacttataaaaaataccagtgtgaaaaatttaaatgaattaacatgaagaactcagtgaaacattttcttcagttttgtaatattttagctctaaaattaaaaaggaaatgaaaattagatacmatttacatttcctactccgctccaccaaccccccaaaaaagtaataatttcttaaggaaaatatgatcgatcatagttgttttaaagttagagattttgattgtatttatttaacataacctcctaaagacacggtgtcatgatttataattgtttctataagattatagtgttctrgtcatgctgttttctttctctaatttaataactgagttttgcataatcattcaatactgtcataaagagaaccaaatatggccattaaacaattagaataatacttcatttatgatttggctattatttaggcagatttaaaaaactatataattattattataaagatgtgtttacaccattatttgtgtatctgattctaatcccttttggttttatccaacattatgaatgtaaatgatgatcataaaatatctgatattttatattaaatgttacctcacatctgtatgatttactataatcacttcacaaatatttattgagcaccaactgtgagccaggcactgggctaggtgctatggagtcagtatgaatatatcgtagagtaaaatgcaggcctaccatcactgaggttaccacttaccgctggcagataacagaaaataagcaatttaccaaaccacataatgagaactatactatgattaactacaggcttgggaaatacaacataggagaaactcagtccagtcttagaagcttatagaaacctttcttaaagaaataaaaagttttggggtaagatgaaacagtacaggcaaagaccgagaggtgatagagaaagagaaagtaaaaaggcaggtgtgaggagacatgaatctggggagttatgaagaaaccagactgtacatttgtaaaccaagcttgttttagattacgtgccaagagcaccatgtgaaaacttttttttttaatgtgaggggagaatgctatcaaatttgaattttagaaaaatcattttgtgtgcagaagagagaatggcatagaagagagtaagaaagctgacagggagaatgagaggagacacatggtcgtgttccagggcagcaatacaaatggtctacactggggagtaactttgggaatgaaaagacaagccagaggatggatttcagatgtccagagaatattatctatgagctctggtaatcaggtagatatggagagtgtgtgagaagaaaggaaaatcaatgaatgttattcagttttcttacttagcaatatccagggccatttcatgagttaagaacgtatgtcggactgaaaattaaagtaagaagaagtgttttaaaaattagaaaaagaaatgtgtcatttctaaaggcaaagaaagtaagtttaacaaaaataaaagtaaaagattggtaaagattaaaaatatgatctttatgtttaatgatttaggttattgctatcatccatctgtgctgtatctcagatcttacagaatcatatgaagagacatgtctttccatctgcctacgtgcatatgagtgtgcaaatatgctaaagaattaaaatatgtaacaaaacattgtatgccactaagaaacatgttttaaagtccttcagaaacaggtttgtgtaacctagcagtaacctttagtaacctatactgaaatctacactagtcaaactaacacattttctaagcttctaaagccctcaactcttcttttgtgatttgcaatctggcagcaaaactaactgcagtttcaacttatgaacacttcttttacactgatgcctgactgatcgtgaagattctacttcatcttcacccttctcaagtgatggcttttttattctgctattcgtgtaccatagagccatatatatgtatatatgtctactaagagctcgttatttttttcaaaacattattcctccttcttccacagaataaactctcttaaagtagattctactagattacatcagagtatactatttacattttattcttgctgcattcaactgcttaaagcctgctgaatcttactcatccattgaatatgttttagcatctagcttactttccttctatctactaaaaatcttgtaaacatttttaattatctcagtgttcatacaaataaactgtgaaatgctttggcctttttctcttaatctttctcacctgcaagaatcacaaccttgtttatgtttaaatatgtgattgctatcaaacagcttaattaatgtgtctggatataaacatgtatacacactatatgaataaattcaagaccttaaactcaagagattctttaatgttgcctggcattaatgtctctagccaatttattccttcaacacttctaaaggatatttatacctgttctgtcttcccaaaactcaaacatttcttctctacttgcacagctacaaacttgctttttacacactcacacacaagaaaacaaaacccaaaattaatcagatcgcaaaatcaattaacttatcaaaaaccctggccaagtcctctctacctccctccagttgcaatgtcgattatgcccttgtctcccatctagacttgccagtgggattctctagagcccatccacatatgactatgcaagactttagttctaaaagtatttttcttctttttttaaaaaatcatctttgccctccatttattcatgtagttttactactgtaaaaaaaaatatgtaatctgaaaaaaagacttcacattgtttaatagctactttcccattttcatactcttcttgacagcaaaactcactaataatttacctctaccaattgcccacttttatcctctcattctatatttaaactatttcactatcccaattatctcattccaactattctcatattggtctgtatttccatgttgcgaagtcacttaattatttctgaatcatcagtatttgatgtgtgtgtagtctctctcctccttgaagcatctctttcagtggagtcatggaaacccagaaatcatcagagttttttttttttctaacctttctaggcttaccattttagtctcctttgtgatttcttctcatgtcaaaatattgtaatatactgcagctcaatccttggaccactctttcctgtgcatgtttattccatgggtgatatcagtcagttttactgccttaactaacatctacatactgatgacttccagttatatctgcagcccaggtctcttcctaaacccctgtgccttatgtacgtatctacttaagtatttaatatgcatttcaaactttatatattcttaatttacttttaacattctcctcacatacttccccacttcagttaaaaaaaaacttcattatatctcttgcttatgccaaaaaattcaaggtcaatattgatcatcattctccactgccagttaatcagtaaattctgtcaacttgacctttagaaaaataaccaaaccagaattctctttaagagtgtacattgtttataattattaggtccattacatatttagtaatttagaatagtaagaaatatagtctgggaattggatgatattaacagattattgttaaataaatgtattaagtgtgacagtgttgttttggctcagtaagaatatgactttttattttttttagaagtgcatactaaatttcttagtgtctgtactgcagaattaagcaagtgaatagaatgagttagaaactcattacaacttcctacacacttagaattttccttagcatgtatttacttaacggattgatcctgctcatctttctctctttcaccaacatgtaagctctaaaaagatgggacttttcgtttattttgtttgcaactatattcccagtacctacgacattattaggcacatattaggtagtcaatgaatactttttgaatatatgattaattatttattatgtagattcttcccaccttcccaacctcctaaatcttcccagagctcagttcttatttctcttttcttctcttttcctgtactcttcctttaaaaaatatcatctattggccggagcggtggctcacgcctgtaatcccagcactttgggaggcaggcgggtggatcacgaggtcaggagatcaagaccatccaggctaaaacggtgaaaccccggctctactaaaaatacgaaaaattagccgggcttggtggtgggcgcctgtagtcccagctactcaggagggtgagacaggagaatggcgtgaacccgggaggcggagcttgcagtgagccgagatcgcgccacggtactccagcctgagcgacagagcaagactccgtctcaaaaaacacaacaaaacaaaaacaaaacaaaacaaaaaatcatttatttctatgacattaaacatcatgtaaatgctcatgaatgtatatctctgtaaatgtctccatttacaattacaaaaaaaaaaaaacaaattttcctatttttaaaatttttccccattccacatcagcaaattctatcagcttgatctttaaaatggatctgcaagtaacttaggtctcattttcagaactacaagcctaatctgagccaccaaggtatgttttctggtttactacaatagccagtctccctggtcctactcttttctctccagtttattctcctccctatgttggagcaatcctttcaaaatataagccagatcttagcactgcctggataataactcttcagtgattttttaattttatcttgaataaaatctaaatttcttatcattatctaaatgggcccatatgacaaattgtttgacaatctctgataagataatctctctgctcactatactcaaccaacttggtctccttgatatcacttattgcaaattaatggataaatacgctctgataatttgaataacttcatgcaaattcaaccagcttttagtagcagactctggttgcaaagctggtgattccaaaccatgcagcatacagttctcacctcagagtgtaatgtgccactggaagcaagttggggacattaatgaaattacagaacataaaatatttgggctggggacagtgagggttaatatagtgtggtcctgcaaaatagaagtgggcaatagctaaatataggtgtgtatgcagtgtgtgtaatattatgactagaccccagcaagatattgtggatgaaagaatgtggagagacagatatgaatcaccatgtataagaataatgagaggcaaaaacggatacatttgtcaaaatagtgtatagagaacagaaatttgggtgagcttatgtcttgggaactcagaatctgaatggtcatttgactttttactttttacaacctttaagtagtaaggtcttacttgtttctggaataccaggtcaacataaacaagataaatatactattggcaggaatacttctcatgtttcttataaagttaccatgctcagtgtagtaagtaaacatccaaaaatactttttttaaatttctaatttcaaaatctttctatttatttatctttataatgtatattatatgctttgttccatatttcataatgatgtatttatataaaatgcaaaaaacaaatttgatcataacaatatttctgtagctgtaattgtaaagcagtataacatttaataaaacaagatgcttctgattcttcagcattccctcagatagacatttctgaatgacagtcatgagattgtttccaaggtacatgcaaatcataagttattaaataatagttttcagtataaaataattatccttgcggttttcattatggcacatccgccttggacagaagaaacaaaatcctgtgactgacttagctgcaattagcaagtcattcagaaatcacattcatcactgtcatttcagaagagtctagaaggaattgcttgtgctatatttagcatgcatgagagctgtaaagtccagcctgttcatctttctcacgtttctgtttgtttgcaaaagctagaaagctgtagccaagaagggcaggaaggaaggttggctttcaatacccttcttcagttcagctgagaactcctttctatgactcaatagccagttccaaattaccacattattaaaaaaatttggttatcctgcttatattttcttcatagatgatattactacataaattaatatctattaatcaatttatttattattaatctccaatcattaaactgatggatctcagagatcagtgacttacaggttctgtttactgttatatccattgcccacattcctggcacatgtcaggcaataaaattcaattattgactaacaaacagcttcctgaaaaaaagtcagttcagtttctttattgtggatttttaaaaaatcaacagaaaactagccctcatatgccatttctccagataagagtaatctcattttttcacaatgaagaggttatctttagtcttgaggtctatatatacagagagagagtagcagtagtgaatacatctggtgtcaagtacaattaaaattatgtcatagggagaatttaaatttattctataggaaaagcagagaaaccctgggtaaaatttatggggatatttttgagcttaatattatatttggtattaataaagacatatttctctttgagaaaaaaaataaaaatagccctggggcctggaattctagtagggcctgaatgcaggtctatttttccaactagatttagtaacgaataaagttgtcagggattggaatgaccttgtccagattgtgacacatattccattattaaaagtgaaaaaacagaagttagaatagctttgtgcagatatactaaagagaataaaacactgaatggaagattagacaacattacttcaagataacttgaaattcttttaaagggcctaatattatttttgattcaaaaaaagtattcaagtaacagaaaaaaaattttggaggaaaaaatacccagaaaattgttacctgaaataatttaagaatagaaatctttgattataaaatacttctaattgcacgctaataaaataaagtagttccatgagaaataattgaaggctaaatgggacattgtaacactttcaaatagtagaaaatatggatgggatatttttaacttactaatgatcagtaaaataattgggaaaaaagaattgtggaaaaatatggcattttatatggtaggtagcacacatatctttattgttacctctctaatattaatatagatttgaaattattttggttaaaggttttcaccaattacttaagtatctgaaatcgattattaaaatgaaataagattattttgtgtgtatcaccattttaatcattacaaattcaatgttcaatgctcactttgaaaaattcattaagcatgatttaggctcgagtctgtatatatgtttatggtaacaaaactgacttacaatgtttatttgttgtgctgacagcttcctccataaacagtgtcattgctgtctatgcaccttaatgtggcacatttggttgtttcatcttactttccctatatacaacatcttttatgtagatatacaaataaaattaaatacacatagatatatttaaaattttagcttcactaaattcattacattacctaaaatcccctcattgcatattagacactgtgtatattaatacataaaatgatactaggttcaacaccttaaaatttttaacctaaattcactgctaggcaggagtgtaggttcataaaaggaagttaaactaaaataacatacagcttttctaaagcaggaagaatatgtaaggcaattatattctcatgattccaagttgaaatctgtgccatttggaaggaaacacaacgctaaatagagacaaaatattttgaaaattggataggatttttgtaaagatttcaaataaaatagaaaaaatattttaacttaaaagttgaaaaatgatttatttatcaaagttttctaagttatctgtcagatgatatagatatgttttgaataagtactaaagaaataaggagatgagctagtcacccacagccacagatattatcctaaaaactgtattatttgtaattctatcattgagaatgaaatttgtttatattccatttgtatctctgtatgcaactatatactctagtttttttttattatttgtttgtttgtttcgttttgttttagaaaaactgcatgagaagactgcttacttcttttttgttcagatggggagctcactatgttgcccaggcatatctagaaacctagggctcaagaaatccttctaactcagtccagcttcccaagtagctaggattataagcacacaccacaacactcagcaaaattgctttttattaggaaacagtaatatcaatttttttaatgttaatgttgaggtacttagttgaaatcattaaaacaccagatttatgtttttgacattgtaggctttgagatttgaaaattcacctacctcagccattcaagttgtgtgatattggacaatctcagcttccttatctatataatctgaataataaaattgcctctttcaaagaattatagtgaatgttaactgagtttttgcataagaagtgctcagttcagtgtctaatagatacaaaatttctaataaatgttttttaaagtatattcttcttaaatttactcatatacctctgaaacaggtctcaaacaacctcaaaatatcttagccaacatccacaccagttgtttagaagagaaaatacacctacacacacacacacacagacacacactttgatttttcatttgaaaggatacgctgtagtttcaagtgtatgcagtataattctaatcactttaaaggttctttctaatacaattagtctaatggtttacttactcaggtaaaacctttaccaaacagccttttatcagacactgactctatgcaagtctacaagagtcaaaaaaacagacatgttgtctgctattacggagccttaaagtctaatggaggtgattagtcaaatgttgggacctccagtgaatagtgatataaagtcaataactttgaattcaagaayaattatttgatatgctgaaactacccattaaagaaaaacatcacaattaaatttttgtataattttcttggagtattatttcccaagtcttttctaatatttaagtatgcatttaaaatcaagctattttaagatttgtatatgctactacaaaactaagtttccaggacattttctggcagttcctagactcatccctgaaactgtgggcttgctgccatcaattttatggcacagactaaagcaaacagacgtgaataagagcaaaaccgatagaatttggaagactcaaaaaagaagccaatttgtttcaagtttgagattattttcttatctataattaatgcaaagtctgcccccttattaaaataagtgttctagtgccattatttgaaagtacatttgagctttctacagatcattaggctgtcactcctctgggattcgtatgatcgcattcaaatgataacagttgctttgttgtctctggaagatgaaaatgggtacaaacataatgcatcttcacatttggaaattagggaagacatctggatgcacttgcccagctaatgaataaagggaaaaagggaagaataaaggaaggaaggaaggaagaaaggagagactggagggagggagggaggaaggaaggaaggaaggaagggggggagggatggaggaaggagggaggaaggaaggaaggaaggaagggannnnnnnnnnnnnnnnnnnngaggagaggcaaggcaatggaagcgtacggcacgtgttgagaggatagagagaagcatggctaggtaacgaagtgaagcgaactggatgggtgaagggagggaagaaggaaggaaggaaggaaggaaggaaggaaggagggaaggaaggaagggagggaagaacgaaggagggaaggaaggaagggagggaagaaagaaggagggaaggagggaaggaaggaagggagggaagaacgaaggagggaaggaaggaagggagggaagaaggaaggagggaaggagggaaggaaggaagggagggaaagaaggaaggaagggaaagaaaaagtttctgattttctttaatatgatttagtattcagcccaattcattttctgaagttggaggaggctaaacattgcctcgtatctcctctttaacttgccagctaattatgcaaacctttatatccaaacaatgcagaggaaagaagacagaataatcttccagaccatgaaagctttgttcatccatcataccaacagtgtactaaagatcttagagatcttttgtgtggtaactctttgccctttcagctgatgaataactgaagatgtgcaatacaaagaaattactaaaagagaactgtgcactggaaaccaatttgttttcatgactctatccaacgactttagtgaagtatttaggagagtgggttaagtacacaagcctcttttaaatacttattaagattaaaatgttcacataatatataaaagtatgctttaagtgggcacttgattcccagttagaaatttaggattaaaaaaacacactacatctcagcaacggtgaaaatacgtsaagattttgatttggattaaaaagaaaaaatatttctttgtgcttaaggcattttatactccattttatttcttgaacagaacagagcttaacaatactgactgacaatatgaacaaggctcttcattaggatctagtaataaaacaaatgattagagtaaaggaagacttctgataccagaaatcattcaagaagtctcaccttatatgcaggattcagttttacatttttgtgtgtgtttttatttccccttcaaaccaaatgtttctttcttacttatgaggcatccactttgataacagatgtcaagctatattatatcataattggtctttgcttattgctagtgatgaaacctcatccaatatttttgcatgcctccatttactacagctgttaatttttcttaaagtttgaaaattatgtgcagctagtatgtcttcttcctagtatttttttaaatgaagtgtaatttgttcccctttattagtgctggatgaaaataagtcttcttttttatttcctagaaagtttagcacattgaaatgttttgcctttgatcaaatttgtgtaaaggatcatacagattatatatttcctgtggggttcttctcttctcctcttctcctctcctctccctttctcttcccttcttttttctcataaaaacctatatccaarttctctgtgaagctgaggatgtattccaatccacaagtcaggaatgatgaaacagtaaaagtttaataagctacttggccatggactcttatagcacagtatatttagatacaagaaatcatccttagttaatttatgaatttttgcaaatttctaaggtatgctattataatcctgtccctctaggtaccttgattcctgcccaaaaatagcaaaccttattatttaactaagaaaaaaactgaacaaactataatgaatctagggaattgttcttcggtaattatttttctcatttctaccgttagcaatagaaatgtctggagatgggaggaagcaactaataaaagtgaactagattgagatatttgcattaaatataatctaaattgcaaataatcctcttacattctctatgcacagctgcattattatacagttcacattgctttggtaactaattttttctgcctttattacatcttccagaaaacaaaaagaatacagttataaagaccttcctaacaaactatagtaagtcaagatggagaatataagtgggccttggaaaatctgagttagattttagtttgtgaacaggcttaagagaaagtcgtctatataatgactcctcatcagcagatgaaggacattgaagtcaaacgttttgctatgtcacgacacttgaagaatcagtgtgagttttcaatgtgagttttagaagattaatatttacaagacatttttctttaacttaacacatgagaaaatgtgagtttcttttttaataaagtgaaaagttttattttagaactgatactgaattgatccaagatacatccaaagttccgaaagctattcacttaattcttactgcaaaaaccatttttttcagtgtatattttcctaggtttatgataggcactggacatgaaaaaatagataagactgattttctctgaagctcaaaatataattttcaatttatataatttggcattgttacagtatttcatttgtatgttataatataaaataaaattttatataaatgatatttgttcagttattttgggtatttctaatattcaatttgcagaatacagagatgcaaacacacagacacacacacacatgcacacacacatgtttgtctgctctataggctgaaagcttgtgtgcttccaaattcatatgttgaaatactaactcccaatgtgatggtattaggtattaggaggttgggccttgggaaagtgattaggtgatgagcgtagagccctcatgagtgagattagtgctcttatatcagagacctcaaatagctcccttctcccttctactatgtgaggacacagcaaaaagactgctgtctatgaaccaagaagtaagccctctcatcagacaccaaagttgccaatgccttgattttgaatttcccagcttccagaatatgaaacatcaatttctgttgtctgtaagctatccaatgtatgatattctgttatataatcccaagcagactatgacagcttgtgtatatgtgtgagtatgcaaagaaaaaatacttacatttttcttttatctttaaagattcatcttagaagcttgtagaaaaccatgaaagaaaaggttttataaaactaacaaattacctaggacattgccttgtggattaaaatggagccagtgtgattaaattactagtaatgcattcacggattaatattaaattgctgtaataaaattcagtggatattaaactcattttatttgggtatatagttaagaataaatactataattaatttatttaatttaagaaatctgtgtatttttttttttttatttgagatggagtgtcgctccatcgcccaggctggagtgcagtggcgcaatcttggctcactgcaacctctgcctcccgggttcaagcaattctcctgcctcagccttccgaggagctgggactacaggtgcacaccaccacgccccgctatttttttgtatttttagtagagacggggtttcaccatataggtaaggctggtctcaaactccttatcccaggtgatccaccgccttggcctcccaaagtgctgggattacaggcatgaacatggtaaaaaatggtttgcacgtgagacactgaaaagttgtcccagggtgtctgattgccacaacaaatagttactggaagcagaatttcacattacttggtttggaatactgtttttcttaaaaatacggaaattgtcatttgtgaactattttccatgtggtagtagtttttaaatgtgaacatttactgtgaaggacgaagaggtaaccacacatcagttgtgatgtttcttacttattttactcatatttcttgcctgcacactatgagtcaggcacaatttcaggctgtgaacaaagcaatcaaatgatagtttgaatgagacttaccctctcatgagaaaaaaggaaaaaggacagctaaagtacatagaaaaatatgaggtgataaacactgactacttcagtttggttcccaaggaagatctgtctgaagagatggtaggaggagaataggacaaggagctatgctttggggaaatataggcattgtatatcctatgaattggtatagtgcattatgtgtattttataatattatagctgtattgaaatttgtaaattgagtaacattgttagtgtagctgggagaacattacattaaaaagcttaagacctaaagccataaaattactagaagaaaacatatggaaaacactttagaacattgatgtaggcaaagatgttatggctaagactgtaaaagcacaggtaacaaaaccaaatttagacaaatggaactgtattaaactaaaaaaatcttcttcacagcaaaagaaacaattaacagagaaaagggacaacctccagaatgagaaaaagtatttgcaaatcaataaaagacattgtttataggaaaagtaagatgaaacaaccaaatgtacaactttaagttgcccagacagcaatgatagcagtttttggaggaagatatcagcacaacaaacattttaaatcagtttttattgcaatacacatacatacagaattgaacccatatcatgtttaatgaatttttcaaagtgagcatctaagaacactgaatttgtaaccattaaaatggtgatacatacaaattaatctattttatcttagtaatcgatttgagattcttagttaattggtgaaaacctttgaccaaaataatttcaaatctatattaatattagagaggtaacaataaagatatgtttgctaccttccacttataatggcatcttgtttttcaataattcttttctcccaattattttactaatcattactaagtaaaaatatcccattcatgttttctagtatttgagttttatgatgtcgcaattcagccctcaagtatttctcatggaagcactttattttattagcatataatcagaagtattttataatcaaagattttttattcttaaattgtttcggttaactcttttccgggtaatttttcctaaaagaaaattttccgttacttagattttttttatcaaaagtaatattatgccctttaaatgaatttgaagtttccttgaagtaatattgtctaatctcctattcagtacaaagctattctaacttttgttattttttcacttttaatcatggaatgtgtgtcacattctaggcaaggtcattccaataaaaaaatgcatgttaagtaagaactggtggatctaattgaaaygcagagattctatcagtaaaatcaagagtaactacaaatttccagctgcgtacttaccatctccatttggatgtaaaatttaacacgtgaacttaacatgtgaactctttattttattttattttattttattttattttattttattttttgagatggagcctcgctccgtcacccagggtggagtcagtggcaagatctcagttcactgcaacctctgtctcccaggttcaagccattctcctgcctcagcctcccgagtagctgggatcacaggcatgatcatatcgggtaatttttgtattttcagtagagacggggtttcaccacgttggccactctggtcttgcactcctgacctcaagtgatccgcctgccttggcctcccaaagtgatgggattacaagcgtgagccatcatgcccagctgtgaactcttgatattgcattccaaacgtgctcttcttgcagtctttcctatctcagcaatgtcaactacattcattcttccagtttctcaggccagaatctttggaatcaaccttgcctgctcctttcctctttatatctaatctatctgccaagtaatggctctacctacaaaatacatgtaagatctgactaattatttcaatttctgccactaygtctctagttcaagcaaccaacacttctcacctaaattattttagtagcctcctaattggtcaccttgaaccatctgtagttattcccagcactacagacagatgatcttttaaacaatgtaaatgagatcttattctttccttcccgcccgccccccaagatggagtcttgctctgtcacccagtctgcagtgccatggtgtgatctcggctcattgcaacctccacctcccgggttcaagccattctcctgcctcagcctcccgagtagctgggattacaggtgcccgccatcactcccagctaatttttgtatttttattaaagacggggtttcaccatgttggccaggctggtgttgaamttctgacctcgtgacctgcccacctcggcctcccaaagtgctggattacaggcgtgagccaccgtgcctggccagtcttgttctttctttgtgcaaaccctccaattcttccctctcttactctgagtaggcacaaaatgctttcaaagacatacatggcactaaataatgtgaacttactgtcccctctccaacctcacctcctacactcattcccttgctccctccactctagtcacactgtcccctttgctttccttggaaaactctaagcacgtgtttttctcatgatctttgttttccatcccttctactgaaatactatttccccaaacaactatttggctcatcccttctctcctcaagtcttcacttcattttctattaaatattacaaagctcccttacccagagttagagaaagtcaagtttaatcttccagtcttcgaaattggtccaagatttctcacaccagtcgtaagtttagggtccttatggctaccctcacttcagactagctgtttacaaatatggagtccctgtggactctgtcagattttataactcagaagagctattcatagaactcagaaaagccctgtaattacaatgacagttttcttatagcaaaaagttacaaattagaaccagctgaggaatgagacacatagagcatcttggacttagaatgttccaaatgcaaaacttctctgtcctcagagatctattatcttcaggacatctattgtgccggtgtacttatggagtattgccaatctaagaagctcacctgtatctctagtttttattgggattttattactatatttaggcatgatcgattgaatcattgttcgcatggttaaaatcaatcttcagctccttcccctccatggaggtcagtatgatatcacatggctaaaagtctcaactctctaatcacatggacagtctttctggcagggagagacaaaggacaatcacatgttttattatggactccctcaccatccccccctcacacacacactgatacttactcacccgccatttctatttatccccagtcctcattttattatcactagcacctagtatcatctaacatattacatcatttctttattgatcttatttattgtctttctcatcaaataaaaatggcaagataaaggaatttctattttgtatttgttgaatctcttaccactcaaataatacctgatctagtacacactttataaatatggttgaatgaaggaatgaatctgttttctaaatttaggtcttcttatagcccttctattccttattttacaatagaatatcatttaagtgacatggaatggaatctataaatattttaacattttaaaatttattcaatatattttcctcaaacctcttatgacagtgaaagatttcatctagacttttaatatgtaactattaactatagcttcattttactagattttaaagctaattaaaatatattctctcaaaaattactatagcttacttagaaataactgtctctgaattcctaaggataattttaattctcgttttaggcttaggtaggcagcactaggattctataattccaagaatactttatttttgaagctagatgcataatttttcttcatatcagggcatcctgaatcaattgatgtctttttctttaatctgttcataaaatgagttatcaactatgtgctgaaatatcaatgacaagcaagtaattttctgtaacacagatgtaaaaaaaaaagatactctgcttttttttgttgttaagttagctgtgtcttaaaacctttcaaacctacatatgaagaaaattctaatgggtgatctgtagagcattttggtataccacaaagtagaaaaagaacctgatactaagaatagaacacatacaacttcatggaaagttttagttattactattttgaagtatttattttgtgacgagaacaaaaaattctttgagaaatagcaaagtcaagatgtttaaatttatgttataattttgaaataaaaaatatgtagtgttttggaattgtgcatggtggaaatatgttgtatttcacaaagcttttaattgatacagacagaattgtctctcttgttattttgtaagtctttggagatttcttcaaattatagaataaaatactgcatcacttcaatagctatttcaatcttttgaaatagctgcatctataggcaaaggaatcttattatctctaaattacaatttggtatgtcatgagttatttcataggacaaagtttgttaaatgaacactcactggcagtgtcattagtgctttgctcttgaactcaactacgagtcagctctgtttacgttgccattcacagaagacagaaatgaatgcgcagttaaaatggtgccataagtaaagtagagcagaattagaagaaaactggacaatttaggaacataagaattgctgtactgaatcagaccatcggttctcctggtttaatatccagcctccagcagctgtacttgttagtttctacagctttaaaagaaagaaaaaagactacataatttacctagacaattgtgccatctgtgatctggagaaatgttctccttgacctctctcaaataataccctaaagcaggaggtttcaatcttgctatgatattggtttagcttgaatagctctgattattaataattcttattaaattatccaattcctccataaaataaactagtacatcaagaaactgtttgtctctaaagctcctgaattcatggttgaacatgtctgcatctatgataaaatatgaatttatggtgcatattcaatataagttcttgatggcaaaaatctgcctcttgataaccatactggatgaatgtttacttcttccaaattctactggacttagagactttggccaaacaaaacaaaacaaaacaaacttagatcggctcatactactccaaaatttctatctattaataatrtacagaaggtatctgaatgatgaaggattttttgtgttgaacttttagaaaatttcaaccagagtttttcttaatatgatttagcataaggtagaatmagagcaaggaatgaattacttatctttgtcactttaatcttttgtttatgttagaaaaggctgaaaaactttatagtttcttgattattctaaataccaccttcagatcaatatttctaaaatattatgctcacactagccatttagtcaaaagttcctcaagagtagtaaatgcctacaagttcgatttcaaacaattttccagggctgttagaccttaatgtgacaacactratatcctaagtccatatattcaattgtatctccttctatcctagaattcaacaaaactagttttttcgtcattatttgaactaagaagtagattaatcattaatrtctatgttaattctatccctttttctagctttcccgactttcctttctagctcaggtccttatttcctctctttcagccagattcccattccatcaggtaatttcctttcaagcatgtaatgactgctccttcttctgaacaattygtggccctttttttagactcggtttatgctatcttatgttgtagttctttgtttccctgggttttcttgcttataaattccctgaggaaaactttgygtttcatatttatatttctagaggctagatctgtgtctaactcatactaataacataaagatatattataaggaaatctacagatgtagtgactgtgtagagccacttttaaaaatctctgagttcctgtttgtgtgaccttgrcattaatatattattgagtgctataaaggtataaatgagctcaacactgtagatattgaaaagatagagtcgacagttattcattttcaaataacaactataagcatgggaaatatcataaaaagataatatgaaagttttgaatgagtttagacacataaaattggaaaataaaagaattccaagcaaaagtaacagctagagcaaagagaagaaatgaaaaaaggagggatttactggggaactctatctaattccctaactcctattggctgggtgtataaaaagaatatctgaaaataaatttggaaatgtgggtggtaccatgttcattaaccttaatatgaaaccacttaagaattattgaaagatttttaattagtaaacagatctatgagatgttagctaaacttaaaagtgggactgaaagaagtttcctggagtaatgagattattacataataagatttgtaattaaacttggtcttaaactcaagcagtattaataagagtatatagaatgaaatagatgcaaaagatgagtaagtgatatgattccttattgtgaaatttttgggcctaggataagggaagataatgaaacaaaagtaacaccaccctttgagcacgtttaagtgtgaatgaagatatattttattgaaataaaaaatttcttcttccaatatgttaagcagaaatgcatataaaaaattcaactttaaatttcaattcttacaattttaaataacatagtggttctcagtgctcaaaccactaagcccagttcacatacgtttcatatcatcaatatayatccacattttttctgtcttaaattctttaaagctcttgtgaacagtgttagaaaacaatattctttttaatctaacaatgatttcaattttactataatgtctctattttattatttaggaatccaaatgagactcagaacaatagcacaagctggcctgtcttcaaaagcactgwacaaaaatawctaaccttgaatacagagtcaacaagaataatgacgaaactaygtgctcaacwatgtcgattctggacatcattttttccaaaagtcttggaaatgacaggtgtgtctgtttttagtgtttggttatttaatagatgatgggttatgtaaaaaagggatgaagtatactctccaaggcacggtgatggagttactatatgtatctctgactttaaaataacttggtttaatgaacacattatttttaagactttcttctatcaagtttagatatgttttgaactcttactatatgaccagtactttagtagttaaataaagaaaactaaaatatagatttcaccctgtggaaatataaaatagaaaaaggaaactaaaatagagccctacttgttattcagataatctttgtggaattaattaatggacaaagaaataaatatatcaaataatcataatgtatggaactaaaaaataagatgcataaattggtaaaaacagatttattgataaataatagaaccttgatttaaatggagaaaaaaactccgaagtttacatatttaaaaacacaataaaraatttctaaatattctgaacttggaaatatttatctaagagcacacacgcacattacataatatgatatgatataatattacatattataaacaaatagttatttagttaactagtcttaaggaagtgattggtgagaaatgggtaaggaaatacgatgaaaatttgttcagattattatctcaatattcattattaagaaaatatttcaatccacttgagtgatcaaacatgtgtcaccttagtttgatcttctctgacaaatatgacatatatccaactcactgtctagattttaaaatttcagctgtttataatccatgtggttccttaagtatactttctgaaagtaattgattttcagccatcagacatattgctggtcaggtccttcagagtttgctattctgctcatcatgacgatctgtaattttcaggctgtatatttggtatcataatacagtagatgttttccatttcttgtttagataagttgtgggctagtttcagcaaatatgggcatctcagagctgtatttgattgcttaatatgccttttgattatcagacattactcacaaaaattataattatgtactccatctgcttgggaaatgtttctgatataccagtgctctgtgtattaccaaatgttctgtgacataatatataaccagggatgggattctgcttctcttggcagagcaacagtgccatccttttgtcctccrggtgtaaataaygawgaggtaactcattaatatgccaagagacccaaagagatactatcatttatcatatcacatactatatattaytaatctttatttaaaatatttttatatgagagggttataatttgagatataatgagtgggttattttaagtgacttatttattataagccaagctgagcccttctggttaaatcatgtgtgatctattgcaatttatgcgatgatacaataaaatttgaatatcagcattttaaaaaactatccttcacaaatttctatttccaaatacttacctgccagaaagcagattaaataaacaaactccaaagtttttgccagctgctgctatttcccatacaatgttgaacaaattcctagcttgtgtaacgctgagctctatggaaatacctacctagctgtggtctaggaccatgcttaaggttaggttcagtgtgtcttgaaaatataattttgtattataccattttttctaattaattcccccataataaggttttcatattagatatattttataattttgaagtaaatgcacgatacaattattgtaacatgtattcactagtaataaaaatgttacatttgaacaaaatcagtttgaagttacaaggatttaggttttataaataaatagtgtggacagattaaaaagattaagggcccatgttcttgccatatcttatatttttcaagtcacaaaacttcaaatattttaatctttaatgttttgagaatgcgttagtcagatgacctgggctaaagtttttggaattttttttaaagcaactttatacctaaagaaaaatttcaaagaataactactagctggctttcttaaaaggaaaaatgtttaccttactcaagatggaagcccaataagctttgtaagtaccacctcagcaatagtttacgtttgagcaataaatgttctcaaataaaatgattcttgaaacttgtttaaacacacaaattctaacacttaactttcagaccatacttcagcacatggctatgctgttattgcatgcacctgcaagaaataaaattcacaatatttatttcaaatgttatcaaattcagatttccacaaggatacaactattcaatattacaatatcataactatttgaaaaaagaaaaagaagtagaaaaatgacccactgtcaaggataataatattttttcactaaaagtggaagagtaaatttatttaaagaacagaagtccttcatattatcctaatgaagaaaaaaagttagatccaataattcctccattgacctttgaataaatcatgcttgccaacactaaaaagcacgtgtaaatttaagggccaaaataccctttgaactggttactttgaaaatcatttactactatttgctaatcagttagcaagactggcagtcaaggatgagggagtgcaaaggtgatttggagaaaatgttgaaactagtttattgtcttaatatgcctgaattatcaattcctcattaaaagcaaaacaaaacaaataaacaagtggtttcgaataacttaataatcaagttaaattaactgttccactttaaactacatgaagtcttcacaaagcctagcctaagtttatactagttcactctatgttcttaccccatgctcaaaattacgacagaacaattaatgattgagatttattgcataaagaaatatgcattccatgataagtttaataactgatcaaaaacagaaaaataataatgtgatggagacagattttcagtgaacactcaaatacatgaagaatgttgttgtttcttaattatgatggcagacttaattaaatatcagtataatctctcctatcttcacctccactagcaattgtgggttaattcacctttgcattctcttctgctagggtctgaatgtttgtgtccccctaaaattcatatgttgacatcctaaccactaaggtgctggtattagaaggtgaatcgttgcgggaggtgatgagttcatggagaaaaarcctgtttaaaagggattaatgctttaaaaaaamaatcctgagggaactcccccattcttccatgtgagaacatagcaatgagactgccatctatgaaccagaaagcaggtcctcatcagacaacagtctacgttgcttgatcttagatggaagtataatctgctggaaagcctcctcaattgtgaaaaataaattgctgttgtatataagctatccagtgtatgatgttttgttatggcagtctgaatggactaaaatattttctaattccttagrctttgttaaatagacttagctctggtgaaaatttactcagtgtcctttttggctagacaaaaaacaacaaccacacacaaaaaacttatcattattattttcatagaagagaaaacgattttttttccaaatgtgacaatacatgcaaaacaaagatcacaaagaagtgaactsaaaaagttatgccaatgtgtttataaatttaccgtttcacaaattgccttccacgactattcccttctctttaccctgtgaggcattaaacaaaaaattgattcccatcttttctatctccccaaaacccacacacaaagcaagttgtctctgttttacaatcacaacaagacttggtgacatttgaaataatyttaaagtactaaaatcattcatattactgagttggttaaaaaggatattattattgatttaaaattgggcatagaaagctgaagaataaaaatataacaaattaataggtcataggtatcaaggtgaatatatatatgtgatatattcatgtttatgtagagagcctctaacctcttattagatttatgtcctattaatatgctttgaaaatttatactaaaattgctagcctaggtataaagtactatcatttttccaaggaatactcaggtcaacaatatgagttgttacatttacttatgcatattgtatcatacaaattcacattttctgtgtgtgtttatcattcatccattaggcaattatttttagaaaataaaaactttattatttattatttttcataccacataaaaatttataatctgccagattttaactgttttatgtatattgagccatttggtcttttgcagaattttctttatttttttattttactttaagtgctgcgatacatgtgtagaacgtgcaggtttgttacataggtatacgtgtgtcatggcggcttgttgagcctatcaacacgtcatctaggttttaagccccgcatgcactagctatatgtcctaatgctctccctcccctcaccctccacccccgactggccccagtgtgtactgttcccctccctgtgtccatgtgttctcattgttcagctcccacttatgagtgagaacatgcagtattcggttttctgttcctgtgttagttgtgttagtytgctgatgatggtggcttccatcttcatccatgtccctgcaaaggacattatctcatacttttttatgacttcatagtattccatggtatatatgtgccacattttctttatccagtctatcactgataggcttttgggttggtttcatgtctttgctgttgtaaatagtgctgcaataaacatacatgtgcatgggctttatttatttatttttttgaggtgaagtttcactcttgttgcctaggctggagtgcaatgacgtgatcttggctcaccacaacctccatttcctgggttcaagcgatgttcctgcctcagcctcctgagtagctgggattagctgggattacaagcatatgccaccacgcctggctaattttgtatttttagtatagacagggtttctccatgttggtcaggctgatctcgaacccctgacctcaggtgatccacctacctcggcctcccaaagtgcagggattaaatgtgtgagccactgcacctagttgtgcatgggtttttatagttgcataatttatattcctttgggtatacacccagtaatgggattgctgggtcaaatgatatttctggttccagatccttgaggcattgccacactgtcttccacaatggttgaactaatttatattcccaccaatagcgtaaaaggattcctatttctccacagcctcaccagcatctattgtttcttgactttataataattgcctttctgactggtgtgagatggtatctcattgtggttttgatttttatttctcyaatgatcagtgatgttgagctttttttcatacrtttgttggccacataaatgtcttcttttgagaagtgtctgttcgtattatgtgcccactttttgatggggttgtttgcttttctcttataaatttgtttaaattccttgtagattctggatattagacctttgtcagatggatagattgcagaaatgttctctcattctgtaggttgcctgttcactctgatgatagtttattttgctgtgcaaaagctctttagtttaattataccctatttgtcaattttggctttggctgcaattgcttttgacattttcgtcatgaagtctttgtccatgccttgttcctgaatggtactgcttagattttcttctagaattgttattttttgaggttttaccatcaagtctttaatccatcttgagttaatctttgtataaagtgtaaggaaggagtccagtttcagttttctgcatatggctaaccagttttcccagcaccatttattagatagggaatcttttccccattcttgatttttcaggtttgtcaaagaacaaatggttgtmgatgtatgatgttatttctgagatttctgttttgtgtcattggtctatatgtctcttttggtagtaayaccatgctgttttggttactatagccttgtagtatagtttgaagtcaggtagcatgatacctacagctttcttctttttgcttaagattgtttttgctatgcaggctcttttttggttacatattaaatttaaagtagatttttctaattctgtgaagaaagtcaatagtagtttatgggaatagcattgaatctataaattaatttgggcagtatggccattttcacaatattgattcttcctatccatgaggatgaaatgtttttccatttgtttatgtactcttagttcattgagcaatggtttgtagttctccttgaagaggtctttaacatcctttgttagctgtgttcctacatagtttattctctttgtagcaattgtgaatggagttcattcatgatttggctctctgcttgtctattattggtgtataggaatgcttgtgatttctgcacattgattttgtacactgagactgctgaatttgcttatcagcttcaggaggttttgggctaagacgatggggtttcctaaacatagaatcatgttgtctacgaacaaagacaacttgacttcctttctttttatttgaataccctttctttctcttgtctgattgccctggccagaactcccaatactatgttgaataggagtgagagacggcatccttgtcttgtgccggttttcaaagggaatgcttccagcttttgcccatttaatatgatattggctatgggtttgtcataaatagctcttattattttgagatatgttccatcaatacctagtttattgagaatttttaacatgaggtgatgttgaatttcattgaaggccatttcccttgcagaattttcaaacagtttcttttcctacagagtggaaaatgtacttgcatccgtagtacgagattaatatgttgtcaaaattacaatcagtatgagtaatgctggtataatcccctctccaaaacaccacttaacatttttgttaaagccaacataagtattttgtgggtggggagggtgactggtttgcaaaatgtttattaatgaaaattaatgtgaaatattcctaatagcaattacccacaaaaatataaaaaatggaaagagaaaaaaattataaatagacatttgtggtggttttaaatgggttatctttcctaggtagttgacagttaactagtttctgaatgttttcwggacatcttatcagatgtataacaagatacctaatagaaatataatttatcttttaaaaagtcttttttgtcaactaatttgataacatttacagagcctatatgctgctactgtgagccaggaactgcactagcagctagagctgcacagatgaaaatgacagggtctgcttactcacagtgaagtggagtcagggcccaggaccatggaaagcttttaagaagagaagatacctgcactgaatctcaatgtgaaggcaaagtggagagaagccagataagcaggaaccagagatgaagtgtcttgtgcatcatgctaaagaatttaaattatattctgagtaaagccatttagtaattttaaatgagaaactgatatgttctggttattgattcataaatgtataatcttttactatattcacgagttattcttttttacctttgtcttcttagagtctagattgtaagaatattatatggcatcaacataataatttcatttctgaggtagggtctttcttccaaatagctgcttttgtttgctggttcattcgcatcaggaatatattcacttctcttatwtttattttattttatttatgctttaaaaattattgtaaactggctttttcttgttttagtgtaaaagtatttactagtaaatttgcctctgaatgcaaatttggaaatatcatctatgtttgcataaacagttgactctggaaaaacaatctgggggttaggggcaccaacccctgcacagttgaaaatctgcctgtaactcttgaatcccccaaaatttaactactgattaagttgactaattaagcctacttgactggaccttaccaataatgtaaacatttgattaacatattttatgaataatatttttattatatgctatattattataataaagtaagctagtgtaaagaaaatgaaaatcataagagagaaaatatatttactacttattgagtggaagttgatcatcacaaaggttttcatacttgtcatcttcacattgagtaggctgaggagtaggaggaggggaaaaggagctgttggtctcgctgtctctggattgacagaggtggaagaaaatccacatgtaagtggacttgtgcagttcagactcatgttgttcaaggtcaactgtgtgtatattttttaccttttcttttaaacatttgtasttgcaaatttgctttgcccytgcacacagagatttgctttggagaaacttgtttttaatatctctatacatatgtgtacgttataaatattcacaaactatcttaagtattagataatctttttagttgatatgtctatttgatcattcgaaatcttgacataaatttttattttgtaaacatagattatacagttccctattttacatatttatatatttattaaatacaaatttaataagctttattggggtgataactaatgtaacacattatttttaacacattatttttctttkgcaaaaagtaaattatctgtctctaaggttacatatgttttaaatcaactgtattcttactacatagttatatgaataaggtcctcaatgtccttatttatttctgctctatttttatttaagaaataataaagttgcatgaaattctacaagaatgaagatatttctctgaaaaatagttacgagaattgtaagctttattaatattgaggatttaaaatcctattaatatatacttatttactcatttattttttggccttgatttttaccatgcctgctatacatttgccaactctatttttttcttttatttacatttctgctatatatttscccttgtycttttatcttcacttctctatattaccgtattttacaygtattatttaaatgccatcagctgaggtcaatggataaatactatgtgacctattgttgatattatgaattaagacactttttatacatattattatatagtatgatcattgtagtatgaataaagaggactttatatttactctctacataagaatctggaaaggtcaatygattcatttttctttataaaatataattaaaaccataatatattatggtagtctttccattatgttcacagtgtccaaaacacaaaatgttaccactataaagaagaaaaaataataataaaactctttctacaagttagggttctttatttctaaaattaatttttatcttgtttaaagaaaacgtcacatcaatatttgacctgtgaatttagtatcaagcctccactttctttttctcttttctacacatttccttttcttctctcattcagaatttgattattttttccctttctcataaaaaatatttacacttagagaatgacaatcaacattgctattatcattatatttgtggactttcagacaccatgaggcatgaaaagaaacattggtggcagcattattctttctttgtatctctgaattcatacaaaatatatattgatccccttcacaataagtacattgagttagaagcctgcattttggttgaggttacaattctaagaaacttacattgtttgagcattatgactgttctacaatataattatgttttaattaatcaattgtaaagcaaatacattgcctaccataaaggtctttatcctctcaaattttaaataagttaaaatttgctaatcaagtttaatccttgtttataatgtgccagccctaaattttttattatgatgttccagccacttaagttacatggtttttaatcatgaatattgctgaygttgataataatgtgaaaattgacttgtgactagattttgtcttcttagtaataaacaagccaatatgaaataagaagacaaagaaagagaggcrgactaagaaaagaaggagaggaaagaggaaaacgtttaattttgattttgatttacttcaaactcaatattttatttactcattacggtgtattcactttctctggatttcattaggaaataattaaatgtttcatattttattgtctcaatcaatgccccctatttctaaagcagatttagatttatagagcatttgtgaactaaaaagcatttcaaaatactaaattgtatagacatttgataagacacataggaaaaaatgtaaatktatgtaaatcagtgattttggtattattccatgaataaaaaaggaaaatcagatctaggactctttctataaggattaaaattcatggtctaaattttaaattaccaaaaatttatttatcaagaaaaattttttctggaatttagagtttttattttatataagtaagatttaaaacaacattttgttattttttaaaagaccataaaaatggataatttggtatgatatttaacatctttcttccacatctaatcttttttgaccctttatagaagttctattattcaccaaaaaattgtgattatagtgactgayctttttaaaagccatttttacatgaaagtgaaacactttatgtaaactttcaaatatttttccaatgtccaagcattgtgaacatttcaaacctaaatatatcctaaattacaagggatattgtaatgtctgcaaaaaggtttaaatatttttatttttgtactagcttaaaattagtcactaaattttctcctccaaagtaatatcttacaaagtttaattaatttcaaagatttctaactgaaaagtatatattaaaagagttgccagyccctattttcagtatacatgaaattacttaaaattttttgttagtttaatgactgtagcttagcattctaaaagtttaaaaagaaaaccacagttatatatattgcttattatgcctttataccaggaacaaaaatatgtgtcttaaaacattgtaatttaatagtttttactgttcacaatctgtattttttaacaatacacttccaaataaatcagaatttcaaagttcttgaagtatatagaccattagtggttcactgcctcacgctattcctacctacacacccctttctcctaacacatgcatatactttgcaaactacttgaaagcaggaattatctgaatcatctttctattttacaacacaattaataaactgctttcaaggtaagtggctgaaacaatgacttaatgttgtttcccattaaaatgtattggccagggatggtggytcatgactattcccagcactttgggaggctgaggcaggtggatcacctgaggtcaggaggtcgagaccagcctggccaaccaacatggtgaaaccccatctctaccaaaagtacaaaaattagccaaacatggtggtgcacgcgcctgtaatcccagctactcgggagtctgaggagggagaatctcttgaacccaggaggcagaggttgcggtgagccaagatggcgccattgcactccagcctgggtggcaagagtgaactctgtctcaaaaaaaaataaataaataaaataaaacattgtattataataagggtaaaatctatgtggaatgataattaaaaagttatccttatgcattaataaatacagtatgacctttgtatttgcgggttacacatccatggatttaaccaaccacgagtcaaaaacatttgataaataaatacatctatactaaacatatacagacctttttttcttatcattattccytaaacaatataatataataaacatttacacagcactttcattatattaggtatgaattatctagggatgtgcatggcttatgtgaaaatgttatgctattttacattagggacttgagyatgagaggattttggtatccctgagaggtcstagaaccaactccccacaaatactaaggatgactgtagtcatatataattttcatcagaaataattatctgttatataactatatatgtaaatgagaccattaaatgaaatttgtgttattttaaagtgggtcaagaaaagagcataatatctacatatcctcttgaaaactaaagaaatatatgtaatgtaattatacataatacaatatataaactcattttccattttatatgttatacgttatataaattatatatacattatttgcattttcacataatctgtaaagattttattaaaatctcttttcaggcaaagcgagctaataacaaataataaagaataaataaagaaaataatgctgtactgtgtagttagagaaaatggcttttgtattcgaaattatttttcagttaatgaaacagataaaaattttgattaatacaacttattccatattttacaggaaatattgatgaarcagaatgggagtggaaagcaggattccatcgctggaacaattacatgatggactggaaaaatcaatttaacgattacactagcaagaaagaaagttgtgtgggtctctaattaatagatttaccctttatagaacatattttcctttagatcaaggcaaaaatatcaggagcttttttacacacctactaaaaaagttattatgtagctgaaacaaaaatgccagaaggataatattgattcctcacatctttaacttagtattttacctagcatttcaaaacccaaatggctagaacrtgtttaattaaatttcmcaatataaagttctacagttaattatgtgcatattaaaacaatggcctggttcaatttctttctttccttaataaatttaagttttttccccccaaaattatcagtgctctgcttttagtcacgtgtattttcattaccactcgtaaaaaggtatcttttttaaatgaattaaatattgaaacactgtacaccatagtttacaatattatgtttcctaattaaaataagaattgaatgtcaatatgagatattaaaataagcacagaaaatcattggtctctttgttttttatataaaggcaagaaagaatcttaaaatgagaggctcagccactttaaaacaccttataatagaaacagaatgctgctaccaagaaacaaaatataaaataatgtaattatttatgtaatgccttcaaattatattcttcatttgactcttgctctccctcacctcctctatcctcaaatcaccacaaacatgtacatatgtgaactacctttccgtaattcaaaaatttttaaaaagtggatgcatagaagtctaaagttaggttgtgtaccatctgggacagggcaacccttgcctggacccagaaatattaacatattaataggaaaattgttcaattccagaagagaaatggttgtactttctgtagacaaactgtcttatttttgcaattaaaaaaattacagagctgcatttattagcatgcttggcaagggagcacatgccattgaataaattcactgagtagtttactaaaggagagaagtcagagtattttaagttccaaaacaagggagtgtatattgtttatgctaattaagcattgaaaatttgccttcaggataggacaaattgaatgtataggtctgtgtactgatggttaaagcatgccctattgtttctttgtttttttgttttgttttgttttgttttgtttttttgagacggagtctccctctgtcgcccaggctggagtgcaatggtacaatctcagctcactgcaacttctgcctcccaggttcaagcaattctcctgcctcagcctcccaaatagctgggattacaggtgtgtgccaccacgccaggctaatttttgtatttttagtagagaaggtgtttcaccatgttggccatggtggtctcaaactcctgacctcaagttatccaccggccttgacctcccaaagtgctgggattacaggcatgagccactgtgcctggctgcaagccccattgtttattggtcaaaaagtgtctatagttagatacagtatgggtctgccatcttcactcagtcactcaaagttcatggtaccctagatacagttataataagagccaagtcagtgtttatattacttatgagttattgtaaataaagataaagatatttgctttatagcttctccctcattctgagaaaaaacaaccacacacaggatagatgggttattatactcaccatctttgtttcaggtgtcattctttccggattccactatgtttttctcaatcacttaagtctccttttgatgtagaatactctgatatataaaacaggatgacacctgttcaacaccattaaagatgctttaaaaatatacttgttaagattaatcattaggaaaacaacaaatgttcatagaacatctgtaaactgcttgatatgacaagtcctagtcataggaaaagatcctgtgaactactttgtcccatcttggacaaccaattggtgtgctcttgaattatatctagacattccttgacttattgtaatgcatttagccaaatgcaacaagaagtgttagccagcacataaacctctgcctgtttgttctataaaaatctaacatgaatctacttttcccagcactgttgcagaaatctaggttaagattataacaacaacaacaacaaacccacaaaaaagttgcctaacagaatctatgtgaatttctttactgatatcaccacgtaaaggtcagtttagagggaggattctaatacagggactcccaagtgatggtagaaacatggaagtcagtatctttggcttctccttggtacttcagtgggcacatagacggcaagaagtttggtgaatttaaacattaacagtgtgtaagtattaaaacaccaaatggaataaaacccttcctacagggcagactgtggtgagatgttatcttagcataaacacacaaagccacaggcatttgtattcgatacaaagccacaggggctattacctaattttggtaaactttttaggtatatttctccaaagtgtgagagaaaattagctctaagtttagaaaagaacaagtgtagtaagtccaaccagtatcagggcatttagcccaatcggttttttaagtactggaaagtaattattctttatcatttggtatttatgtagtattataagattaacataacaagtcacattccttaaaaaaattacagctttggtatttatgtagtattataagattaasataacaagtcacattccttaaaaaaattacagctagttgtgtttttccagaaattggctgctgaatattattagcatgcagagcatattagtccattcttgcactactataaagaaatatgtaagactgggtaatttataaagaaaagaggtttaattggctcacagttccacaagctgtacaggaagaatgatggcttctggaaaggatgcagaaaattttcagtcatggtgcaaagtgaaggggaagcaggcacgtcctacatggatggagcaggaggaagagagaacaaggggcaagtgccacacatttttaaataaccagattttgtgtgaactcactcactatacagtaccaagggggatgttactaaatcagttacaagaacttcactcccatgatccagtcacctcccaccaggcctcacttccaacactggggattacaatttcacatgagatttgggtgggcacacagatccaaacaatattgaagagaataatttttaaaattaaggtaattaatttctggccaatacaaaactaaatttcatagataaattttaacataattttaattatgacatttatgaataatattctaataaatagaactttcctgacattgctgaagaggggtgaaaaactcgatacttagtacaatttcttgttgcagctgtagtcatactggattcaatattctctataatgtaaacagtgtgttttaaaatgagacgatcaagaaaaaaatagggtttattttttgactaaacatacttaatgtaaatgtaaatctgaagcactatttatcaacaccatcttggtgataccttcggactgtaaaagaataaagctaggacaccagttttataaatgtatacatgcatatgtacatgtatacttacataagtttatacatacaggagcctgctgatgtccaacataagattacagtgatgaaaatttcattttatttttaaggagccattcaataaatgtctccacaagtaggaaaaaagaaggatattttgaatcctaggaaaggacagtctgtggtgatcttatggaggtcatctaattaagtattaaaaagtaatataaaataatataaaatatttatatacatacataattttaaaattaaaatatataatataacatatattagggccagttgtcatttttgattggtcattttcaactgcagctgtaactggaaaacatttctatttataaattaattgaataaaaattatattacattgtcagtaattgagtaaaaaatattatcaacaaaaataggaaggcattactgttttaatggaggaagaaataataaaaatatctatatagccacactgaaatttaatagtatatccaaaagtaaacaatatctgtaattcagaattttttgaaaagtgagagagtgagtgagaaattttcctctacagttagccattagtccccagattcaatgaggttaayttatcttgacctgtctttcatctggttaaaaatcacgccattagagtttgcagtagaaagaggaggcagagcaagatggcagaacagaagctactacaggatagtcccccgcccccacaaagacaccaatttaacaaccgtctacacaacaaaagcaagttcatgagaaccaaaaatgaggtgagttctcacagtacctggcgttagttttgtataactaataaagactctgaagaagtagaaaaaacagtcttgaatggagacaccacccctcccccactccttagcagctgtgatgtggtgtggggaacatttctgtgcactgcgggagggagagtgtagcaattgtgaggcattgaactcagtgctgttctgttatagcagaaaggaaaagcagttaaaatatatctgatgcctgtccacagagggagcaaacaagccctagccagaggagacttgctgattccaatagtcagaatttgagttcctgcaagcctcaccatcacaagctaaagagctctcatgcctcaaataaacttgaaaggcagtttaggccacaagaactgcaactcctaggaaagttctagtactgaactgggtcaagagacagtgaacttggttgcttgggggttgggagagcagctaaaggagagctagcaagctagcatcacctctcccctaacctcaggctgcacagtttatagctccaaaagataccctctccttctgcttaaggagaggagaggcaagaatagggaggactttgtctttcatcttgaataccagctcagtcacagcaggatagggcataggtcagagtcataaggctgcctttccagggcctatcttctggacaacagttccagacacaccctgggccagaagagaacctgctgccttgaagggaaggaccaagtcctggtggtatacatcacctgataactgaaaagtccttgggcactgaataaccagcagcaatacccaggtactatgtcgagggccttgggtgagactctgagacttgctggcttcaaatgagactcagcacattcccagttgtggtggctatggagagagcctacttatgtttgagaaaagcataggtaaacgtaaaggggatttttgtcttgcaccttaggtaccagctcagccacgggggaataaagcaccaagaaggctcttggagtacctgattctaagccttggctctcagatggtgatgctggacctgccttctgttagaggggagcctactgccctaaaaagtgaatgctagatgaggcggaactcagcacaagctgactgaagaacactttgggccttaaaggaacatcagcaatagtccccatagtcctatggtggcaatggccacaggttcaggctcctctgcctcgtaaattgaaggaagaagtgaaaataaactctctcttgtggtttgagtgcaagctcatccacaatacagtagaacaagtggtcaagttctaaggtttttgactctagtccttgtctcctgaacaactcctctggacttgcccagggcccgggaaagcttgccactctaaaaggaaaaacacagacctgaatagttcttgtggaggtccagggccttgagtgaacataggcagttgccagggagtgattacagcaggccttgggtaagatccagtagtgtgcgggattcaggtttgacccagtgctgtcatagtggtggtggccacaggggtgtgtcactccacccctagcatcagggtctcagaacagagaggaaaaattctgtttgtttgggagaaagtaaggaaagagaatgtgacgcttttcctggtaatccagatattcctccaggatcttgtccaagaccattaatgtggtatgctatgggtctataagaaccacaatgttgctgagcttggggtgcactctaaagcaaatacagcttagatcacaccacctgagtaatttcaaatatctggaaaggcttctcatgacaaacaggtacaaataagcctagactgcaaagattacaataaatattcaagtcttcagtgcagacacaattgaacatctcaagtatcaaaataatccaggacaacatgacatcaccaaatgagttaaatgaggcagcaggaactactcccaaagaaacagagatatgtgacatttcagacagagaattcaaaatagctttgttgaagaaactcaaagaaattcaagataatacggagaaggaactcagaattctatcagataaatttaacaaggagattgaaatgattaaaaag

SEQ ID NO: 93206 - DNA, 48463 bp, Homo sapiens
ccatgttggttaggctggtctggaactcccaacctcaggtaatccgcccacctcggcctcccaaactgctgggattacaggcgtgagccaccgcgcccgtccggtcccacgcaattttgtatttttatccaccaaatctggcagtcccagctatgaacacaagctccaaatgcctttccacccatggaccctcagacagaaccaaggccaccgcagcctggagcagctgccgcccccacccttcccagcgcgttcccttaacccccttgcgttccagctcccccggctccagcaccttcgtgacctgagcaccggcgggctcctgctcactgtccagcacccgacgcacctgtccccgccgcgcagtcccttccccccggcctgagcttccctcccggcgcgcactgcccttgtgaccctttccctccccggccacagatgcagctctcggccagaagctccacttccccgaggccctcgcccctgccaggcagctcccctgcggcgtcgcccacccagagttctccccctggacgctccctcagtgcccccctagcagccccggcggtcttctccccaccttcagccccctccccggtcccccaggaaggggccagactccagctcagcacccagcgcttcctggtctttcccttctgggcgccctcccgacagttccctttagggaagttggcccgctgcgcgctcccacccccggccgccgcctggacagaggcgcgcaatccggagggcgcaggctccggcccggagaagggggtgccgccggcgttccgatttctcaggaatggggaaacagaggcacggtggatccggcggcggggctgggtctggggctggacgttgacctaggaccccgcccctgcccgccctgcgccgcgcccctcccgggccggccttgaccgagcagctccacgcgggcccggggctcgtccacccgacaggagcggggggctgcagcccacgagcccacgagcccgcagcgacgcacccggagtgtaacctcgcagagtcacggagacactttcccggtgtgggcgcctcgccgcgcttcctccccgcgggctgcggccaccccagggcaggacagagccgagatgcccgggtgggagcgatgcccgcgtgggggcgatgcaacgggggagatgcctggggggagggtggtaaggtgaaacctggtggagaacaatgggggtgggtgggcgattcctggggaggtgcccggtggggggtgtttctggttcgcccggggacagtgcgcgtcccctcgcccgcggcgcccgccctgcccgtcccaccgaggtcccccgggagcgtctgggcccacggcttcggggggtttctccgagacctgggcgctgttctgggggagcaggggcccgggccaccaaggttcgtgcggaccgtggggtgtcccacgcccaggcygggggatcccagagccccgcttccctcaagggcgccgcgccccggactgcaggtggagacggggaccggccccgcggggtcgccgacaggcgcggggcgggacagggtgggaggcggcggggcgcagagtcctccggtcgccggcgcgatccgggcaccttcctggaggcggcgggagcgcggtcgcggcgcctccggggtggggtccaggttggaggctccggggcgcaccgccctagccccaccccggccgggtccccgcgctgcctctgcggagagggaggaaggaaggaaggcagggagggaggggacggccggcaggcgtggggtccgcggcgtcagggctccttcctcccgtccgctccatcctgcaacccgtagcccgggcggggtctcgctgccccctccccgaacacagccgccttttcctccctccccaaccccgagcgcctcccttcccgaatgcgggagtccatagtgcacgggaagcctcttcccctccccaccgaggctgcccgacgccccttccaccctccgaccccccgcaaccatccctcaaatgccccggcggccagcagggctggggtgggcgcaggagaaccaggggtcctgcccgcatgcaggggtttggggtcggtgtggccgaatgaacgcgcgggttcagacgagcctgtgatgcccccgctttccatctcctcgcgacctggccccagaagacagtctgagaggccggtggccgcggatcctggacgcgcttccctcctgcctgtggtttccctttattcsggcagcgctgtgagtccacccttcacttataggagccacatccagaaccttctcctggggccacagcgtgggcttccgatacctgtgtgaccccagctctgccccttcagggctgcgtggtgaagccctcaggaccctccgcgtgggttgggcgggtgacgtggatgagggacaacgtggtgaggtccccgtcgtggcgaagagtgaccagtaggtgcccagggcccaaccctcctctgcacccgagagaaaccatctcctctgcagcagcccccacctggacgctctggagtcctccccacctccctccccagtggggcgcacagcattcttgctaccctgaaaggcagatgggaggcacagggtggcagaggggggccaggtctgagattccagatggaagggaccatggggctccaccccaccaccactgtaggcaggggactggcaggtgtacacccttactcccgcggggcccagggacacagccaccctcctttgaggccctggccctcaggaccctgccacagcgaggtctgtgcctccccagtgaccagtggtcaccgggctcggggtcacccagctgcttccacatgtgacaccatcagctccatgccctacccccaagctgggctcataatcttaattcacagctaagaaactcaaccaaagtcacatcacatgagggcgaaccctccagggccacagtgctccaagcacggagggctccctgccttcggaagatgctgtgggtccacctgcagcctcagtggacagaggaccagggcaccagctgctcttctgcctcagtgcagagcatccctgactcgcactgccctgtacaggtggggctcacagtctgtgcatggaactcagataaaacacctggccctgggatgtcacactttggttcagatgaatgaaaaaataagatactgacactctggatgactaagaatcgacttatgtctttcctgtgatgggaaactgtcccatgaaaagccacttacatgtttggatggtcctgtagaaaatattttttcttctccttatcgcactctctatgatgcataagaatgcaatttaagacaaacagcaaataaataccatctgtgtatgtaccaagcacttgcagactgaaaaaaaaaaaagaaaaagaaaaaataagatattgtatcttgggcacacagaaagtgcccatcaaagattaaatgaatggactgcagctggtggaggcatggggtactggcttgccgaaacagtcccagttgatgctgggtcctggccccatgatgtctagtgtgcccttccatgctccagggtgccccatttgggcacttagtccaagggccacccgacatacaaaacagtatcttcctgtgaggggccagagaataggccgcacctggctgccctgcacaatttggaaggcactaggagggacctgtcaacctgcactcactcactcaccggcagtcccctttgggaagagctgttgctctttggccccaggaatcttctatttctgcacgagtgccaggcaattgtggggccccattaacctactccacaaagcgtagggggccttgctctcggcactgggcatgctccctcagcacatacaacaaagaagtcccccctcccactgattctagcaggaggctgttggggggcagtcatgacacaggcatatacagtgtgtcagatgtgtcagagcccggagaggggatgaggagagcgcagtgttacttcctagagcatggccccggagagcctcccactatgctgacatatgggcagccgtctgggagcttgacactggcagaggggaagagcagtccaggcagacaagaagtcagtgcgaagaccccaaagcaagcatcaaggaggctgggggctgctgcagatctgatgaggggatggcaggggcagagcaggcctgagaacactggcctccactctgaatgaaacagggatccccaggccgggcacggtggctcatgcctgtaatcccagcactttgggaggccaaggcgggcggatcacaagatcaggagatcgagaccatcctggtcaacatggtgaaaccccatctctactaaaaatacataaattagctgggcgtggtggcgagcgcctgtagtctcagctactctggaggctgaggcaggagaatcgcttgaacccgggaggcggaggttgcagtgagccgagatcacgctaccgcactccagcctggggacagagcgagactctgtctcagaaagaaaaaaaaaagaaaaagaaagaaacagggagccctttttgggtgtcagtgcctggtctcaactccatagctatggtggaaggtaaagcagtttaccttttaactacatgaacaagcatggtggtgttccagttgaactccttaggaaaccgacattttaatttaatttttttttggagacggagtcttgctctgtcacccagactggagtgcagtggcgcgatctcggctcactgcaacctctgcctcccgggttcaagcgattcttctgcctcagtctcccgagtatctgggattacaggagcccaccaccacgtctggctaattttttattttttttcagtagagacggggtttctccatgttggccaggctggtctcgaactcctgatctcaggtgatccacccgcctcggcctcccaaagtgcagggattacaggcgtgagccaccgtgcccggccgatatttgaatgtcatatacttttcatatatgctaaaatactgttttaattctcccccaacctcttaaaaacgagaaaagcattcttagctcaggcaccatagaaaacccggctgcaggctggacgtggactttggaacagtcggcgtgcgggtgaaggggcacagccgcggggcaggggcgggctccgggcagaggcggccgtgataactccacgctcccgctccagccggtgaccgccacgcgggctcctctcactctcacactcaggccgagaaaatgccgaaagccgtgtcaccaacgggggacctcggggccacattcagcatgcagagtttatttggtctgctcaaacatttgtgttaggaaataacacattaaaagtgcacatttccttcagaccctgagaagcgggcgagtcccgtgcgctccgcaccgccagccccggccccgcgctcgcccagagggccgccctcctcccgccgacccggcttggggcttaggcgttaatcccgtcccccgggggggccgcgcggggagccccgatcgccttagggtcaacggcttaggtcccagcccacgaggcctgaccgcaccgcactgagcggcctctgcgccaggtaagggggttcggggcgggaccgggaaccgcgctgctagccgtcccggaaacccgcggtgggccgttgggtgcgcgccgagccgctgccaactgccaagccacgggacgaaaccaaggcgcccgcgccccgcccagccagagcgcctaagcccttcccgtcgcccgccagcgccggagcgcccactgcgcctgcgtagtttgccctcctggacccgggggcggagccgaagcgcgcattgcgcctgcgtcttccgcccgaccccgccccagcggccgggcctccggcgctccgtcctcccgcccggccagggacgaggcggggcgggtacgcggacactgcgcctgcgagagtaggccccgcccccgatcggccccgcccccggccagccccgccccgcgccgcgcggggccctgggaggggcgcagcgtccggcggcgtcgcgggcggcgggcggcggggccgcgggaggggcgcgggggcagacaaagccgcggtaatgaatggagcgtccgcccgcgccgccgtcgtccgcagccggccgggagccgccccagaggccgggccgaggtgagtgcgcgggcgccgccgccccgccgcctgccgcgagccccgtcccccgcggaccgcgccggggccgggccgggccgcgccattgtctgcgccgcgccggggccagggccggggccaggcgggcgggggcgcggttccgtggcctcggggtccccgcccggcgccgccccggacccgcccccgcgcggaccccggccctgacagctggcgcgggggcggcgccgactgagcggccgagtgccgggggtcggcgcccggcctggcccacgtgcccgcgccgttgcttccgggcggacgggacggggctcgggctcggggcgccgcccgggtccgccgggagcgcgctgtcccggccacgtcgagttaaccccgcgagccccgtccctgggacttctctggacgtgtcattcccgtcccacctccaggaagggccacctgggccctgcttcatgtctcagcccagacgggtccttgcgacgcgccccgaggcaggttattgtacgtggttctggggatgaccgttcacatttaatgaataaaaatgtaacttgccttgcgaaccataatttcaaatgtttttcgactgcagtggttttcctacacccaaatgagctcgcagtcagttttgtttcttcttttgtcccgttgtgtggcccacaccgccttcgttgctaagagaatcgcagcccctcgggctcccttctgcgcctttctattccgggtggccctggtagacccgggcacctctrtggaaacacgtcccggccaagctgagccgtcagaagcttctgttggtgttctcgtgttggtcgaaagggaagttatttattttgaagttaactctgatcagattacgtttttagaaatccattcagacctcatagtgaggccagtttggtaaagcaagggcatcctgcgactttttacacagaaatgttttttattttttctgtgtatgtcattcatagtgacaaaattgaggctaggaaggatttggttgggatttttttttaagtgctatgaataagccacattttgattatgaattaattgcaattactaaacaaagttactttgcaagaggaaagtttacaggagtttgattccatactccgagggtttccaatgggacgtccgtacaaggctgcacacttcccgtagtccttaaacggattatatctgcttgtcatgattggctttttttcaagaaaagatctagcacaagttaagagagattctgtgaatcttgaaaaagcttcagaggcccggtctttgaggtgaggacacagttaatctatatggaaagaaacctaagacttttagtccacttgacaggtggttacagggtctcccccaacacacactcttgtccaggtaattcctgaataaggtggttgatgttgttggatgtaaaacctctgctctttaaggttacctcctccccaaccccctccacacacacagtgagtaactcagctgtgcaaagtatgyccataacaccttgcagaaagactaaaaaaattactaggggagcggactgacttctgtgtgtgtgcagaggagctgagaagcagcttctttagcgaaaggtgtgtgtgtgtgtgtgtctcagatccttggtgaggagccctggggagtggactcctggcggcatgaggagcaggaagtgaccgtggtcagtgccgtccttcactttgttttgcgtttttttctttgcctggctttagcttctggtctcattctctttggtgtggtggttgtcttttgagaggagggagcaggtgaaacagctgggcgtggctttgcccagccctggggtagaggccaagctggcccttccttaccaacgttgtttccttcactgtttaaatctcaggacctgagaatgtacctataggaattgctcttatttacatttggctgtgtaagaaagtcactgtgcctttagcccgtgacaccccttagcggtttggttttggctttctcttttagtgtctgtggattccagcagctctctggcttcagccctttcaaggrttcgggcctctctgcatcccagccttccaggcccttctgctccccactttttagcacctaggtttttctacattctgcagtacctcagatcccttccttggtcatcactggatatgtgcttttgtagttcaaattctgggaggcattgttaggaataaaataagctctttgccatttctgaggcggaggggagcaggagagacagaggtgcttgcctctctgcctgctggggccatggtggttttcaaagaaggccctggccgtagggaacatggtggtggtgaggagcagcgtaaaccagagaaraaggctcagtaagtgcttcaaggagaaacaccggcaggtgagagcaggggtaatcccagtttctcaggaaagcatgctccggagacctcatagggagaggaggttgccctgaagggtctgggggcgatggcggaagccccaggagagcattgtccatgaggtgcagaggcagcctcacggcatcccagtgcgtacctcctgcccggcccaagcgcctgctgctgaagccgcctcccagctcccccgggttgtttcggaattcaggggacatgcagcctaaatgacccacactggaatcctggccggcttcccacccctcgttctaggtgaaggccgcgctggaatcccggccggcttcccacccctcgttctaggtgaaggccgaactggaatcccggccggcttcccacccctcgttctaggtgaaggccgcgctgcaatgccagccagcttcccacctcattctaggtgaaggcttttcagcagccatggcccatgtctttcccagcaaactctgtgtgcaatagaaacagctgatgctggcctggccctggggatggggttgtgactgctgcagccccctacctgattagggtcgggaggacctggccccccgcccttcctgccttgccacctccacagacaaaccctgaggggctgacttcctccaaagctgctcctcatcgaggcccacctggtggtctctgctccacctgtttgctgcagggagcagggtcgggagcatgtrcatttcggagagctctggttgctccgtcatagaagccatgctccacatcctgtaagtgagagactccccagcagcgttcagccatagctgcgatgtcaggcctgtcactagtgggactgcccggacccccaaggtatgggtacacggcgagggtgctggtgttaaatacaggggacccacaaaaccacctagcagaacaatccacatgaccctgtcgtgtgacccagaacatttcagggatggaacacggaccagctgaccttagcgtggtcgctggcttgctctggaaggtgccgtttccaagacgcccttacctgggttcctgagcacgtctgacagagcagctctgactccgggtttctggagtcagaccccttgccactgtctttgacctttagctttgggttccccttctcagtttgtttgtttgtttgtttattctcactctgtcactcaggctggagtgcagtgttacaatctcggctcactgcaacctctgtctcctggattcaagtgattctsctgccttagctccctgagtagctggaattacaggcacccgccaccgcactcagctaatttttgtttgttttttgagatggaatcttgctctgtcacccaggctggagtgcaatggcacaatctcagstccctgcaacctctacctcccaggttaaagcgattctccttcctcagtctcctgagtagctgggattacaataggcgtgcgccaccgtgcccggttaatttttttttgcatttttagtagagacggggtttcaccatgttggccagggtggtctcgatctcctgatctcgtgatccgtccaccttggcctcccaaagtgccaggacaggactacaggcgtgagccacygcgcccagccagtttttgtatttttagtagagatgggstgtcaccatgttggccaggctggtctcaaactcctgaccttaggtgatccacccgcctttgcctcccaaagggctgggattacaggcgtgagccaccgtgcccggcccccttctcagtttagcccagacctggatgttggcttctgtgtgggcagctgttgtgagccatggctcctgctggaatttgtggcagttgatgctgctgtgcacccccagaataggtgaaggctactcaggtgtagccccgatggtagtttatgtcctcaggaggagaaactgccatgtccccgtctgaaccaggcccggagtcttgatgcatagctctttgcctccctgggtatacycgacagcttgttgagagtgcgtgtgctctgagttgaacacraatatatttctgttgtttgaaggttattataaagtttctaacttacagagttggcactcctacgtcccttgcccccagctggagctaccgtgactgccaccagctgccacctggcacgtgctgaactgtcttgaaggaaactgcagatatctggacacttctctaagtgttctttctcctaagaaagggaaagggacattctactgtctaatgacagtcgcgtcatcgatggcgtctacaaaacgtgactgtgtcccttggcgtcatccagtagccagtccacggtctgaagttgtcccccaacgtctttactagctgtttttcccaaccagaatcgagtacagggccacgtgtcacagtggctgtgaggtctctttgcgttccggtgcccccggagcaccccctgtgatctggcggtgggaggcctgatttgatacaggggcacgtttggggcgcaggtgatgctgtgtgctgcactgtgggcggaggctgtcccatgaggacggatgcgactttgctcactggccctttaaattgtgtccctgccccccacagttggcgagttagatgagggggtgtctcggggtgtgtggacgctctgctcccatcagacctccacatgctgtttgctggtctccccagaacctgtgggcagyggcaccttggctttagtatgctgttgttctttttttctttatttttgtctgtgtttcccttctttgttacstcttagaaaatgctgagttctttctctttattaccaattcttagcggaagatggtctagtagacacctctgtgggggcaaatttttacttttcctttgtcttccttgagtatcaaggtggactagtggattttatttattccatgtcataatctagtaaagccttttgttttgtgatgctcaaatagctataaatgtgactagttgggagccccttccaagctggcccctgtgtccttttcactccrtacgtggtcctgggaatgcatcctttctggcccagygtcccaggctcacggtgatgtctttcccaggcctgcgtcagctgcttctccagagcgcctgggttccttttagtgcagaaaggcatctggacaccgaggtccaggccatagacgtagtcattgtgcttgtctgttattgcttaatgccctcttcgcggacacagctagaaaatatgtatttaaaacattgtgagttcagtcaatttgaattatagttaaaattaattttaattttcattaaaattatgtagttttgcggggtgtggtggctcacacctgtaatctcagcactttgggaggctgaggtggggagaccacttgagctcaggagttccagaccagtctaggcagcgtggcagaaccccatctttacaaaaacatacagaaatcagctgggcatgatggtatgtgcctggagttccagctactcaggaggctgagatgggaggatcacttgagctcaggagttccagaccagtctaggcagcatggcagaaccccatctttacaaaaacatacagaaatcagccgggcatgatggtatgtgcctggagttccagctactcaggaggctgaggtgggaggatcacttgagctcaggagttccagaccagtctaggcagcatggcagaaccccatctttacaaaaacatacagaaatcagccgggcatgatggtatgtacctggagttccagctactcaggaggctgaggtgggaggatcacttgagcctgggaggttgaggctgtggtaagctgcaatgacgtcactgcactgctgcctgggcgacagagtgagaccctgtatcaaaaacaaaacaaaacaaaacaaaaaatacatatatatagttttacttaatttctttgattcttaaattatatgttattctgaaaaatcttaataatatcattggccttgttttgtgctaaaatgtgcatacagtaggttgtagaattacaataccactcctgtaagaaaactgcttagttaactttgcaggtttttgttgagttctttttgtccttagttatcttccactttggatgaataaagtgctgtattttaaagttccttgacaaatactcttgttttattttttattttatttatttttcccaagaaagaaataagacaaatattattttctctggttatgttgcccatttgtttcagatcatttttagatttaggattttttacaaattttatgtacaaaataattacctgttataaaggtcagaactacataaaagctacctttcttatccccaccactcttctaagcaacctttttttttttttttttgagacagagtcttgctctgttgcccaggctggagtgcagtggctcgatcttggctcactgcatcctcggccttccgggttcaagcaattctcctgcctcagcctcccgagtagctgggactacaggcgcccaccaccacgcccagctaattttttgtactttagtagagatggggtttcactatgttgcccaggctggtctcgatctgagctcaggcattccacccacctcggcctcccaaagtgctgggataatgggcatgagccaccatgcccggcctaggcaacgctttttacttctgctacgtcctgtaaaagtaagcaaaacacacccacaactcatttcccctcctgtctttcacaaaagttagcatgggctgttgacactgtgtgtgtctggtttttcttgtttgtttgttatgagatggagtctcgctctggattcaagygattcttgtgcctcagcctcctgagtagctgggactacaggcacccgccaccacgcccagctaatttttatatttttagtagagatggggtttcactgtgttggccaggctggcctcaaactcttggctgcaaatgatctgcctgcctcagtctctcaaagtggtgggattacagatgtgagccaccacacctgacctgtttgttttgagatagcgtctggctctgttgcccaggctggagtgcagtggcctgatcttggcttaccgcagcctcgacctcacgggctcaagtgattttctcactgtaccctcctgagtagctgggactacaggcgcatgccaccatgccagctgatttttttcaaattttttgtagagatgggagtctcactatgttacccaggctggtcttgaactcttgggctcaaacgatttacctgccttggcctcccaaagtgctgggattacaggcgtgagctgccgtggctggcccctgcgtgtctggtttttctgctcagcacatgtatgaatgtgtgggtcctattgacgggctctgatcctttgccgtgggatgccgctgtgactgacgttgccgtgtgttgcattttttgtgtttctggtgaggactgtcttcaggtctgttcgtagcgtgtggttgctgggtgggaggatacatgtaattttggtgagtgcttccaagttcccccgcacaggcctgcaccctgtcagcactgtgggagagggcctgaccaacagagggcattactaagcatttggatttttgccaggatggtagggtgagaaggggtatcttgaacgggttttcatttaatttgcttcaatctgaatgtgaaaaatgaaaaaactgtgctttactgaattggatgtagcacggagcagttgagatcattgaatgcaagtggctcattttgttagtaagtccccgagggcggttggccctgtgcgtggaacctatacgsagcggccccaacgcttctgccgcaaagtcgcttggaaggtggtttctctgtctttcttattttttgtgcggcggaggccttacttttttgctgagactggaattgatctcctgtgctcaagtctctcaccgtggcctgcaagtagctgggactacgggcgtaagccactgcgcccagcctagtgtagctttataagtgtgtttttaaaccttttttattttaaagtgtggcacagatacagaaactgaataaaatcagtgtctagcgtaatgagtcatatgataagatggacacagttgtaactggtgcttgggtcaagaggtgcttgccagcttccagagcccctgtgcgtgccgccccagcccctcccagcagaggctgcctcaatcttactgttacagcagctacttccttattctttgttgttttgactgaaytgagtacctctaaatattagttaagtttttccttttttttttttttttttttttttttagacttaagtcttgctctgtcgcccaggctggagtgcagtgtcgtgatctcggctcactgcaacctctgcctcttgggttcaagcaattctcctgcctcagtttcctgagtaactgggattacaggtgcccaccaccacgcctggctaatttttgtagttttagtagagacagggtttcaccctgttagtcaggctggtctcgaactcctgaccttaggtgatccacctgcctcagcctcccaaaatgctgggattacaggtgtgagccaccgcacccggccagcctttcagtctgaatctacaggttacattatccaycccacctcccgtggaagtattttctgaggtaacttggtggttggactcgtgyatctcacggtctagattttgctggctgcattcttctggagaggcccagtgtgttcctctatcctttggtttcttgtagattgtgtttggttggttggttggttggttggttttgaggcagggtcttgctttgtggcccaggatggaswgcagtggtgctcccgggctcaagtgattttcccacctcagcctccctaataactgggaccacaggcacgcatcaccacacccagctaagttttaaaaatttttttgtaggccgggtgtggtggctcacgcctgtaatcccagcactttgggaggccgaggcaggcggatcacgaggtcaagagattgataccatcctggccaacatggtgaaaccacgtctctactaaaaatacaaaaattagctgggcgtggtggcgagtgcctgtaatcccagctgctcaggaggctgaggcaggagaattgcttgaaccggggaggcggaggttgcggtgagctgagatcgcgccaccgcactccagcctggggacagagcgagactccgtctcaaaaaaaaaaaaaaaaagtgtgatgttctggctgagttattgcttctttatgtagtagatgaactattaaagataaacctcttcttatccactctctggtgttatagttcatggagaaaactgaagataaatgcctgattctttttttaaattcatcagttttcacaatgatgaatcattttcctatcagcctccagaggcgaccagttagggatttgatgttggtattggtgaactaatgaatttaaacatatttgggatgttaaattctgtcctctttggacagtgagagcccctacaagctggctcctggatccttttgacatcattcctgaactctctcagaggtttctggctgtctgatatgttctgtgctcatcttgtatttttcckgctccagacctgaaataagccatttcttcagctctggtttcttttaagggcttggaagtttcaaaaccacagtctgcatgtgacaggtgctcactgctgttgggttggccgctggttctaggcctctgctggagtgtgtgatctgctttctgacggcagggcgttcacatgggtgtgctttaatcttacgtctccgtcctctttttccactgagagtgctggtctcaaggacagtggagatgagagaattggaatatcgcataatgtctcatctgttttatctcttgctacaaacatcacaatctcaaaataacaatggcagtacaactgccacctatatcattactgaaaacagtgaagatattttttgcctaagtcttcccattctgtgtagttatgcagggtctcaactacagagtgtgtagccattacgtactacagatgcttcgcaactcaggacacggccacgtccgataaacccatcaaagtcgaaaatgcacttaatacctgatkggagcctgggcatggtggcttacgcctataatcccagcactttgggaggttgaggtgggaggatcacttgagcctgggagtttgagaccagcctcagcaacctagtgagaccccctctctacaaaaaatgttttaaaatattagccaggtgtggtgacactcaggtgtagttccagctactcaggaggctgaggcgggaggattgcttgggcccaggagtttgaggctacagtgagctgagattgtgtactgcactccagcctgagcgccagagtgagaccctgtctccaaaaaaaaaaaaaaaaaaaaaagccctgattaaaccgtcgtagagctgaaagattgcgagtcaaaccatcgatgaagttcagatgctccttgattgaccatggggttctatcccagcaagccccccccgcccccccgccgtgaagtcagaaaccacggagtccagctattgtgctgtgtttctcccctgcaaacccttattcagtcctagctctgcaagtgacggcagtcccgggtctcactaagggcaggggtgtgttctgagaaatgcgttactcagcgatgttgtcattgtgtgaacctcatagagtgcacctacacaaacccagatggtatagcctgtcactccgaggctgcaactctgcacagcagttactacactgaagcctgtaggcatttgtaacactgtggcaagtatttgtgtgtccaaacagaaaaggcacagtaaacagacggtgtcgttatcttatgtagccactgtggggtgcgctgctctttgccgagtgaggtgttgctgtgcagcacgtgactgtgtgtgttaaatgcttacacgggggccgggcgcagtggctcacgcctctaatcccagcacttcgggggctaaggcgggcggaactcctgagttcaggagttcgagacccgcctggccaacatggtgaaaccccgtctctattaaaatacaaaaaaaaaataataataacccgtctctattaaaatacaggtgtggtggcaggcacctgtaatcccagctactcaggaggctgaggcaggagaatggcttaaacccgggaggcagagggtgcagtgagcagagatcacaccactgcactccagtctgggcgacagagtggacaaaaataaaaataaatgctcacattgggtcctcatgtttctgttgtgttttggttgaggtttgctctccggtagatctctcaggaaggactcatggaacaagatgtcttgacttcctgcatcttgatagtagtttttctgcattcattgtgctcgaaggtcagtttggcttagtataaaatccttggttcacattttcttttttttttttttccctttaattttttgtagagctgggggtctcactatattgcccaggctggtctcaaactcccagcttcaagcagccctcccgcctccacctcccgatgctgattatacgcgtgggccactgtgcctggctagttcacttttttccttgaatgtcttaactatgttattctgtggtcttctaggataaagcattgctgtcaaaatcatgacagttttttctttccaagtgactttgtactttgcctgagagcccaaaggatttcttttaagtctagtaattttgttagaaaataaattagtgttattagttgaggatggattttctcagtccctttcactatgtggcttgacaatttctaattcaggaaaggtttttaagtgtttagtattctgttctcttgccctgtcccctcctgtttctggggtggctgttctgattgtacatatgttggatcttctttacrtgtcttttaaattggtccgtttctcttgagtcttttttaatcccctcatttctttttcattaaaaaaaattgtgtttccctttcatttatcttaagctgtcatctgtggagtttgttctcctgtttcttcttttttaggtcttcattcttgaagtcatattttacttttatttttagtgtttttrtgggacctataatctcacatcagaatttttctatcctgatttatgttgtttctttatatcattttcttaatttctttagtttctttgcaagaggaagttaccgttttcatttaatctgaggtcacatttttctgtgagcatatttcgttatctgcagtgatgtttttctgctctttagtttttctcatacccttctgtgagatgtgacagaattcttttctgttgcctattatattagttttctagtgctgctttaacaaattaccacaaaccgagtggcttcacacaaacggaaattaggartctgaaatctgagatgggtctcactgggctaaatcaagatgctggcggctgttgaacggtggctctcggcaaatgcacgttcttacctcttgcgccttcaggaggtcacctgccttccttggcttgcattggtttggtttgctgttttttctagtgttttcttttaggtgagtactttattgactggaggtcatcttttctaacacaggtatgtagagctttcagtttcttgctaaccaccacttcagctgcatctcatccatttggtgggttgtatttttattgtcgttcagttgaaaacactttccagtttacctcacggtttgtttttcacccgtgagttatttagaattgtattttgttttcaaataattgcttatttcccagatttctttcttttgctttataatttaactccattgtgtttagagracttgtatagtttcagtccttttgaaatgcccaacgcgtatgttatgggccagcatgtggtctatactgtgggaggttccctgggcccctgaagaagcgtgtgccaggcggcggtgggagcggcggttggggaggcactgcggtgcrtccactggstcagttggctgacggtattgctcaagtcttctctgttctcgctgactttctgtctagttctgggtggcctggtaggcccagcagcttctcttcatgggagtttttgccccagaaagaagtgtcagctgttttgttttgccccagatcggaccttggaccctgaccctcctctgctttgcagatgtgcagaaagtcacccacctcagcagcttggttctgtgggccgtccagtgatacctgttggctacttggggatgctcggtgtatcacacgcttgatgacatctttcttttccagctgccagatctaataccatctaggccttgtaatactgactgcaagggggcttccatcctgatacacccatccatcatcaattaaaaatatcttcagtggaaaatgcatttaattcacctgatgtgccgagcatcatagcttagtccagcccccctcaaatgtgctcagacacttacatgagcccacagttgggcagaatcacctgacacaaagcctgttttgtcataaagtgttgaatatctcatgtaagagtgtcacaccgtatgttgttagcctaggaaaagatcaacattcagaattcaaagtacagtttgtactgaatgccagtggctttcacaccatcgtaaagttgcaggttcgtaggttgaaccgtcattaaatcagggacccacttacccatattcatggtttgtcccttccacttacatttgttggttaacggaaagaccttgtcagtcttcttttttgttgttgttgataacatcagaggattgtggttttactgttctagttttccttttattgagagatttggggaaactaaaaaataaaatataggcagtgttacaagcaaacaaatgagcttactatatttcaaatgaataaaataactacacttgaggaaggaagctggctgaggctggtggatcacccaggatcaggagttcgacaccagcctgggcaacatggtgaaaccccatctccacaaaaaatgcaaaaaattaactgggtggtggcacacacctgtcatcccagctactgaggaggctgaggtgggaggattacttgagctcatgaggcggaggttgcagtgagccaagattgtgccactgcactctagcctgggcaacagagcgagactgtctcttccaacaaaaaagaaaaatgaaaactgacccaagaaactcttggacacgatgtgattataaacctccaagtaaaaagataaaaattataaatgaattgtgatctccagctagaaggcttgttttcttggtggcctgggttagtaattctgcagctacttcgtgcatgtgttgtagggttgagcaaatgaggaaatctgccaggagrgtgggagcccagcctcccagaggtggattgaaacgtcacggatgcaggccgggcgcaatggctcacacctgtaatcccagcactttgggaggccaaggcaggcggatcacctgagattgggagtttgagaccagcctgaccaacatggagaaactctgtctctactaaaaatacaaaaaaaaaaaaaaaattagctgggtgtgatggtgtatgcctgtaatccgagctgcttgtgagactgaggcaggagaatcacttgaacccaggaggcggaggttgggtgagtcgagatcatgccattgcacttcagcctgggcaacaagagcaaaactgtctcaaaaaaaaaaaaaaaagaaaaatcacggttgtggaaagggggatgctcggtcttgtgatctcagggtcagggcagagttggcggtgtcagtgtgaagttgtggctttgattcacgtacacacatgcatgttggtgtgtgtgtttatgggttctagtgcttccgctggaagggcctaaaggcagaggcacccgtaacagtgagtgcacggctgcctacctcgtacccgcgtggyggttatccacctcgggcctttttggcagcgctcgtcctccagaccagattatttcatctctgactggagaacactcttgcgtggactttagtgtgggtcacttagagacacgttctgtgtttggtttgtctgatggtgttttttagttcctgtttattcctcagggaatatttgtactgcttactgaattctggtttggctctcatttttcacagctttgaagatgtcattcctctgtctcctgatttacattgtttctcttaaaaagtcagcagtgtatctcattggtttttttcttaaaatagctttcatggaaataatctgatatacgtaaaagtggaaagggtagcataataaaccctgtgcaygcatccccagcttcagaattaccagttcacagccattcccatttcatctgtgtcctccactcactttttaaaaagttttgtttttaaaaagaatttcaactttgattttagattcatcaggcacatgtgcaggttcacgacatggtatattgcgtgatgctgagtttgggataagaatgatcgtcgcccagatcgtgagcatggtactcaataggttgtttttcagtcttgtcccctcctcccttcctccctccctcactcctcactctckcagtcccagtgcctgtggttctcatctttatgtccctgtgtaccacatgcttagctcccactgataggtgagaacatgtggtatccggttttctgttcctgtgtttgttcacttaggatgatggtctccagatgcatgcatgttgctgcaagggacatgattttgttcttttttatggctgtataatattccatggtgtggatataccacattttccttatccagtccaccattgctaggcacgtaggttgattccatgtctttgctattgtaaatagtgctgtgatgaacatacatgtgtacatggggtttttttgtagaatgatttatttctttgggtacatacctggtagtggcatcactgggtccaatggtagctctgtttttagttctttgagaaractccacactgctctccgcagtggctgaactcattgacatccctgccagcagtgcttgagtttcccttttctctgtagcctctccagcatctgttatttttttctttttttaataaaagccattgtgacgggtgtgagatggtatctcgttgtggttttgatttgcacttctctgatgactgttgatgtcgagcattttttcacgtctgttggccacttttatgtctcctttcgagaagtatctgttcatgtcctttgcttgctttttaatggggttattttatttcttgttaagcttcttatagattctggatttcagacctttgtcagatgcatagtttgcagatattttctcttattcagtgggttttctgtttattctgtcgatggtctccttttctgtgatagtttcagctatgcagaggctctttagttaggtcccagttgtcaatttttgtttctgttacaatccactcaattattttgaagcaaatacccaaaatcataattcacgtagctacatttcagtaagtatttttaaaagatagattttttttttttttgagatggagtctcactctgttacccaggctggagtgcagtggtgcratcttggctaactgcaacctccatctccagggttcaagcaattctcatgcctcagcctctcaagcagctgggattacaggtgtgcaccacaatgcctggctaatatatttttttttagtagagatggggtttcaccctgttggccaggctggtctcaagcctcccaaagtgctaggactacaggcgtgagtcactgtgcctggcttagaattctcttttaaaagttaattcatcagcactttgggaggccaaggcaggtggatcacgaggtcaggagttcgagaccagcctggccaatgtggtgaaaccccgtcactactaaaaatacaaaattagctgggtgtggtggcacgcacctgtaatctcagctactcaggaggctgaggcaggagaaagcttgaacttgggaggcgaagcttacagtgagccgatattgccactgcactccagcctgggcgacagagtgagactctgtctcaaaaataaaaaaaaagttacattttcagtataatgtagtctggtaagcgtgcaatagcatgacgtctaaaacaatgtacctaccttgatttttaaaaagcttgttgctgaaaatgccaacagtcatctgagccttcagcaactcataatctcagctgggaggagatgttgccttggtgtccagggctgctgaccaatcagagtgcagattgctgaccaatcagagtgcagattgctgaagggtggggtggctgtgacaatttatttatttatttatttattttttttttttttgagacagagtcttactctgtcgcccagggtggagtgcagtggtgtgatctcagctcactacaacctccacctcctgggttgaagcgattctcctgcctcagtagctgggattacaggtgcacaccaacatgcccagctaatttttgtatttttagtagagacgaggtttcaccatgttggccaggctggtctcgaactcttcacctcgtgatccgcctgcctcggcctaccaaagtgctgggattacaggcgtgagccactgcacccggctgacaatttcttaaaataagacaatgaagtttgctacatcgattaactcttctatgaaagagttctccatagtgtacattttacccrcagtagmacttctttcaaaattgtagtcaatcctctcaaaccctgctgttgttttatcaattatgcttatagaatattccaaaatctttattgtcattttaacagtgttcatagcatctccaccaggagtagattccatctcaacaaactagtttctttgctcatccctaagcagcagctcctcattcactcaagttttatcctaagagtacagcaattccgccgtatctttgggttctgtgtataattctagtttttgccctttccaccaaatctgcagtcacttcctccattgaagtctgagcccctcagagtcatccatgagggttagaattaacttccttcaacccattctcctggtaatgttggtattttcccgtcccaggaatcacacatggttttgtttttgttgtttttagagatatggtcttgctctgtcaccaaggctaaagtgcagtgtcacgatcacagctcactgcagtctcaacctcttggtctcaagcgaacctcccgtctcagcctgccaggtagctgggactscaggtgtatgccaccaagcctggctaatttttaaatttttttttttttttcctgagatggagactcactccatcgcccaggctggagtgcagtgacgtgatcgcggctcactgcaacctctgcctcccaggttcaagcgaattctcctgcctcagcctcccgagtagctgggaccgcaggcacctgccggctaatttttttgtatttttagtagagacaggtttcaccatgttagccaggatggtctcgatctcctgaccttgtgatccacccgcctcggcctcccaaagtgctaggattacaggcgtgaacyaccgcgcccagccaatgttttaattttttgtagagctggggttttgccatgttgcccaggctggtcacaaactcctgagctcatgcagtccacctgccttggcctcccaaggtgctgggattacagacatgagccactacagccagggatttccttcaagaactttcctttgcattcacgtcttggctgttggtacaagagtcctagcgttggcctctctcagctttagacgtgccttcatcactaagcttaatcatttctatcttttgaaaatgagagacgtgatacttcctttcacttgaacatgtagaggattaatcggcctaattctaatttctcgtgtgtctcagggaagagggaggctggaggagagggagagagacggggaactgctggttgatggagcagtcaggacacacatttatcagttaagttcactgtctgacatgggtgtggcttgtggtggctcacgttaattacgatggtagcattagagagtactgatcacagatcaccataacagataccatgataatggaaaagtgtgaaatattgccagaattaccaaaatgtgacacacaggtggagagcccctgctgttagaaaatggcaccgatggacgtgcttgatgcaggattgccacaaacctccaatttgggggaaaaaaaagtatctgcaaagagcagtaaagcgaggtgcggtgatatgaggtgatatgaggtattgggtcttcccacctcatcacccccaccctgcagccccaagaaaggctcagagagagtcaagaccaacctagaatgagatgtctgttttgaagagagaacagctgggttcttctcgacccacagggatgcacggcccaccttgtaggttggaggsgaggagcgtggaggacaagatcatcctggaatgagaacataagggctggggaatggggcggcgctgccaccagggaggagagatgcctgaaattaggacattcccggggagctggcccgtgccgagaacaagaatgagcttgagtcctgtgacctctctgaactctcttactctttagctctagtactgttttgtagaggccttacaacctttatgacatcgatggccctgtcgtctgcccatcaaggcagttctgattttctctgacagccgcctcctgcctgggcagactcccatccagtgctgtatagaayatgccgaggggaagcactcactctttcactgatgagtatgatgggagctgcactgtttcccggatgcgtctcataaggctgaagatgtttccttccattcctggtttgtgcagagtttttgctgtgaatagaggtagaagtgttggcaaatgtttttctacatcgaatgacgtgcccatatggttttcctcsttttgctaatgtattgttttaattttttttttttttttagatggagtcttgctctatctcccaggctggagtgcagtggtgcgatctcggctcactgcaacttctgcctcccaggttcaagcgattctcctgcctcagcgtcccaagtagctgggattacaggggcccaccaccatttttgtatttttagtagacatgggatttcaccagtttggccaggatgctcttgatctcctgacctcgtgatccagctgccttggcctcccgaagtgctgggattacaggcgtgaaccaccatgcccagcctttttttttttttttttttttttttttgagacggagtctcactctgtcgccaggctggagggcaatggctcgatctcagctcactgcacctcgacctcccgtccaggttcaagcgattctcctgcctcagcctcctgagtagctgggaaaacaggtgcgtgccaccatgcccggctcatttttgtatttttaatagagacggggtttcaccatgttggccaggctggtcttgaatgcctgacctcaggtgatctgcccaccttggcctcccaaagtgttgggattacaggtgtgagccactgcacccggcctgttttaattttttgactattaaaccaaccttttattcctgtgatgaatcatgacgtattatctttgatacatagtgtttaatttaatttgttacagttttgttaaggattttttttctgtgctcatagggtatcaagttgtttcttttattgtaatgtctttgctggttttggtatcagggtaatgctgctgatataaagaattgggaggtgtttcttcctttattttctggaagaatttgtattttttttttctttaatgtttggtagaattcaccactgaagtcatctgggcctgggagtttctctgtgggaaggtttttcaactataagttcaatttgtaaataaaaggctaatcagcttattcttgagtttttgtagtttctgtctttcaagtaatttgtccatttcatctgagttgcataatttattttctttttttttttttcttttttttgagacagagtcttgctctgtcacccaggctggagtacagtggcgccatcttggctcactgcagcctccacctcccgggttccagggattctcctgcctcagcctctcaggtagctggggttacaggtgcgcrccaccacgcccggctaatttttgtatttttagtagakacagggtttcaccatgttggccaggctggtctcgatctactgacctcaagtgacctacctgtcttggcctcccaaagagctgggattacaggcgtgagtcaccccgcccagcttgtccatttcatctgagttgcagaacttatttttataaaattttttatatgtttccttactatccttttatatatgtaggatctgtagtgatactccctctctcattcctggtagtggtaaattctgtcttctccatttttttctctaatcaatatttgtagaagcttatcaattttattgctctttcccaagaaccagagtttggtttcattgattttttttcttttttttttatttcattgatttcacatctttattgtttttttcttgctgcttactttgggattaaatttgctttacttttgtgtgttttttctttgatactgcgtgtaatataaaagtgttatttatttgaaaatagtttggattttttcagatattattgtattgctgaagttttattcagttcctttgtcagaaaccattctttgattttggttcttttaaatgtattgaggtttgctttattgtccagagaagagtctgtcttggtgaaggttttgtgtacacttgtaaataatgtgtattccgttgttgttggactgctcaataaatgcccattaggtcaacttggataatagtgttgtttgaatcttccgtgtctttactgatttttatgtacctgttggttacttattgaatagttctgtggaaatctccatccgtgatggtgacttaccttgtctccctttagttctctcagctttgcttcgtggttttgaaggtctctttgcaggtatatgcacctttgggagaatgcgctctggatgaattgacccccttataattttgtgatgttgtttgttatatttagtatgttattcttaaatctttacccggtattartgtcgccactccagctttctctcggtttgtattaacatggtataccttttttcatccatttgtttttagcccttttcctgtttgccctgagaayactcaccggcagtgcttgcagctgcagcgtttaccccgagataagtttgccatgaaatctctcgttttcatgatgacttctgcattgctcgagtatatcgactttggaaacaaaagacctcgttctatttatggcattctgtttttagtagtggtatttccatttacaaaatataggaattctcagttgctgaaaacgtcagatcccagaagacacagcgttcccacacgtggtgttaacatcgttcccagttgctggccraagattcctttgatgaatccgatttttccaaaatagatgattctgatgattcagatgactctgatgttagttctgtttagaaataattccaagaacagtttttatgttttattttcacattgaaaatcagtcagatttacctcagcctcaaagagtgtgtttatgtaaaagtaaatgaacgctggcagtgagctgcaattttttttcctaaacaagaaaaagattaagctatttgtgtctttatgtttaaagcgtgtttcttgtaggcagcatataggaagtcttgcttttttattcattctgacaatccctgtctgtctcaaaaaaacagctttattatttatttatttatttatttatttatttatttattttgagatggagttttgctctgtcgcccaggctggagtgcagtggtgcgatctcagctcactgcaacctccgcctcccaggctcaaatgattctcctgcctcagcctcccaagtagctattattacagatatgtaccaccacacctggctaatttttgtatttttagtagagacggggtttcaccatgttggccaggctggtcttgwactcctgacctcgtrtgatccctcccaccttggcctcccaaagtgctgggattacaggtgtgagccaccacgcctggcctaaaaaacagctttatttgggtataattgatatacaataaacacatatttacagtgcataatctgataaatatatatccatatccatatagtatgcctaaacagctgctgtgaacatttgcatatgaatcttcatatggacatgcttgtgtatccataaacccatcctgcaggyggcatggacacacrcatccctcctgactgtgtcttctgcccctcgyggcccctcctcccgccagcacagacctgccctttggcctcccgcactctgcaggattgtttcgagattcatccgtgttgcgtgtatccattcattcttttgttattgctgcataatgatccattgtagggctgtatcacaatttgtcttctagtttttagatactacatawaaagctgctgtgaattttatatgtaagtcttcatacagaggccaggcgtggtggctcatgcctgtaatcccagcactttgggaggccgagatgggcggatcacctgaggtcaggaattcaagacaatcctggccaacgtggtgaaacaccgtctctactaaaaatacaaaaattagccagacgtggtgacaggcacctgtaattccagctactcaggaggctgaggcaggagaatcgtttgaacccgggaggcggaggttacagtgagccaacgcaccactgcactccaacctgggtgacagagtgagacactgtctcaaaaaaaaaaaaaaaaaaaaagtcttcatacagagataggctttcatttctcaagagtaataataactgggagtggaacagctgggttacgtggtcagtataaacaccgaagaagagattggtggagcgatagagaatccagaaatagatccacacatatgcgagcaaccaattctcaacaaagttacatgggcacttcatggagaaaggattgtcctttcaacagattgtgttggaacagttagacatccatgtgcaaaaaaatgaacttcaatccttcaragatctaaatataaaacttaaaacttctaaaagacaacacagaagaaagtctttgaattaggcaaagatttctttggtacaagcccaaaagcacaatccataaagaacacatgagtgaagtggacttcatcaaaagtaaaaacttatgctcttcaaaatacactagtaaaagaattagaagacgaggtgggtggatcacctgaggtcaggagtttgagaccagcctggcaaacatgctgaaaccttgtctctactaaaaataaaaaaaatgagccgggagtgggccgggcgtggtggctcatgcatgtaaccccaacactttgggaggccgaggcgggcagatcacgaggtcaagagatagagaccatcgtggccaacatggtgaaaccccgtctctactaaaaatacaaaaaaattagccgggtgtggtggcgcgtgcctgtagtcccagttactcaggaggctgaggcaggagaatcacttgaactggggaggtggaggttgcagtgagccgagatcgcgccactgcactctaccctggccacagagtgggactccatctcaaaaaaaaaacaaaaaacaaaaaaaaacaggagtgaagtggcgcaatctcggctcactgtaacttgcgcctcccgggttcaagcgattctcctgcctcagcctcccgagtagctgggattacaggcacgcgccaccacgccgcgctaatttttttgtatttttagtagagaccaggtttcgccatattggccaagctggtctcaacctcctgagctcggttgatccgtctgcctcatcctcccgaagtgctgcgattacaggtgtgagccaccaaacccagcctaatttttgtatttttttgcagagacgatgttttgccatgttgcccaggcacacaccactatatccgctcttacaatagctgttttcatgtccttgtccactaattttattatttgtcttatgtccgggcctgtttttattggttggtttttctcctggtcagtgtctgggcgtgtttctattggttggtttttctcctggtcagtgtctgggcgtgtttctattggttggtttttctcctggtcagtgtctgggcgtgtttctattggttggtttttctcctggtcagtgtctgggcctgtttctattggttggtttttctcctggtcagtgtctgggcgtgtttctattggttggtttttctcctggtcagtgtctgggcgtgtttctattggttggtttttctcctggtcagtgtctgggcctgtttctattggttggtttttctcctggtcagtgtctgggcctgtttctattggttggtttttctcctggtcagtgtctgggcctgtttctattggttggtttttctcctggtcagaggtggttttctcccgcttcatcgcaggtctggttgtttttgtcagccattttgtattttactttattgggtgcaggattttgttatattcctttaaatgctgttgagacttgttttaggttgtagtaaagttaatcatagaccgtttcctcctcttgaggctggcgtttaagctgtgttcgggtggctcctaacacggcttaaaagagcggccgttgttgtgaagcccactgttcagtccggacccttctgaccctgcttgctgttcactcttggtggtggaaacacaagctgttcccagcctccagggagccctggcagttcttttcccctttggttctctgagggtggtttcctcaaatgcagatgcagatcagtattcagccaaagacacgaggaacctccgcaggtctgcgtagctccctcctctcccgcgctcgggacatgctcgagaccaccgggctctgccaagttccgactccccgccccgcagcctggaagcctggaagccccgccgtgagcgagggcaggtggggctccctctttagctttcacacttctgtgatcactgtcctgtgctttctcttctctctcagcgtctgaaaacgtcgtttcgtgcacggcgtctggcttatgagttgtctgaggtcaacctggtttcctttgttttgttcatcatggctagaagtggaagtgactgtgagtccagctttgttctttctttccaaaataattttatttattcctgattctttgtattcccatatcaattttagacttctgtttatcagctactgcaaaaagcgttttggaattttgactgggatcatattgaatttataggtcaatttgggaaaatactgatgtcaacattgagttttctaatccatgaacttggtatatttctccatttgtttaaaagcctttaatttcagcagtgttttgcagctttcagtatacaggtcttctttttaagacctgtatacttgtgtacctgtatactaaaacaagcatattttaaaaattttatcttatttcatgctttcatgcatgcttttggacattatatgtggaatttaaaaatgtttcattttctggccaggcgcagtggctcasgcctgtaaacccagcactttgggaggctgaggcaggtggatcacgtgaggtcaggagttcaagaccagcctggccaacatggcgaaaccccgtctctactaaaaatacaaaaggaattagccgggtgtcatggcacacgcctgtaatcccagctacttgggaggctgaggcaggagaagcacttgaacccaggaagcggaggttgcggtgaactgagatcgtgccgctgcacactgcagcctgggcgacagagtgatccgtctcaaaaaaatttgtttttcattttctaattcatctgtagaaatacagttgctgtttttttgagrtaggatctcactgttggccaggctggagtgcagtggcacaatgatagctcaccacagcctcaaacttttgggttcaaatcatcatgtctcctcagccttccaagcagctgagatacaggcacrcaccaccgcacctggctaattttgtttgtaaagacagagtttcactattattcaggctagtcttcaaactcctgccctcaagtgatcgtcccatctcagcctcctgagttcctgagtagcttgggactacaggctcaccatactyggcattttttgtttgtttgttttgttttttgttttgtagagaacagggtcttgtttttttgcccaggctgatctcaaacttgtggtttcaagcgatcctcccacctcagcctcccaagtactagggttacaggcatgagccactgtgcctggcctgtgttaattttttatttttcttttttatctggctgtactttgtagaacttattgggaatgcttttcagaaagaacctgcatttatttctggtgggagctagcagtttttattaaccttggaacactttttagggcaaccatacatcttgctttgctacagataggtttggcttaagcctgtttccccagcagtattattaatagctccctttcactctcagaaatgccctggtttagaaaatacatgatgtggtgacttcagttcttggttcctgcatggtggaggaatgtcgggttcagctcctccctgtgggggtgacccatgctgaccaggctagggatggcgcacctctcctgcccatttgccactccctgtgtcccttgaagagttctcccactttctggcatgcccagtaatactttaaaaagtaagtttgtggtgggcgcattggctcgcgcatataactccagcactttgggaggctgagtcgggaggagggctcacacctgggaagtcgaggcttcactgagctgtggtcacgccactgcactccagcctaagtgacagtaaaactccgtctcttcaaaaaaagtttgttagaggttttctagagtctggttttattatagaatatttatgctgccatattactgaaaacatgcttttgttgctacttggttttagttccttagtaaactgctccatctcctaccccacatgactccatcgtcctccgagcttcggctcagttacacccttacagctcctgcccctgttctccgtcttgccctgctctctcctgtctttgtaacgccatgttccttcacttccagcgtttaccatagctggaatctcacggttcttggctgtcaggtcccgtgactgtctcctcttggctgcattccagcacggcgcagcatcacttggggacggggcattgaatgggtgacaggaggatgggctggaagcggttttcacccacaggacgcctttcccttctcagatgcaggagccactgtggtccgtttcctattcagcttttcgtctgggttgatgatttcacacgttagctagagtttttcaaattcgtatttcatgtatcaggtcttctagcaaggaaggatgaatagatctcaaggaattcagctttgctgattatagcagctgtgagtacctctcatgaactgtttgaaggatgagggcataaattctasatgaggcaacctctttataccattctaggttttaattcatgttccccaatcctttattaataggccacttgcattttttttcatgtctctattttttgcttattttgcaatttgggggtattgtcatcctgtraacggattgcaggaagtcagagaacaagtttttcgattccagttttccattatacagtttttttctatacatatttaggcrgatggagccatgacggtagaggttaaaatgtgtgatttagttccatgcttaatttgatttcatctcttataggtaatgcacaagggtcacgtgtatgctctcaagatgatcaggcagatcctgtcctcaggaccagaagcaygtctctgctgcacacattgttgtctacaccatgagtgtttagtagcaggactcttggaaagcagtgatctatgctgtaagaccatgagtcacagattctttttttcagtactatttatgattagccatatttctagaaacatcctgaaagatggaattatgacgaaaaagtgaagataatctacattcgggggcacaaatgagcacttggatcagtgttttatgaacctaagatacagccggagtagttatggtcagtcatggagaataacttgaaaacttgtcccaaagaggacggtgatttcgtttctgataaaataaagtttaaaatagaagaggaagatgatgatggaattcctcctgatagtttggaaagaatggactttaaaagcgagcaggaggacatgaagcagacagacagcggtggggagcgagcgggcctcggtgggacgggttgcagctgcaagccccckgggaagtacttgtctgcagagagtgaggatgactatggcgcgctgttctcccagtacagcagcaccctatacgacgtggccatggaggccgtgacccagagcctcctttccagccggaacatgagctccaggaagaagtctccagcctggaagcatttttttatctctccccgagacagcactaaagcaatatgcatgtactgtgtgaaggagttcagcagaggcaaaaacgagaaagacttgagtaccagttgtctcatgaggcacgtgaggcgcgcacacccgaccgtgctcattcaggaaaatggcagygtgtctgccgtgtcctcgttcccctctccctcactcctgcttccaccrcagcctgcggacgcgggtgacctcagcaccatcctctcacccatcaaacttgtccagaaagtggcgtctaagatcccgtcccccgatcgaataacagaggagtctgtgtctgtagtttcttctgaagaaatctcctctgacatgtccgtttcggagaagtgcggcagagaagaagccctggtggggtcgtctccccacctccctgctctccattacgatgaacctgcagagaacttagcggagaagagccttccacttccaaagagcacctctgggtccaggagaaggtccgctgtctggaagcacttctacctgtcgccactggacaactccaaagctgtctgcattcactgcatgaacgagttcagccgggggaagaatgggaaggacctgggcacgagctgcctcatcaggcacatgtggagggcacaccgcgccatcgtgttgcaggagaacgggggcacgggcatcccgccactgtactccacccctcccactctgctgccttccttgctgccgccggagggggagctcagctctgtgtcctcgtctccrgtaaagccggtcagagagtccccttcggcctcctcctcccctgacaggctgactgaggacttgcagtctcacttgaaccctggagatgggctgatggaagacgtggcggccttctcatcttccgatgacrtaggggaggcctcggcgtcytctcctgagaagcagcaggctgatgggctgagtcctagattgtttgaatctggygccatcttccagcagaataaaaaggtcatgaaaagactgaagtcggaggtctggcatcacttctccctggcccccatggacagcctcaaggccgagtgtcggtactgcggctgtgccatcagccgggggaagaagggtgatgtgggcaccagctgcctgatgagacatctctaccggcgccatccagaagttgtcgggagccagaagggcttcctgggtgcaagtctggcaaactcyccgtatgccactttggcctctgcagaaagttcctcttccaaattgactgacttgccaacagtggtcacaaaaaacaatcaagttatgtttcctgttaatagcaaaaagacctcgaagctgtggaatcatttttctatttgctccgcagactccacaaaagtcgtgtgcttgcactgtggccggaccatcagccgggggaagaagccgactaacttgggtaccagctgtcttctgagacatttacagcggttccatagcaacgtgctgaaaactgaggtctcggagacggctcggccctcctctccggacacccgggtgccgcggggcacagaattatcaggcgcttcctcttttgatgacaccaatgagaagttttacgattctcacccagttgccaaaaaaatcacaagtctcatagctgaaatgattgcacttgacctccagccatattcttttgtagacaacgttggctttaacaggctgcttgaatacttgaaacctcagtactccctccccgccccttcctacttctccaggacagctatcccaggtatgtatgataatgtgaagcagataattatgtcccaccttaaggaagctgagagtggtgtgatccacttcacgtctggaatatggatgagtaaccagacccgtgagtacctgaccctcacggcccactgggtttccttcgagtcgccagcccggccgcgctgtgacgaccaccactgctcggcgctgttggacgtgtcgcaggtggactgcgactacagtggcaacagcattcagaagcagctggagtgctggtgggaagcgtgggtgacctccaccggccttcaggtgggcatcaccgtcaccgacaacgccagcatygggaagacgctgaacgagggggagcactcgagygtgcagtgcttcagccatacggtgaacctgatcgtcagcgaggccattaagagccagcggatggtgcagaacctgctgagcctcgcccggaagatctgcgagcgggtgcaccggtcgcccaaggcgaaggagaaactggccgagctgcagagggagtacgcgctgcctcagcatcacctcatccaggacgtcccgtccaagtggagcacttccttccacatgctcgagcggctcattgagcagaaaagggccattaacgagatgtccgtcgagtgtaacttccgagagctgatcagctgcgaccagtgggaggtcatgcagtccgtgtgccgtgcgctaaagcccttcgaggcygcgagccgggagatgagcacgcagatgtccaccctcagccaggtcatccccatggtacacatcctcaacaggaaggtggagatgctcttcgaggagacgatgggcatcgacaccatgctgcgctctctgaaggaggccatggtgagccgcctgtctgccaccctccacgacccgcggtacgtcttcgccacgctgctggatcctcgctacaaggcctccctgtttacggaggaggaggcggagcagtacaaacaggatttaatcagggaactcgaactcatgaattctacctcagaggacgtggctgcctcccacaggtgtgatgctggctccccgtcgaaagactctgccgcagaggagaacctgtggtcacttgtggccaaggtgaagaagaaagacccaagagaaaagctgcctgaagccatggtgcttgcgtatctggaggaggaggtgcttgaacacagctgtgacccgctcacctactggaacctgaagaaggcgtcctggccggggctgtccgcgctggccgtcagatttttgggctgccccccaagcatcgtcccttcagaaaagctgttcaacacacccactgagaacggtagccttggccaatccaggctcatgatggaacattttgaaaaacttatctttttgaaagtgaatcttcccttaatatactttcagtattgaaactcacgacggcaccactaggccagaggcgtggctgccccagcgttagcagcctgtaccaggtctatgacccgctctgcccacggctgtgtacgacatcagaccaggcactctcagggccgctctccagctcaccacagtgtctccacgtgccttaccccttctccttcaggccaagtttcgcggggtgttttattaagacgtccactagaaatagcttgtcctgtcaactatgaaatatggtgactagattttaattcataaccgtaaagttttttaaagttttgggttagtaatttgttttactagaatgacaaagaagatgtaaaccattttattctgtaggctttttactcaattatgtacaaaccacaaatcaggtactgtattttagtgaagcattgctttaattgcaacagaatagcttttgtggctatcaaatgaaatctgtaaataggaggtggagggcaagccatcctgactgagcagtttttaaccgcaggttctaaagtgtcccgcggagtacagataatattctggaaggtaactgtttactacgacagagacgtggcatttggaaacgaaacttagatgtttcatggagcttattttgagaactttcccatttcaggtttctgcattcaggctttacatggtcagttaactcagagataccccagctgtttatcatcagctcctctgaaatgtgatccctttgtaactgtgctcatcacttcgccagtgcgttcaatgacacgctgatggcaggtggtccctgctgaaacccccacgcctccgcttcagcatctccacgctctgaagctgtctttcaaaatgtgtgcactgacccccttgtttgatcaaatttgtgtaaaatttttttagaagagatggcttattaacagggaagaagcttgttatattccagttgtaagaatagccttagtgtttagatttttttatgatagggaagatgcggccatcactgggatattttcaaatcccaargacatcagagtgaagtgtcagttgtcagatgattttaaaagttaygtcttcagagaaaaaaagattcattttctcattttaarccaattaaatattctgagtgagactaatcactcatttgcctacgaccttttagaaaagttrttttgttgaaatactgtacgtacgcttaatctaaatttgcattgactatgttttagtgtatttataaatggtgaactcagtttctgaaattaaacttcttatttgcaattttctagtgctggcagacactggctttttatttttaggataagaaaacaggcatattctttgtggtccattatctagagcccatacttgggcagcatttgaaatttcaccttaaccmcagacagggctccagggaagtggagatgtaattcttacaacaacagttctgatcatggccatggtgatgactttccaggtctcgtgttcaagtggtgccagaatgcaggagccggtgggcagccctgaggggttgccttggccgcagcctctgtgcacgctcttcctggtgtcctcttacccggtagctgtgcgcttgttcccgtgagaacagcctgcttccagagtgcccaggagtgctggtcagggacagtgcccgtgaggctgcagaggaggtggggtccatggcccacccatctctccctcgccagcagccctggccagtgtcatcctggtgtagaaagggttgcgcacaggataggagggagccacagttcttgcttagctgtgctcacgaccrgcttgcagtcctgtgtttcttaagattgtatttggaatggtaatatccttagaattttgggatattgagcttcatggattttctctccaaaacaagccagcacaactaactgtagcagaattgtatccactcattcattcaactgagatgaagtgccctcccttttccagggcctgggctagttcctggaatgcaacagagatttccgtggacacagtctctagtctcacagagcatatagtctagtccacgattggcaagctgcaaccacagacccagtccggcactctgcccatttttctaagtgaaattttcttggaatacagtcacagctgtttttttaacatggtgtcttggctactttcaggctgcgacgggagaaytgaatagttgtgacagagaccacaggcccactgaaagggacaaacagggctgaaaatactcactgtttggccctttccagaatagcaagtttgctggcccttgagctagcctgcctttatggggttttttttgtttgtttttttaagctttcagcttcatgctgctgtatttttagttgaagtgttctgagtaacagtcagtgtataaaaggggattgcagaaaaaaatgagggcttgctttactcaacagaaaatatggcccttcctgaatgacactaggagagtcattttatctcatacattcccttcatttcgttggtggacatttgttgaaaccggcactcaatggtcaaaccgtctgtgccctccagttgctgacagtcctgcaggaagatggacaagaggcccagtgctgacagtcacacgactctcactacttgaatgaggggactgtgggtgcaactagaaaatatgttgattcttagccattcccaccttgcctctccgttcagaaccccagctgcgagctgtttgtttccctgcctggaaatgatgttttaggcaggttccttaatttctcaggtctgtctcagataataaaaagctctttgtatgagcctcagaactgtctcttcagtgaatgaaattaccagtcattatacgaagggactttaaaaaatttgtggaaatactgaagtaaaagatgataaaaaaataaaaactttatttcttggctgggcacagtggcttatgtttgtaatcccagtactttgggaggctgaggtgggaggactgcttgaggccaggagttcaagaaattagccaggtttggtagtgcatgcctgtagtcccagctacttgggaggcagagggaggaggattacttgagcccaggagtttgaggttgcagtgagctgtgatcacaccactgcactctagcctggacaacagagcaagatcctctctcttaaaaccaccaacaatgacaacaacaaaacaacatttttatttctcaatgtaagctccatcaagrtcaagatacttttgtaagctgtgacaccagccatttagtccacctctaaagaattgcgggctctgggaatttaaccatgtcagtgcagcctttttaacattattaacggaagaaaaaatgagtgcttttaaagattttttaaaatgaggaaacaaagtcagaaggagcaaaatcgggactgtaaggtggatgcctaatgatttcccaacaaaactcttgaagaattgcccttatttgatgagaagaatgagccaggagcattgtcatcgtggagaaagacactggtgaggctttcctgggtgtgtttttgctaaagcttcggctaactttctcaaaacactctcataataagatgttattgtggccagatgcggtggctcacgcctgtaatcccagcactttgggaggctgaggtgggcagatcacgaggtcaggaaatcgagaccatcctggctaacatggtgaaaccccgtcccgtctccactaaaaatacaaaaaattagctgggcgtggtggcaggcacctctagtcccagctactccagctactcggaaggctgaggcaggagaatggcgtgaacctgggaggcagagcttgcagctagctgagattgtgccactgcactccagcctgggcgacagagcgagactccatctcaaaaaaaaaaaaaaaatgttctttggccctccagaaagtcaacaagcaaaatgcattgagcatcccaagaaactgttgccatgaccttactttgacttgtccacatttgccttgactaggccacttctacctcttggtagccattgctttgattgtggtttgtcttcaggatggtactggtaaagtcctgttccatctcctgttataattcaaggaaatgcttcagggtcttgatgccacttgtttaaaatttccattgaaagctctgctcttgtctgcagctgatctgggcacaacggttttggcacccatcgagtggaaagcttgctcaacttcaattttgaaccagttgagatgtctgtggtcttggctattgttctgttaatcgtcagtcctctttaatcagagcatgaacaagatcaatattttccttgcaaattgatgtggatggtctgccactgtggtcttcatctccaatgttgtcttgatccttcttaaaacgaggtatctatgtgtatactgctgacttctttagggcactgtcctcatacactttttgtaaagcatcatgattttcaccattcttccacccaaggttcactatagatttgatgcttgtttttgcttcagtttttgcagaattcatgttctgctaggagcccttttcaaactgattcttactgcctcaaactagatctattcaggcatgttctaacaagttagtatgagtttattttggagcaaaagaattttgaaatgcatgcatagttttgtcataatatgcattttccatgaactttttgaagaccactcctgcaataataaaacattgaacttcatttaaagctaaaattcccttctcttccacttctgactatgaggcagcaactgctatcagaccaaacctttcccaagaactatcaaggccatataaaatatatttttaaaaagagctttttgcatcctggctaaaacagtgaaaccccgtctctactaaaaatacaaaaaattagctgggtgtggtggtgggcgtctgtagtcccagctactctggaggctgaggcaggagaatggcgtgaacctgggaggcagaggttgcagtaagccgagatcgtgccactgcactccagcctgggcgacagagcaagactctgtctcaaaaaaaaaaaaaaaaaaaaaaaactttttgaagacatcagagagtaagacagccaggatttgaagaaacaaaatcctagtaagatgagacttgcataaaggtgagtcctgtgttcacaacattttttcctgttgggccatttgctggtgtcctgccctaaggcctgacagaaggtggcaaccagagctggcgtggtgtcactgggctgggagaccggcagcaacacacaagctgtcatgttggccaggatgccaggagcctcagagaagtggccgaattcccagtgtgcagcttcccctgcagcaggtgcctattcctggttgctgcttgtgcttgaggcaagaggcttggaaacccaaatatagcagcaaaaggctggaaagctgagacatctttgggcaagggagacaaaacttgggacttcagtgcctgccattgagaaaactctgaggtttccaggtgagtcccctgaagggcaaactggagagggaccaaccctcaccaagtctggacatggcttgagccatctcagccttgattgcatcagggcgatctgcctcacctttctgctagaggaaaactaaattttctttcaatgaaaacatcagagctcctataactttacagataaacagtttgactctcataaaaaaattatgagacacactgaaaaaaaggactaagtgactgaaaagagaatcataagacaatagaaatagtctcacaggtgatccaaatactggagttttcagacacggactttatgatttatacattcaataatatggatgagaaggtggagaatgccaccagagagaatctgtaaacgtgctaatgctgaaaaacacaacgatgaatgaagaattccctagatgtagttagtaccaaattaggcttatagatgaaaggattactgaattggaagacaagccagtagaaaacattcatcttgaagtacagagagatgaaaagtgcctgagagacacagcgcaagagaaaagactagcacacagctgacgggagtcccagaagaggagagagaaggggtggagcgccatttggatgagatcacagctgaggactttccagaactgttgggacatcagccataggtgtcaatatctttgaaccccaatgaggataaattgaaaataacaacctgcacctaggcacatcatggcaaagtgctgaaacccaaagagaaagagacaaccttaagcagagggagggaggagagacacttttaccttcagaggagcaataaagctggcagctgactctctaaaacaaatagttggaatggtggagtggctttttttaaatgctgaaaggaaataattaccaatctagatttatatacccagtgagaagattcctcaaaagtgaggatgaacttaagtttttggacaaaacaaaaaattgcagaaacttgtcaccagccaaccagccctaaaatatatcctggagggaattctccaggtggacacttgatgtgggaaggaacaaggaatactcctgaaaggagcagaaacgggaaagctaaataaataatagactgcctaaaactatctcttagagttcaaaatacaggtagacttaagatacatggacagtaaggacaaaaggtgggagggaaataaaggattgcaccatcctgcaaggggtgaaagtatggatttcaagtagattctgggccaggtgcagtggctcacacctgtaatcccagcactttgggaggccaaggcaggcggatcacctgaggtcaggaatttgagaccagcctggccaacatgatgaaaccccgtctttactgaaaaaacaaaaaattaactgggcctggtgacgcatgcctgtaatcccagctactcgggaggttgaggcacgagaattgcttgaacccaggaggcggaggttgcagtgagccgagatggcaccactgcattctagcctgggcgacagagcaagacttcatctcaaaaaaaataataaagtagattctgacatcagacgtgatctctagggtaaccgctaaaagcaataaacatgttgatgaaactggactaatacctactttcactaatcccaaagaaggtaagaaaggaaaaataaccagatgggacacataggaaacagaggcaaatggtagctttaaaccaaatgtgtcagcaagcatattaaatgtaagtggaatgcaaactccaattaagtgtgttagattggatagacaaaacccagctatgttcattcacaggcttcacatatcgagtccaaggatgcagagtgaatgcgagaggccagaagccagggcaccacccacacatctgctacagctgttcacatctgacagcacggcctcaggcaggaggactcattagagatggagggacagctcagtgaccaagtggtgaggttaatgggatgacacaacaatgctaaacataaaagcaccaaagaacacaactccaaaatgtgactggaacagaaagaactaagaggagaaatagacaatcacagtgagagatctgaacacttgcctcagcagcaaataaagtgagtgttgttccagaatgtgtcctgactgaccactccctctggccccagtgaccatcctgccggacggccgtctcctccctggttgagcagccttgagcaagggtagcagtgggcagtgtgtggaggccagaggcctctcacgtccacccaccccaaaggcactgccctgggggacagctgagtgaggagagagggagacrcccttgaagcagggaggggagagttggagggagtcacatgtgggagtgaagcccaggaggaggaggaggggcaggagcattgccgctgggggcagacaggctgatggagggagaggggaggctctgagccccaggtgacaccatgctgtacacattgctttacagcccatctttctatgttagtaaacccacttcattattttatagggctctgtggctgtattcagtattttatcaccataaaaattctcattggagcttctgagttgagaggcagaggcatttgcaggggtaagtcttcccatcctcctgctctaacatccactcgcttcattctagtcgtttctcgttagggtcctttgtagggattttgtaattttggttggatttgtgacagggaattttattctgcttcattttaaaagtgggccaggtgtggtggctcacacctgggatcccagcactttgggaggccgaggtgggtggatcacctgaggtcaggagttcgagaccagcctggccaacgtggtgaaaccccagctctactaaaaatacaaaaattagccaggtgtggtggtgcgcacctgtggtcccagctactcaggaggctgaagcaggagaatcacttgaacctgggaggcagtggttgcagtgagctgaggtcgcaccattgcactccagcctggacaacagagcgagactccatctcaaaaataaaaaaaaaaaaaaagtggtgctgtaaggagagtttgtatccttgagggaagaccatttatgtttacttacggctttacaattaacatttagtttattgaggttactaattaaaatactaggttttctttaaacaattaaagaattgccttctacttataaatgtagtggattttaattgagtaggaccagtcactctaaaggagtcttaatatttgatcagctgcagttaaatgagattagattcactcagccatcagtccacttggcagtcttggttgagttctgggaagggcaaatgctgggtctcctgtgagcagcccctctgctcagcactgtgccccagggaagggcccgtgtccctgctgggtctccgcccaccatctcttcccagtgagctggtcctgatgtccatgtcagcctttcagtgactgttgctgcaccttcctgcacagtctgttaacagaccagaggaaacccactggtgtggctcaataaaataattctaaatatgcacgtgtctcttgcatgagacttctggggtgctgacaacagggccctgggcctcagttttcacctaggcgtcatcctcatgctcaggaacgtctgtggctaaatctctccccgtgagatgctctttttcttcaggaaataaaggtttttccagaagcatcccagcagaccttgttcggctggagtgggtcctgggggacctctctagtatcctcctattgagg

SEQ ID NO: 93207 - DNA, 36144 bp, Homo sapiens
ggcagattttttagttaatctttttcctcctcctcactccccttctccttggcttaggatcagctgagattcaccttgcgttgaatcattttaataattactctggctttttctttttctcagcacaattccagtggatatcactaggatgtgctccaagaactagggaaatgagccaaggctcaaagcctgaagtgccaagaggaagaatgcttgaggaagaggctgcctagttcaatatgtattgccacccagttcagaaaatgaagtgcactccaaatctaggagattaggttcaactctgatttagcaaatgaatattttctagtttttaaaattgacattgtgaaagttgagtgtatcaaatggagtcagtcttgtcattaccaactaaaatggagtccagaggtcatacgaaagggcacccagttcccatacacctgttccataaactatttttgcaattcaacaaaaaacccacagagacctacctgtggctttaagattatgtcttacctggtaactgctgctacttcatcaagcagaacttgccagttcctgctggcaccaatgaactttctttcaaaacagtgtaccttcctcactttcccaataaaacctcagcctttcccttcgttctttggacacacccaggtgctgcccaggtctgggtgtcctgaattgcaattcctgcattttcccaaataaactctttcttagagattgacctttatatattatttcaaattaacaatattgaggaaaaaaacagaatggacacttatagaaagatatcaaataagactgctcagaagaatagaaccttcatctttccaatcatactgccatcaagagtgaaaagcttattttgttggctgtataatgttttagtaaggagaaagggaagaagaaaggtaaggtgtgatcactgacattgacagaggttatacctgcctacccctactaattcttcaaacctagcttaaaagtaacatcttctggtaggcctttcttgacccttagttttgtttataacttcttaccctccagagcaacatctgcttgctggtggtgctcttctccttctttcttcctcttcctctctctcttcctcctcctcctccttcttcatacacatgacatctgtaattacttgttcactgctgttttctcaatacattctaaactccaaaatgacaggtaccatgtctgccttattcactgcctgcgtcccagcaccaaacacagtgcctgacacaaagtagacacttcttacataattacattaaattggattgatggtcactctaactatggttttatgagccataaaggagaaaaagaaaatgaaaacaatgttccgaattaataccgttggctccatcacttgcaactagaatttgcaaaagattatgtaagtgctgaggggatgtccaacaattacatgattggggttaaaagtctttggatgaggtaaatggtgagtgataaagttttgaagggctgggcatggtggctcacccgtgtaatcccagcactttgggaggccaaggtgggaggattgattgaggccaggagttggagaccagcccgggcaacatagcaagaccccatctctatgaaaaataaataaataagccaggtgtggtggcacatacctatggtcccagctacttccaaggctgatgttggaggatggcttgagcctgggaggtcagggcttcagtgagctatgtttgtgccactgcactccaactgggatgacagagcaagaccttgtctcaaataaaaaaataaaaaataaaaaataaagaaaattttgagaagacaattatttcgtttgctaccaaaacaatgggataacatttttaaaaagaaagattgtattcaatacattgaggaaatgcttaccatatgccaaatactgagtatacaactgtgaataagacatggtccttgtcttgaggagttgaatcccttgtgttagggaagcaggagcctaggagagccagagtggcaccactttaaaaatcaactccatcttgagactaacaaggcacattccttttcggtcacaacccataatcataacacgtttatagttgaggaaacagcctaaagatacctactacaaggacacactcctacaaaagcagaaagcccacatgtcccaatacccataacaatctatgttttcaagataattacagttaagctttgatgtattcacacactagaatgtcaaggatagttatctttaaatcaatagaataatttgtaatgctgtctgctcaccgacatgtagacacagcttagctttttacatagataagacctctgtataaggaaaacttacagacaagacgtgcctcctcttactctctggggatgccctactttgtaatggagtagcttttaataaactctcttctcactgcgctctgctactagccttgaattcctttttgcatgagatctcagaaccctctcttgagctctttttcgacaacttggaaaaggcattgtgagtagataattatagtacaaattggtgagtgactgctacaacagaggtggaattatgaaaacttgaggaaaaaaaagatgattaatctgaggtctcaaagcatgggtagttgaggaaagctgggcgggactttttcttgcattgagaatggcacttaaaacacaaatctagcctggtgtgccaaactaggctaacagtgaaaactcaaaagcttaagcaaaaaagagatcagatgtgcttgtttgtttcaagataactaggtctttgtgtggggagaaaaatcaagtcacacattcctaaattcctcacatacattttctgggcttggattcagactctgctagtcactagctgtgatcacttccctgtgcatgagttttcttgtctgtaaaatggggctaaaaaaatagtatcttagctgggtgtggtggctcacgcctgtaatcctggcacttggggaggccgaggcgggcggattgcctcagctcaggagttggagaccagcctggccaacacagtgaaaccccatctctactaaaatacaaaaattagccgggcgtagcagcctgcgcctgtagtcccagctactcgggaggctgaggcaggagaatcgcttgatccccgggaggcggaggttgcagtgagccgagatcaggccacggcattccagcctgggtgaaagagcgagactccatctccaaaaaaaaaaaaaaaaaaaaaaagtagtatctccctaaaagtgttgtcaggaagccaaaacgagctaatatatgaaaagtatttagaatgctacccgtactatatgtgtgagctcttgtacgaaagtatttctcatgtacctacttgatagcattatggctttctgccagtaagcagctgattttgtctcacatttcattgctttcccttcaggtctcaatgacagatttgtttttgaataaatgaaccatggcaagattcaaaaatacttaagcaatgcttatataacatttaattcagttcagaagatataggcattcagagtgtgctctgcggtaggtattacaagtgctctttttgccccaaattcagaagtggatcttgaactgcctaaaggattcagacctgacattgtaagaatgactttgtgaagataaaaacatatgaagaaagtcgctttccagagattaaaaaattatctacttaataagaaaaattccttttatgataatcttgagtacagagttagcaggtaacagccatcctggtgataactgtattcccatctgtaagagtcagttggccgggcttggtggttcatgcctgtaatcctagcactttggaaggctcaggcgggaggatcacttgaggtcaggagtttgagaccagcctcgccaacatggtgaaacactgtctctactaaaaatacaaaaattagccggcatggtggcacgtgcctctagtcccagctacccgggaggctgaggcttgagaatcgcttgaagctaggaggcagaggttgcagtgagctgagattgcgccactgcactccagcctgggccacagagcgagactctgtcacaaaaatttaaaaataataaaagagtcagctgctcctctattattttaacaaaacagaactcacagataccaataagcagtttattgaagaattctcttcaggaaatgatttcccatacattgaactgattctcttttctgcagtccttttaaatttgatgtcagttcagacagccaaacttactggtaacagtgaggaatattgtagaagaaagaataaaagtattggaaagcaaggcagttattgataattatgcatactggggaaccacaagatttggagaccaggactttgacttttggtttcatcattacgatttaatcacagctgtgatttagtcaagccatttaacctctttaattttcattttcctcattttaaaaatcaaagttgttttgagggtcaagtgaacgcctgtgcgggtgttttaccaaataattattttattagcagataaaacataatattgggggtgaaaagttataagaggtgccatgtttttttaaaccctgccaagtatctgatacagaattgcaaaggatgttcgagttcatgaagaagttgccttctccccacagaggcagagtgacttgtaacatctgtaaaaggtcacagtctggttagcggtagccagaatctgggtctcctaactctagttgcctagtcttgcttttatgcgccagtgtcgttcatcattcattaaatacatgttatggaggataaattaagggcagagcattgtgctaggtgctgtgggtgatcttatcagacacagatctttagggaatctagagattaaaaagtatgaataaagttatgtgacttggtgaaggtcaatggcgatttggtggaagaggtgacaatgcagccacgctccaaaaggcagaagggatttgcacctattatcataggggttaaagaaggaagtccagagttaagaaacaggatgagcaaagacactgaggtcttaagcctcaataaattttaggtaagtttcatcgtagtagaataagggctgtctcactccgagacttttgcacacttttgctccctcggactgcttgtcctggacaccgtgtaacctccccctgggcgcctcaccagacttctccaggccaagggaaggaccacctcttgggtttccatggctccctctctaaccacccccttctcaggacacctatgacacgactatttgacttctttgcctccgagcccccacccccaacgtttctggtcttgagagaacgggctgggcgcatccgtgtatctctagcctgagcacctggagcgtcctctccttttcttcttaaggcaaaagcctactcattcttccagcttcagctggaatgtcaggctctccacgcactcatggccctcccttccgccctctccacatacacagggcagggaagctgtgtctgattcctctttcggactccggggactgacatatcataagcgctcaataaatgctagcggaatgaatggaaacgttccgacccgaggcagcggatcactccaggcttctcctcaaagcgagcacacctcagtccagggagggcgcaggagctggggctgctgcggtgaaccaaccccaaccccgaccccgacgccgatcccggccccagagcgcctcctaggcgacccctggccccacccacgccggagccggcccgcgcccatccccacgccccaacccgcaccacgcaacatcgccctagcgcctttcggggcgtcgccgcgcaggttgcgccgcctccgattggccaaacgcggcatagcgccatctcggcctaccgcgcggtgcgcgccctcattggccggcggcggcaggagcaggggtagggggcggggcagcacgcggggcgcgcggtatgggcggactcgcgcctgagccccgcccccggtccctcgtctgggccgagcccgcccagctggctgagacgcgtggagcctggcggcgagtgggggcgtgcgacggttactctggttactgggsscgcgccgcgctggcgagagccgccgcccgcgagggatgctggtgaggaagccgtcgggagccgccgccgccatctgagggaggtaccctggaaaccaccttttatcggtggggaagtgcagtcgcggtgggcggctctgggggccagcgaaacgggaggcctctaaatctttaggttggggctgcattgccctggagccgcactcttgagtccgaggccatcttttgttggagaaggcgtcggcgttggcgttttcccsaggttgggctgtacagtgtctccgtccgcggaaaaagaagcctctgaacccgcgccggcccgcagcccccgtgccttccggccgctgctcgccgtcgccagaggctaggccacgtttcccccagtgccgaggtgtttctgtgaccctccctccactcccattcccttctgaaagggcacctgctcttggtgagaaaagaaattatagcacgaagagccagtatcagaagagtatccatcacccgcagcaaccgctcagggaacaccatcaaaaaagaaaaaaagggaatatctggatttcctgggcgaggaggagcgagtctgctcgggagctgttccagcaggcgatttttaaatactgctttctacgccctatacaacttggcttcacatacttttacactaactttatatgatttttaaaaactggtctgatcggacttctcgtcctgggacactgtttactggagtctggccggctctccgtgctcctcttggtacctcattttggggagaaccttaaacccactcgagcagataatctccgccttgaccggtgccaccaaagaagcsttggaaccatgtggacttttctgggcattgccactttcacctatttttataagaagttcggggacttcatcactttggccaacagggaggtcctgttgtgcgtgctggtgttcctctcgctgggcctggtgctctcctaccgctgtcgccaccgaaacgggggtctcctcgggcgccagcagagcggctcccagttcgccctcttctcggatattctctcaggcctgcctttcattggcttcttctgggccaaatccccccctgaatcagaaaataaggagcagctcgaggccaggagggtaggttgatttcaaagcgggcagatgaatgtcttatttaggagtaggattgggttcactcaaatataagttttatttgaattgcaaaaggcggcaggttagatgcttgtatacattctcatgtattttttattttaaactctgctgtgccttggttacatctttgaccttcttaagaatgagtgaagacatttgtttcatttagcattggttgagcctcagatggaggttggatatttgattatgaaagatggaacgaaatgttagaatttcattttgaaggagaagaacaaccactttccatgatgmaaaagtttttaaaaagttcttgggtaaggattggatttgtgcctgaggaagaaagaaacgtgctgcgggtaagtccactgcttgtaagaagtgacagctgactggggaaagtgacagaacagtttgaaaagcaggcagaaggagaatgctcaacattttgaggcattgggctcaaagttctcctcccccgaatattggagcattgagtaaatgcttgtagtaatgtcctaacataaaggccaggtcttcaaataagggtgtagttgggattcctgcaaagggagcagaggcggccactgggagaagatgagggggaagagtttaggccagatcatttagggcatgttggcaatgagtgttcgggctttttcccaagagttctcccaagaacactggaggattttaagtatgggagtaactttattcggtgtttactttttaaaaaatttttgttttttgagacaaagtctcgctctgtcgcccgggctggaatgcagtggcgtgatctcggctcactgcaacctccgcctccctggttcaagcgattctcgtgcctcactcagcttcccaaggagctgggattacaggtgcacgccaccactcctggctaattttttttttttgtatttttgtggagacagggtttcaccatgttggccaggctggtctcgaactcctgaccttaagtgatccgcctgcctcagcctcccaaagtgctgagattacagacgtgagccacggcgcctggcctgacttttaccttttaaaaagaacattgcagttgctgtatggagaatgggttgtaggcgtacaagaatggaagcagggctatcaggcaagagactatagcagtaaacgcccacttgctttttaaatttttgcgccaccrtttctggatgtgagatctttggcaaattgcttaatttctgtgagaatctgttacctcttccattagacgggaatggcaccacccttgctggtagttaatacctagtctataaccgcctgataatagtagctgttaatattagcctaggggtaatatacatytcttaggrtgagctttatgagtagcgctgagttcagtgacatggtgcatgggtttgaggaatgggaaaggagggagagagaatccttaatgtttaatttgaactyttttgtattgtggtctgaaataatttcccttaaggtcactgagctctagttcaggtggctggaatgctgttcctgttttcatgctgtgtagagaaattttggagtaggaaaattgggttaccagcaatcaatattggttccattttgtgaacgccccaggctttctctttatttttttgtgaaccagggagttgttagattgtgatctattgactactaagttcccattagtgcttactctactgatcaggctctgcaaggcctgttttcctccagagctctcctttcagggtgtgtgtgtgtgtgtgtgtgtgtgtgtgtgtgtataaaacaggaaaaacttatgaagaagcacatttttggttaagatgacaaaaggggcttgtcttgccccctacagtaatttaaatatagtcagttctggccattaagacatactaatgggaagagtagaatattgagatcttcccatagtaaaaggacagaaaagtatttttctgagagaaattaaaaaaaaaaaaagaatagacaaattcccagtccactatagaggtaaaagaatgctgggtggatattagaatcacagagtaaagttctaaaggattttaggcttcgtcttcctttttgcttattttttaaaaaccccttcaaatggcatttagtcttatcttaatcattaaggtcaaagaactcaaggaaggtggttccttgcaattctgtatctgaaatgtattcaaatgtgtgaatccatctaccaagaagaaatactacaaaattgaattgttcattttaaaaagccactgtgcactgttgttcttagtggtcataaatctctcaaaacaagactttgcatctttttatgatcaaagttaaagttttgctgtcagttcagccagtgacaggtttaatgtttttccttgttccttttttggggaccacctctttgactaggatctcttagagtatcaggatggggaaaaaggagggataaattaaatatgtgcttatatgttaaggaccaaaattgtaaacaagtcaaatctaagagtcggtatgagttatttcttctcttgtaattttgtttatttagataatcttcaattaatagattggtaggcaggatttgacaatccttttgtcatataaaagtgatattaaattaacatagatttttcaaatgaaaatccagaaagagaaaataaagatgaataatgaaaatatctaaggccgcacgcagtggctcacgcctgtaatcccagcactttgggaggctgaggcaggaggatcacctgaggtcgggagttcaagaccagcctgaccaacatggagaagcccagtctctactaaaaatacaaaattagccgggcatggttgcacatgcctataatcccagccactcgggaggctgaggccagagaattgcttgaatccaggaggcggacgttgcagtgatccgagattgcgccattgcactccagcctgggcaacaagagtgaaactcagtctcaaacaaacaaacaaaaaaacaaacaaaaaaaagaaaatgtctaaaaggtgccgaatagtttgtaacatgaactcaaatcagaagttgtaagtgatttgcatcttgtcgattcccaggatatatttgaagaatttagttattaatgatacagtttgccctataataagtctttgaagccccttataaacatttattatattcggcccagtgtggatttctaaatatgtctgtataacattttccaaatatcatgtttagaaaacaataaatatttaattttattgggataatatgacacacttttatttaacgaatattttgatatcattgatttttatatattatctagattttaaaatgtaacaatttgtttggtttgataatatttagtatctagctttagcctaggatgcaaaagtccagtgtgtccacatagcggtagcatgatttgaatctaacaaatttggatacctagtttacctttttttttttttaaacagcgcagaaaaggaaccaatatttcagaaacaagcttaataggaacagctgcctgtacatcaacatcttctcagaatgacccagaagttatcatcgtgggagctggcgtgcttggctctgctttggyagctgtgctttccagagatggaagaaaggtgacagtcattgagagagacttaaaagagcctgacagaatagttggagaattcctgcagccgggtggttatcatgttctcaaagaccttggtcttggaggtaggttcatattgattttcaggagagttacgtggtatgaacaagcactcttcacttagaccatcctatgaccagtaagaaggtattccattttattttcatttataaaattttctatactcatttaccaacaaatttgcatgaaagtgagagcaaaggataaaataagcatttaatagtatgattagatgtgaattagacttaatgagatataataaaatggccaaaagattgtaatggtcaaaattaaggactggaaaatcctagaatgagggcattaaattttgtgaaaggcgaagggaactgtcatttgtagagggtatgttgtatacttgttacagtgttattacttagaatcttttatttaagcaccattcatccattcaaccagtgctttttaagcactggctattcatttaggaaatatttatgcactgtctactttgtgtggggatggggtggtggggtggggtggggtggggaaggtgggagagacacaaagaagcaagccctcccctgtctttttttccaagggcactaatcctatcgtgagagtctaccctcatgacctaatcaccttctaaaggctccatctccaaatatcatcacattggggattagagttttagcttaggaattttgggaggacacagacatccagtcaataccatatttgaacattttatgtcactaatatatatactagagtccactttttcacttgacagaaacatatttccaatactgttaaccattctttatcagtatctttttaagcccaagcatagttgtttttcagttgacttcataatgtacttcacttttcaaacttagatgaatgtttaggttattttcagttatccttttttaggtaacactatagtgaacctattcttgcatgtaactttaaagattattaaatattatgtctttaggatgaatttcttacatggatttccaagagtaagattattacatcgaaggatgctaatttcttcatggttcttgataattattgttatattttctaaaatataatattagttcatagtatcaccagtagtatatgaatttatcagttttatcataatctcatcagtgattttgatggtgtcctgttgtttcaatttttacttaattttttttatcgtttgaacattttttctgatttgttcactgtttctatattgctttatatgaatcatccatacatgtttttgtccattactattggcgtcttaatatttttccagtggtttttaatgagtaaattttattatatatacatgtattaatctyttgttctatttcatatgtctttcccaaagtattgttttagtttttatttttaaaattaattttttaactttctaattttcggttggcactttaaaaatgtgatattttctattgaaagttttttatttttcaactgcttttgctgctttagatttaagaaagaagtttttacatgattctgatgaattcagtgttttgtttgctgccatttaaattatttgatgtactaaaaagttctttgcagtttgtcctgagtcacttttaatggatagtatgtaatcatcaacagttgggggataactctaccctttccatttggtttggaaaatctactttttcatatattcagtcattatatataaattggggtttttttttgagtttccatactggttttattttatttttatttctttttggtgacaaatctacatattcatacattgaaagaagtgttaagaaggactaaatgtgttcctatgtctttatggcagaacaggtttactcaggagaggattatggtttatttcatgttgcattttctttctgaagktgaagtggaattacagacctgaaatagttatgttgttatctttaaatgayattayagatttgctaagactctcattgacttccagaagcattcacagtttctgaaatagttacattagttttgttcagttctccagatttgaaggcagagactcatttttgatgtgtgtgtgtcttctttggttcttagtttaacgctgggtgtgttaacagaattgattgttttgaactcgattgctttgcagatacagtggaaggtcttgatgcccaggttgtaaatggttacatgattcatgatcaggaaagcaaatcagaggttcagattccttaccctctgtcagaaaacaatcaagtgcagagtggaagagctttccatcacggaagattcatcatgagtctccggaaagcagctatggcagagcccaagtaagaccacagtttcaaatatataattactaaagaatcaatgcatttaaatttgacctttgtacaaataagattttataaattttaatgaatttttggggcatagtctagaacatatgtatattaaaataaactgtcagtcaaaagagtgttagatattcagtgcttttgttaagaatatcatatagagaattttcctttgacatggaactatgaagagttctcctttgactaaatgaaaattacataatttttatgtgacgggaatttagaggatatatttgtaactaaggcataagtccatttgtgyacattttggagtttgagtttgtggttaygatactttctattagaagtcaggatacaaaactgcaaggagaaatccctgtttcattctcactaaagacccagtctgttaggactggcttcttctcttgtttattaacttatatttaccagtaacctttaaaacactaattgaagaagttttaagcgtgagaaccctcatgtgactgacacagactaaagtattgacaaagcaagtgaagaagcaagtggacttaatcctttggactaaaaagacttgatatccatggaagaagagtatgttcactgtatgaaaatggaaaaatcggccaggtgcggtggctcatgcctgtaatcccagcactttgggaggctgaggtgggcagatcacgaggtcaggagttcaaraccagcctggccaatatggtgaaaccccgtctctactaaaaataagaaaaaattagccaggcgtggtagcacgcacctgcagtcccagctacttgggaggctaaggcaggagaattgcttgaacccaggaggtggaggttgcagtgagccgagatagcgccactgcactccagcctgggcgacagagcgagactcggtctcaaaaaaaaaaaaaaagaaaatggaaaaatagtcccaaatataaagattataaaaattacctgtgatctttctgactagaaataattactcttttttttttttgagactgagtctcgctctgtcacccgggctggagggcagtgttgcaatctcggctcactgcaacctctgcctcccgagttcaagcaattctcctgcctcagcctcccgagtagctgggattacaggcacatgccaccacgcctggcaaatttttgtatttttagtagagacggggtttcaccatgttggccaggatggccttgatctcctgaccttgtgatccgcccaccttggcctcccaaagttctgggattacaggtgtgagccaccgtgccctgccagaaataattactcttaacagtttgcaggatgcattccaatacttgttttcccctctgtgtatgaatgtatgagggtatgtaaagtttctctgcctatattttattttttaacaaattaatttatttttaacaaattaagatgaaaatccaatgttactttttaaaatatttttaaaatatttaatgattactaatgattactaatgtaatcattagtaatatgtattaaatgttgataaattagaaaataaaaaacacacattggacacgtgtttgcacacacatgcatgtccagtttatatggataaactggagataaggaatttatatttaatttaaattgctgaaatgtgctgctttagaaatgtatttttttttattctttagtgcaaagtttattgaaggtgttgtgttacagttattagaggaagatgatgttgtgatgggagttcagtacaaggataaagagactggagatatcaaggtgagaaataccaaatgtcacctcttcctaagagatgttgtttttcctgctttttcacttacccctttaaaaaagtaggcttaccggtttacatgttgagtatctcttatctgaaatgctagggatcagaagtgtttcagattttttatttttttcagatgtttgcattatacttaccagttgagcatctctaatcygaaaatctgaaatttgaaatgatctaatgagtattttgtttgtcacattactgctcaaaaagttttggatttcagatttttggattagagatactcagcctgtgttatttatcaaatgaactgagttctttctaagccatatgcaacaggatgggtttcagattgcaacacattgttctttagaggacttcagaatgctatgcaaaaaacattttaaacagaactaatgtgaatagtttttgaaacagtaatatacatcagcagagaagcagaggggaactagcaggggaaagaaggcaagattcaacataaaagaaatgattcagataaaatgagcaatttaactcaggtaatagtaagagaatctttttaaaaacaatttatccttttattttattttattttattttgttttattttttgagacggagtttcactcttgttgcccaggctggagtgcaatggtgcgatctcggctcactgcaacctccacctcccaggttcaagcgattctcctgcctcagcctcctgagtagctgggattacaggcatgcttcaccgcatccggctaattttgtatttttaatagagacggggtttctccatgttggtcaggctgctcttgaacttccagcctcaggtgatctgcccacctcagcctcccaaagtgctgggattacaggcgtgagccaccgcacccggccaatttttcctttttttaaaaaaaaattatcgtagtaaaaaacatgtaattctggactgctccccatagggttaccacctcttagaaattgtcctctaatgaaggtgactggaatgttttctctgctcatactgtagtattataaatacatgtagtcatttgtacaaaaattcttctaagccctagctgctgactaaaagcactatatgaagttaggaaattttagaatgaaagaatctggctagtcccttgaatttgtaatgagattgactgctctgtgttacatgcctgccttgtagttgtttcccccattgtctgtcaaagtggagagtaatcccagatggtttgcatgggagggctacaaagggagatgatcctcagggactcagaggaagtatctaaacactggtcatgcgttatctgaagcccacgtaacagtttcttcaatagtattatcttcaactactctctataatgctatctgataatatatctaaatctcttcacgcacattttttaagaatggctttttttrctgtgtgtttctgactactaaactgagtagtcttcatttctgttataggaactccatgctccactgactgttgttgcagatgggcttttctccaagttcaggaaaagcctggtctccaataaagtttctgtatcatctcattttgttggctttcttatgaaggtactgtaggagtgtgttattgtaatttcaataaaagaaacttgaaatttgaaaattattaaaacattttctttttatttgttttagaatgcaccacagtttaaagcaaatcatgctgaacttattttagctaacccgagtccagttctcatctaccagatttcatccagtgaaactcgagtacttgttgacattagaggagaaatgccaaggaatttaagagaatacatggttgaaaaaatttacccacaaatacctggtaagaaatagcatcttcagttcttacaaaggctgtgtctaaaataggccagagataaggatggcaggtgaaacattcatccagtcaaccagatattctggaactgaactatttaaactagcacttaaaaacagcaaaacaaactcccaaattaataaaaaaaagtttcgggccgggcacagtaggtcatgcctgtaatcccaccactttgggaggctgaggtgggcagatcacctraggttgggagttcaagaccagcctgaccaacatggagaaaccccgtctctactaaaaatacaaaattagccgagtgtggtggtgcatgcctgtaatcccagctactcaggaggctgaggcagaagaatcgcttgaacgggaggcagaggttgtrgtgagccgagatcgtgccattgcactccagcctgggcaacaagagcgaaactccgtctcaaaaaaaaaaaaaagttttgatatgtttttgtcacataatagcatagtttttagaataattgtttttattggcatatatggtatttttaaaggtagtctctggacacgaatctgactctgaattctttatctcttatacctaaatatttttgtgcttggtttttgtagtaatgacagctaccatttcttgaatgcttactataaagtgtttagcaaacataatttcatttaatctatgtaaccactctgtgaggtaggcattatcattattctcattttacagatgggagaactaaggttcagagagattagttagctcctccaagtataaactattagtaatggcagaaccagggttgatatcaggtctgtctggctcatatgtgcctgtttgaacagacatgtcctgtccgcagaatgtgagaattgtaagggatcttcaggatcatgttagttttgagttgaatataaaggcttcatgagatttagatagctttgtaaaaacattaataaaaattactttttcacaaatctaaagttttcatggtacagtttttaggatctttttttgagaatgggatgatataggaaagaaaagtaaaaaaaatttaagaattttgataaaattgaagggaaaccctcattgtcaattatgatatgattagagtaataggaaactatttttggtatgagtacattttgtttaaatattccgtttttttcaagttwttttttaaactaagtgaaaccactttagtaacaaattattaacagaaatgaagtgaaatgaagtgggcaaacttagattttaaataatgacattttcaacatgtacatggaaacatttcaataaattttcatttagttaagccacttttgaagctttcagatggggaaattatgaatatttatgaaaagggtcatcsattacctgatatttttagcatttatttttcttttattgtaaatrtggtggtttttcttttttttttcttttttccaatccagaggttaattggagtagagtgccctgaaattatggagagaaaccattggtaggtttatattaatattagttagattaccaarattctactccttaatatgaatggaataatttttaacagaggcttctgctcctctattcccagatcacactgggaattgtatgacagttcattttctatataagtagcacagaaatttaaagcttgtttggaagtatctcagagatgagctgatcaaaccatttcatttttatagatgaagaaattgaagctcagagaggtagggctggcctcgaattccttttctagtgtacataccctcctgctgtttgtgaattggtagtgtatttcatctgattattacaagaatatattgattataatacattaaatattaaatatgacagtagtctgttaacatttggaagaaaggtaggtggttttctccctgtttcatttcatctgaatttgcctcattgttttttcattcagttgtatgtatgtttatattaatgttctcttagattccttagtcattccttggcattaacagctaagtgcttaatgaataattttattaatgaaataattagttyttgatttatcacaagggatatatgtaacaaccataacagatgtatagtaggcatttgtttatacttgataagaaaatatgtgatactttgaaattgaagtgttatgacccatttctttgggttggtgggatttattgcagatcacctgaaagaaccattcttagaagccactgacaattctcatctgaggtccatgccagcaagcttccttcctccttcatcagtgaagaaacgaggtattattttttgggcttattttataaaggaatcagtattccaaatgacaaatatatgattaaatttatactgttacgaataacttctgggacagatagtttgtcactgtggattagtgcattattaataccaaaattagttttatgatctatttagttrttaacattgagtgtatasaagtattgtgctagtcagggaaacaacaggtaaaaaactgaccttgacctagagaaggcctttttctttttttctttttttttttttttttttttttttttttttttttgagacggagtctcgctctgtcacccaggctggagtgcagtggcgggatctcggctcactgcaagctccgcctcccgggttcacaccattctcctgccttagcctcccgagtagctgggactacaggcgcccgccactacgcccggctaatttttttgtatttttagtagagacggggtttcaccgttttagccgggatggtctcgatctcctgacctcgtgatccgcccgcctcggcctcccaaagtgctgggattacaggcgtgagccaccgcgcccggcccgagaaggcaattttctacttaggaatgtagacagataattttacaacactgttgataaataaaacccacagattcagtgtcaagaagtgtgcagagcagggagggaagcttgtgaaatgggaggggtagttagggaggacgttgttcaggaaacagtggaaacaaaggaccttggacctggaggatgagtgggagttcatgaggtggacactaagatgaggaacttctaggtagatggaataacattgccaaaggatgagaaatggtggcactttcaaggaactcaagcagtttcctatggcaggagcatagggtgggtgtcagagtgggagacagaccattaacatttaatcttacagacaatggaaagtcatttgaagtgttttcttgttactaactttattgatatataattcacaaatcagtttgcccatttaaagtgtacagtacagtgacttttttagtatattcacagtgtgtgcatcaccaccacaatcaaatttagaacatttttatcttgcccaaagaaaccccgtacccattggtattcactccccatttcctcccaacactcagccctaggctacccctaatttactttctgtgtctagatttgtctatttgggatgtttcctaaaggcattgtatagtaaagccctttggaactggcttttcatttagcacaatgtttttgaggttcattcatgttgtagcatgtttcagttcttcatttgtttttatggccaaataatcttccaytgtgtggctatattacattttgtttagccattcatcaattgatagatatttgggttgtttctactttttggttattacaagcaatgctgctatgaacatctgtgtgcgagtttttgtgtggacatatattttcatttttcttggttatatacccaagagtgatattgctggattacatagtagttcacgtttaactttttgaggagctgctagacttgttttccaaaatagctgtcccagttacattcctttcagcagtgtgtgagttctaatttctccacatccttgtcagtgaacacttgtattatctttgtgtgcatagccatcctagtagtgtgaactaggccttttatcattgtgctgatttgcatttctctcatagataatgatgttgaacatcttttcatatgcatataggccatttgttgtttggagaaatgtatatttagactttgcatatwtttttaattgggcagatttaaaatttatgtattgttgagtttcaagagtcctttatatattttaggtacaagtcccttattagatatgtgatttgcaaaatttttctcattctgtgggttttctttccattcttmttaatggtttccattgaagtacacatggtttaaattttcatgtttattttttctttcgttgcttgtgcttttgatgtcatatttaggaaggctttgtccaatctaagttcaaaaagatttactcctatgttttctttttctttttttttttttgagatggagtttcgctcttgtcgcctaggctggagtgcgatggtgcgatctcggctcattgcaacctcggcctcccaggttcaagcaattctcctgcctcagcctcccgagtagctgggattataggtgctcgccaccgtgcccagctaatttttgtatttttagtagagacggggtttcgccatgttggccaggctggtctcaaactcctgacctcaggtgatccacccacctcagcctcccaaagtcctgggattacaggcaygagccaccatgcctggcctgttactcctatattttcttctaagagttttatagttttacctcttaaatttagctctttgatccattttgagttaaattttgtgtctgttgagaggaaggggtccagcttgatttgtttgtgtgtggatattcagttgtcccagtatcatttgttgaaaagactrtttgttccccagtgaattttcttgcccttgtggtcaaaattcccttgactgaaaggtaagggtttctttcaacaatattttgtagttttcagagtataagttttgcatttcttttgttaaatttattcctaagtattttaccttttttgatacttttgtaaatggaattttcttaaagaggcagtggcrtgattagacttttatttcaggaatatactctgacatttttgtggaggatggtttggaggaaagtctrgtaaaacatacactaagattaattattctgtcaatgatgataaaaggccagaactagggttgtaaaatgaaaggtaatgaataaatttgggtaatatctaggatgtagaatgtaaaaaacgtgatgatttggatattataatgagagtgaaatctcttgatgtaaattccaggtttctggcttagatagttttgccagccatttgctgacataggaacaggaaaaggagttaattgggttttctttcttttttcttagtttgtcttaaaggtttgctgattttatcttttcaaagaaccaacttttcattttgttatcttttgtatttttttcatttcatttattttggctctgatctttattattttctactaatttggggtttggtttgctcttgcttttctggttgagatgcactgttaggttgtttatttgatgttttcctgcttttttgatgtaggcacttactgctaaaaactttccctttaagtattgcttttgctgtgtctcacaggttttatatattgtctttgcatttttatttctatcaagaaatttttatatttacttcttaatttcttcattgacccactggtcattcaagagcatgtggtttaatttccatgtgtttgtatacacagtctccaaagttcctcatagtactgatttctagttttattccactgtggtcagagaagatacttgatatgatttcaattgttttttgaattttttaagccttgttttgtggcctacccatgatctatccttgtgaatgatcgatttgctgaggagaagaatgtgtattctgcagttgttggatgaaatgttctgtgaatatttgttaggtctgtttggcctgtagtccagattaagtctgatgtttgttgtttatctgtctggatgatctattcagtgctgaaggtggggtgttgaagtctccagccatgattgtattggggtctgtctccttagctctaataatatttcctttatatatctgagtgctccggtattgggtgcatatgtaattgttacatcctcttgctgaattracccctttatcattatctaatgaccttctttgcctctttttatagtttttgtcttgaaatctattttactgatgtaaatatcactatgctcttttttggtttccatttgcatggaatatctttttccatcccttcattttcagtctctktgtggctttataggtgaagtgtgtttattttaggcagcagatcgttggttctttttttaaatccattcagccacttaygcctttcgagtggagtttagtccatctacattgaatgttattattggtaagtgcgtactattgccattttgtttttgttttctgattgttttgctgtcttttcttccgtcctgtttcctttctgtgaaggtaattttctctggtagtatgttttaatttcttgcttttaatttttttgcctacctcttgtaggcttttgatttgaaattaccaggaagcttgcagrtcatatcttataaccgattattttaaactgatgacaactgattccacaracgagcagagaaaactaataaaaactctacactttatcctccttgctttttaacttttgtgagttttgtaccttcatgtaattgcttactgctcgttaaggtccttttcttttagattgaagaactcacttcggcatttcttgtgggaaagtttggtgttgatgaagtccctcggcttttgtttgtctgggaaagtctttatttctccttcatgtttgaaggatattttcactggatatactattgtagcataaaagttcttttccttcrgcactttcagtgtgtcttgcccctctctcctggcctgtaagatttccactaagtctactgccagacatactagagctccattgtttgttgtttcctttctcttgttgctcttaggatcttttctatatccttgacctttgggagtttgattattaaatggcttgaactagtcttgtttggattaaatcaatcaccaatccttgcttggtgttctgtagcyttcttgtgcttgaatattgatatctttctctagatttgggaagttctctgttattttttcttcaaataaactttctaccctcatctttctctatctccttttaaaggccaagaacttagatttgctcttttgaaattattttctagatcttgtaggtgtgcctcattcttgattattcttttttcttttgtctcctctgtgtattttcaaatagcctgttttcaagcttactaattctttcttctgcttgatcagttctactgttgagattctgccatgttcttcagtaagttaattgaattttttatctccagaatttctgcttgattcttttaaattatttcagttgttttgttaaacttacctgatagcattctgagttccttctctgtgttgtcttgaattttgttgagcttctccaaaacagctattttgaattctctgaaagctcacatctctgttactctgggattggtcactggtgccttatttattattgttaatttagtgagttcatgttttcctggatggttttgatgastgtggatgttcaccaatgtctgggcattgatgagttaggtatttattgtggtcttcggagtctgggcttgtttgtacccatcyttcttgggaacgcttttgaagtattcaaagggaagtgagtgttgtgatctaagtctttggtcatagcagccgtatctgtattaaggggcaccccaagtccagtaacattgtgacccttgcagacttgtagaggtaccgccttggtggtcttgggtaatatctgggagaattccctggattatcaggaaaagaactcttggttctcttcccttactttcccccaaacagagtctgtccttctttgttgagctgcctggagctgtgggggacgggtgacacaggtatgcctgtggccaccatgactggcgtgtgctgagtcagacctgaagccagtacagcactgggtattggtgaaaggcttgtggtgatgactgcctggtcaccgctgatgttccctcaagactcaagagctctacagtcagcacaaatccagccaggcttgtgcccttcccttgagggcagtgagctcctgggggcccaggactggtccagaaatgctgtctgggagccagggcctggagttgggaaacttaggaatctacttggtgctctattctactgcagctgagctggcacccaaaccttaagacatattccttcccactcttccctctcctttcctcaagcagaaggagcctctccccatggccaccagtgctccaggcctgcagtgagtactgcctggctgctgctggtgttcactcaaggctccagggctcttcagtcagctggtggtgaatgctgccagacctgggtctctcccttcagtacaatgggctcccctctcacccaggacggatccaaaaatgctgtccaggtgccaagacctagaatcagggaccccaggaacccacttggtgctctgtctcactggccaagctggtacccaggctgacttttggttcttatgaaggtgctttcctgtgtgggagggggatgatcgccagaggacttgctttgtatacctggatacctgtagattctttttattttcttcatattttaaggaggccttacaaatgtattgacattattggacttgtcattaggtttgtatatgagcttcatgagggcagaggccacactcttgttattaccatatccccagtgcctggccacctattaggtacccaacattgattcaaacaactcttgaatttttgcctcagcaaattttaatcatgatttgttttcatgtattttcacatttttcttattattagcttacatcagtaatctttatacattgagttatcctttttgttttgtctcaagggatgctctaaaataaaatcttcattacctctcttcataggtgttcttcttttgggagacgcatataatatgaggcatccacttactggtggaggaatgactgttgcttttaaagatataaaactatggagaaaactgctaaagggtatccctgacctttatgatgatgcagctattttcgaggtaagatcaattattttgacaaaaatgtctcaaaatggatttatttctgggggttaagagcagtggggctctgatggggagatctgtactaaggaacctgatgctttataatagctcttaggcatcttgcttaggcttaaagaacctgacttgcaacctgtgaatcttagagaatttctaaatttgaatattatgtaacacttgattgctatgggccacttagctcatagtggttgtaaatttagcttcagtgtcatataacccattgctctgaagktgaytttttattttttttgtaaatgataaacataaggcaatattacttgcagatagtccttagaaggataagtatcagtttgaggggaytataaacatcagtttgtgcttttttatccttaccatataataaatgagctatttcttttttaggccaaaaaatcattttactgggcaagaaaaacatctcattcctttgtcgtgaatatccttgctcaggctctttatgaattattttctgccacagatggtaagtgtagacactttttagtgaatattactcaattgcagatttttagcgtaggaaaggaataaacaagttagtgatttgtccagaaataaaaatgttacctgagtttgctaactcccaagttggtagttttttaaaattccattttgagcaatagttgtagttktagttttagtttggaaggtagtggaatttccttagacaacattaatagcaatgcctcagtaacatattcattattttgaattcctctggtgcagactagatcatgcttgtcctcacacacacaagactgtgatggaaggtgtttttggccatgtattaaaaggcaatgtagtctttttcttcctaacactagtttcaatttctttttaaagtagtattttataaaatgaatacaagctgttaatcttgtccctgttgaaaagcacaagtaacaatgcattcaccctttacttatttggattattttggtgcttttgttactgtttccatattatacagaggtcacggtcaatgtatatattagagaaaacacaacttagcagaagcagtgttagaaatggaggaaaagaggccaggcgaaatgattcatgcctgtaatcccagcacttcaggaggccaaggcaggaggatcgcttaaagccaggagtttcacaccaacctggacaataaagcaagaccccatctctacaaaaaattaaaagatcagcaaggcatggtggcgtgtgcctgtagtcccagctatttgggactatatagctcactacagtgagctatatatagtgagctatatgaagtgccactgcactcagcctgggcaacagagtgagacttcatcttctaaaacaaacaaacaaaaaattaaaagaaatggaggagaaaaggcaactgtgccacctcctcaccacagcagtgtacacatcagtttaatagtaggttaatgaaactaggcttttcagttttcaagaataaatactgactcatatgccactactctagtatatttgcaacatagctatttgtatgatctggctgaggccctagtgataagtgctgtggttataattacaaaagatgatacaataaaaatgctttctgtagcctctataaccattaactcttcctaaggaaaaaaaacaaaacaaaaaccccaccaatctcactggttatgatttttccaaacaaatttctcttgctaaattggcatagaagttaaaatggctggttgggcaaatgaaagtaactaagtttagagttttgggcaaataaaaagaactaagtttagagttttgggcaaataaaaagaactaaatttaagagtttttctgagctcttctttctaagcttttctaacttcttgagttcttaacattatgaatttaaatctaccaacaaaacaacattttttaaaagttacaagattggaggaggaaagacctttattggagcaaaagtttacctgttgcatcctttactttttaaaatctgttgtaaagaaaaatctgggcatacctgaacagaacattgattctaaatggttaaaaaggttatcaattgattacactacattgtgagggttttatgagttactttgaaaggtattaaaaactttatagatataaggaattattatttatcgctactcacagctctcttcacttgataatttactgcttagttagagatactggttggacatcttagagactrggaatttggtttctagaattgtgttaaaaagagcttccaaagtattttgcatcacttaatgaattaacagcaaaatcaaggaagtaccttttaaacaactcttccaagacctaaatattagtagttwtttactaacagaaaaaagtttattcatatttatattactctccataatgctgattatggaattcagaagaaatcctggttgttgaaattctaggactagatatttaaaaattatctgcaagatgtagcgtttgttatttctcattttttctgatatatcattagcatcctacataagtgtgtacacatatttgattattttacaattttattttagattccctgcatcaactaagaaaagcctgttttctttatttcaaacttggtggcgaatgtgttgcgggtcctgttgggctgctttctgtgtaagttgtgatggcacagaggatacaaacctgccagattttcttaggactgttcagttgatgaattactgcaaatctttcytccttacacattttgatattttattatctgttagtatcccaatgagaaggtggcccaaagaaatgaagaaacgcaatatttagtactgttttctttctagggaacagcagttaaaggtggtggtagaggaagctataacccttgattaaaatagaagcttgttttttgcctatggatttatccatatgttctggtctgtgggagccaggaataattgagaaattttaatttaagaattagtttcattgaagtacrgggacttatacaacccagtattagttttgagcgtacagacatatgtggaactattcttggaaagtctacaaagtgaaatctatcgagttatttctcatttgcaaagtgatcctttgagtcatttctcataatctataatctgaatgttaatactgrtatttttaaaagccctacatcccaacagaccaggccatctagatatttcagcgtggtgtctcaggatgagtaaacaaacagctaaaaatatatgacttatgtaaactagagttacaggagttactagcttttctgaaagggatatattctaagtattttttcttaaaaaaaaaaaaaggggggtggggggtttgctcctgccatcaaacttaacatgcagacatatttgtgacgtcctctaaaatgtagaatgtttcatacagaattatgatgcttgggtaaaaaaaagtaggatgtttgttgagcttcgtagattatatgtaattggaacctttggagtaaattttagtttctgagtcttaccaatatgtatttttttctattacagattgtctcctaaccctctagttttaattggacacttctttgctgttgcaatctatgcygtgtatttttgctttaagtcagaaccttggattacaaaacctcgagcccttctcagtagtggtgctgtattgtacaaagcgtgttctgtaatatttcctctaatttactcagaaatgaagtatatggttcattaagcttaaaggggaaccatttgtgaatgaatatttggaacttaccaagtcctaagagacttttggaagaggatatatatagcatagtaccataccacttataaagtggaaactcttggaccaagatttggattaatttgtttttgaagttttttgtatataaatatgtaaatacatgctttaatttgcartttaaaatgaaggggttaaataagttagacatttraaagaaatgattgttaccataaattagtgctaatgctgaggagaactacastttttcttttgaatttagtatttgagatgagttgttgggacatgcaaataaaatgaagaatgaactttcgtgtctttttgtttcttgttgtgggctcgtttacatagcttcatgataatgaraaagaaaaccaaagtgggatgaaaagtgcagagggaaacctgttctattaaataactggggaagttgccttaatgtcttgaccttgatttcctcatctatccagtgaagcaatttgataaggttattttctttaaaaaaaattacttatttatttatttattttattttggggctgtgactcagatttgaaccgaaaggttctttgctgagttctctgaaaatatcagattctgacaggaaaggcaatcaagggctttataagttccactgtatagcaacatttataaggcagcccaggatgacatcaagaaacagtgagtgaacaagtaagcacttgtaatacccggcataataccttaaaatccgttaggatttactgagtttatctatagtaaatttgaagagactatggatgttcaaagggtatcatcataaaagttcagtaaatctccaaataccatgaaagtaaattgttacttctgaaagagcagtaaaatataacctggcaaatgaagttactacttgagattctaacagggctaaaatataacttacaaagcttttacaataaaaatttcaatttttaagttttttcagttgaaaaaaattcttcactggccaaatcactagcaaaatcagtttcaaacatcactgccttgttttagtagagcatatggtggacccatttgcttggtttcgtaagattcccatctaactgaccctaaacttctattttctggttaaaaactcactttcccagatctggccttcttagcagttagttagctttctttttcgagaacaaagatctcacttcatgtggttattgttaacaagattacaaatgaaaaataacacgctatcgttgagatatagatgttcccacacaccgtctttgcagggggtgagacttccaagctccctacgtaccaagcaacagttctcttaaaattctgccctggcctcggtgccctcatggccaggattcgaggttacccttgttcgccactgagactcctttaaagtcctttctactatgatagtgaaataatcaaagcctgtaaagtcttttcttcccttcaatatcagaatttgaggccttctgacaaaagaaataaaatgagaaaaccgaaggaacctgagaaatcctttagtcctaattttacagatgatgccagtaggctggcttgggacaaggtgtagcttgtggcagaaccaggactcaaacttaccctcctgattgcaaatcagtacatcttcccccaccactagcaaaatgactgtcaaacagattttggcttctgggtttggtttggtttgttccttcctctccagagaaggacataaccatagagatttagggtggaaacatctttcttgctctcatccaagttgttgatacccaagttgccacagtaggatggcagtgatatggtgtggctctgtgtccccacccatatttcttcatagcagtgtgagaacagactaatagtggcagcttccttttcagggtaattttcatgcagaaatgatttaggatttcgagggagttaagcttatgggaaggctattaccaaaaaggactctggataatgatacggttgtggggacttggggcaggactcaggttgctgaggaagataccggaaggagcagctttgttaaggagtcctacagaaggaatgctgtggaccccctagggcatgtgggattggaagaggatgatgagacaccaagaaacttcaatggcacatgacacagattgtgtggccactacatttgctactagtctggctatcaccacgtgcctgccagcttgttgggggtgagctattatacctagcagagtcatctcttattccaaacagggttttttacagggtgaatacacagtttttgaatcataagcgagacgactttgggtactagtaatactattttactgaaaatctggagttgcacaaatagttctttagaacataaaactaaatggatttatacataacagttacattcagcatttaagagaggcagtacaaaaatgtgttctgcttttatctgatataaattgcatgtaataccatgatttaaacaatatcagttatattaactaatgccatgagatatatcttactcagaacgtctgatgtttcccataatagacagaaaaaatgcagttgtatgagcaactgagtttcttttcatcttcaaattcatttgtgatggtgggaagatctaaggacaatccttccattgaagaagtaggaaaaacagttacagcactgttctgaactcatcaaaaatgaaattaggcacatgtgcttcagcaacctgaaaaattaaagaattaaattattcatggtgttatagttgaacaattacaaaattttcatacgtaaaagaaaagatatccttggagcaaggtgaataatagaagaggagactcccatgggcggacgactccttgaaacagcccctttctgcttgtggtgccccctagactagcgtctcatttcttggcactgctaacatttgaggggatgcagtacagctctcccgcctccaaatctgagcttcttggctcttaaaggtaccttgatctgcgaggaatgttcttgcctctgggaagtactgacaagtactcaggtcacctaatacacttcattaactgatgaccaacaaggaagaacaggatggctggcaagtgatggggttggagaggtaggggagggcaggaatgagaatgagataccaaggccagaaggggaagagcaggaaggccttcagaggcatgcattcctgaactgttcttgggcaaagccctgagaagactaaattgggctcagttgggtagaatgtagaggtaggtgatctccaagtgctggagatgagtattttttagaagcagtgtttaattttttttctgatcataaaggtataacctgctaatgagaggaaatttagcaaatgcagaagagtataaaaattatttttacagtgggtggagggcaaggggagggagagcattagtataaatacctaatacatgtgaggcttaaaacctaggctgggcgtggtggctcacgcctgtaatcctggcactttgggaggctgaggtgggtggatcatgaggtcaggagttcaagaccagcctgactaacatggagaaatcccatctctactgaaaataaaaaaatcagcagggcgtggtggtacgcatctgtaatcacagctactcaggaggctgaggcaggagaatcacttgaaccagggaggcggaggctgtagtgagcccagatctcactactgcactccagcctggcgacagatggcacatgtataatacctatgtaacaaacctgcacattctgcacgtgtagcccagagcttaaaatttaaaaaaatatttttttaatcttaatcccttaaagaaaataaaaactggcaacttttgtaatgaatttttccagtttacttacatatgcagacagacacacacacacacacacacacacaatcaaaattaggatcacataatattgtgtccttctctacctctgctaaatcttatattatgaacatccttgggcacatatcttggtaaacctttgcacatatatccagcaggtaaaattcctagcagtggaattgctgggatcagggtaagtatattacaaatgtttttttaaaatagataaagctaaattgccctcctcaaaggctgtcaatttacattccaattaatagcacttacaagtcccatttctccaaatgcttccgaataatgggggcccaacattttacctttcaccaacctgataagtggaaacagtaattttcgtatttggatttttgtcccttgaatccgaaggtttgtcatttctattttcttgaaaactgcctcttaatttcctttgcccttcccctgctttttttctattggcttggacatctttttcatactgaacttgaagatttgaagagcacactataaatcaagaaactagtcctttgttggtatttcctcttttgtcttttgttttttaactgagacactgacacagaattaattacattcagcatttataaaaaatcaagtctctaaatctttttctttatagtttcttcttttggttttatacttaggaatttctgagagctgatacatatttgcctaaaatttcggctaatttatttgtttcatatttcacactaaccctttatctgtaattaattttgataacataggagatgtaaaggggactaagttgctatttttttaactgtgtgaacttacatctattgactaatattccctttctctcttaatttgagatgctacttttccttatgtaccattgtatgcacagggtgtgtttctaggctacatattcttgctcattgttccttctatttagttgcataccagtagcaccctattttggtttctacagttttacagtgttttaatacttgatataatattttaatatcttttttttaaaaaaggacttgcctaagtcctatgacattttaaaaaatatattctttgaagttaaaaaagtacctgaaatcttgattgtaactgcagtaaacctataaactagatagaactattatctctgtaatattcgaggaccctcattcagaaacatggactttcaaattttatatttaaaatttttatagttttttaataaagtgttctttcatatttcttatagaggttattcttagctatatcattgccttgttatttctgtgaataggtcctttttcacactgtattttttaatcgattgatgtatttcatacatttattctgtagccagcttgttttctgatctctgtattattttgatagtttttcacatgattctattgggtattcaaggaagacagttatgcagcaatcccactactgggtaactacccagaggaaaagaagtcattattcaaaaaagatacctgcacatgcatgtttacagcagtacaatttacaattgcaaaatcgtggaaccaacctaagtgtccatcaatcaatgagtggataaagaaattgtgatatatacatacgatggaatgctacgcagccataaaaaagaatgaattaacagcatttgcagtgacccggatgagactggagattattcttacaagtgaagtaactcaggaatggaaaaccaaacatcgtatattcctactgatatgtgggagctaagctatgaggacgcaaaggcataagaattatacaatggactttggggacttggagggaagaatgggaggggagtgaggataaaatactacaaatatggtgcagtgtatactgctcaggtgatgggtgcatcaaaatctcacaaatcaccactaaagaacttactcatgtaaccaaataccacctgtatcccaataacttatggaaaaatagaataaaaaaggaagacaattaatctcaaataatacagagtttgtcttctttccaatatgcattttattttcatttcatttcttattgtcttgcacctgtataacaaaagtagttgcaagagtctgtatagttgtcatgacactgtgacagtcctggctttaatgggaatgccactaacatttcactattatgtactgacattgctagttaattttaaaagttcatctttggctcatgttgtaagaaagtatctttgattcctaacctactaatttctaaaaatcaaatgattttcagtatctgctgaaagttgtatttttcagtatcaagctctccactttgagctaaaatttaacaaagtggaattactaatgagaaagggataggaaagaatgtcttggcaggtaaaaagtagtctgccatttttggaaacagtgctcatatatacatttagttgtggcatgaacttaactgtgcttgctgtgggaaccaggtcagtggagagagaaag

SEQ ID NO: 93208 - DNA, 15377 bp, Homo sapiens
tctttaagaaaaaaaaaaaaaaaagcagcagccgggcgcggtggctcacgcccgtaatcccagcactttgggaggccggggcgggcggatcacgaggtcaggagagcgagaccaacctggctaacacggtgaaaccccgtctccactaaaaatacaaaaaaattatccgggcgtggtggcgggcgcctgtagtcccagctactcgggaggctgaggcaggagaatggcgtgaacccgggaggtggagcttgcagtgagccgagatcgcgccactgcactccagcctgggcgacagagcgactccgtctcaaaaaaaaaaaaagaaagaaaaaagaaaaagaaaaaaaagaaaaagcacctaccacatcagagaatgaaatacttacattaaacccaaatgttcttcatttgttaaagtggaaactcttaccatcagtaaatcttgagctcttagatgtcaaagttacgtaggcttccaaacaagaaattctctcatctttgtctttaaaactcatgccaaaataatgccacttaaagaggaaaactttagtttgcacaattaattgaaaggtgcagcagcatcatgattgctcaaagtcgaagggtacacagggtgcatgccgcagggattattcctaacacttgagaaggtctaaatcattttgaatttccttcagccctccagaaaatagttatcttaatatccttgttttctccagctggacttagacatgagtaaacttcccaaattcgggttcctgaaaaggcagcgtgtgctgcagcctggcactgactcccccgaggagctatggcgggcgggtgggtaacggtctcaccagggcgtcaaagatccgctaggcccagaaagccaagggcagcaggggatgggctggcgtcaccaggagcggaggagtgagggctgccgcgcgcctccctaggcccagcacctggaagacacagggcgacgcggggccgggccgccgggagacccgctaacgggcactcgcctggggtcccgccgcctgcctggaggccgcggggccgggcgaggcgccgaagcggacaggtgggagaggagccgggcagcagccgctggatgggccggggagaagcctcggcctcgccccctgggatgcgggctatggcaacccccacgccagcttcgcgtggggccgctgcctttacctccttaggtttgaacggcccgcccggggtaaccgctaagmgcagccccgccccgcgccgcgctgtcccgccccttcctccggctctgcagcgctcccgcccggccrcccgcaggcctgggtcctcgcttgagcgggaggagcgccccctctctcgctcacccctgcacccgtcccgaggcgggtcagaaaggctctgcttctccccattcccactttgggaagcattaccgtatttaggaatgctaacgtggcctacagtgggatgccattagaaatcatgtatgagaatgttcccttggaaatgattctccaaactgtcaagtgcaaaaagcaagttacaaactgaccccttttaggttaaaaatatggatatacacaggatgaggtctgaaaggtatgaataacttggatacggtaaatttgtacaggattatgtttgctttttagttctttttatctgtgttttcttctcatgtttcaacaatgaatatatacagattttgtgataaaaaagctgagccgggcctggtggctcacatctgtaatcccagcacagaggtgggaggatcacttgagccaaggaatttgagaccagcctgggcaacatagtgagacccccatctcaaaaaaaagatttttaaaaaatctattcataaaaaccagagtgaaatgtgttcattgtttacaaacatccatttttgggcatcatgaactcccaagtaccctcaaagccaaataaattttttaaaccctaattttttcattcaataaatatttactgggcgtctattatatgccagggacactcctgctgctcttggcagcttcttcctagtctcctttttctggcttcttttccttggcctactccctaaatgagaggtcctacctcagcatttttattagtttatcatcccatgcttatgtaattcttattcagaacttcaaccatcacttttaagccaataacaggcactaccaccactcttctctgactggacatttctccaactggatgtccctcagtcatccaaaaccaaactcactaaaattattatgagacagggtctcgctctgtcaygcacgctggagtgccgtggtgcaatcttggctcactgcaacctccacctcccaggttcaaacgattctcctgcctcagcctcccgagtagctgggatgacaggcacccgccaccacgcctagctaatttttgtattttcagtagagacggagttttgccaggttggccaggctggtctcgaactcctgacctcaggtgatccacctgcctcagcctcccaaagtgctgagattacaggcatgagccactgtgcccgtccactaacagttattaaattccaactatgtgccaattactgtgctaggtactgggaatacagagctgacacagccacagttactgctgttaaggagctcattggtatagagcaagtgctgtaacagaggaacagtagcagcacaaaggaaagaagaaccagctaactctactggagaacagagtgcatgagatagattttgatgtacaagtggcaatttaaaaggcagacagcaggaaattccaaacttaaaatgtataagggcaggaaaatttcaaactcaaaacaaaatgtgcaagagcagttgggcacatggagaagctgcaaataatttgttataggcagaaactaagagttgttagaggaaaggattagagaaaattcctgagaagtgaagaagctaagtcttgggaagttctggttgcaccttcagagtttgaagagcattttagaaagtccactctggtggcagaatggaggacagaatgaagagaggcaagggtggctgctaggagaccagtaggaagctactgcatttctccagaaggcagtggggggtggagcagaaccaagatgtgacatgttcagttggcagaatcaactgcatgaggcaaggagtgagggaatgaagagtataggcttgggagaaaataagatgcatttagtgtgaggttgttaagtttgaggtacctgtaggactgtaaagaattaatgaattacacattcttcaagacagcacctctctgaagcctacccccacactccctggtagagtgaatagtaccctctctagctcttcaaacaaatctctattacagccattttaccctttcctgccccacatttgcaattctcctgcagaattctactgaattttctctgtgtagtttactaccttctaaaatcccatattatctactcatttttgtttaatgtctgctccccatctccatcccaatgtaaacagggcagggaattttgccaatggttaagtagaatccacataaccccaaaaccatttaaacattgcccttttcttttttctccagttaatttatttttcttgagatattttattatgtctgaggagtgaaaggctatatctcctttatattgttcaaggaagaatcattgtcacctctccccacctaaaaacgggcaaaaagacacctagttatatgtagtttgcctgagctttacttacatactccagattgaagccactgagctgtaatttcatattctttacagtcttttgcctttttgcttcccttttttttgagacagagtctcactttgtcacccaagctgaagtgaagtggggcaatttcagctcactgcaaccttcgcctcccgggttcaagcgattcttgcacctcagccttccaagtagctgagattacaggtgcatgccaccatgtctggctaattttttgtatttttagtagagacggggtttcatcatgttagccaggatggtcttgaactcctgacctcaagcaatctgcccgcctcagcctcccaaaatgctgggattacaggcgtgagccacggtgcccagccctttgctttcctttcttgcattgggtgtcatcccatcactrayttcagaactctaaaacccacctgcttgccacaaaatctgatgcttctttttgggaccatccaataaaacgtaatgggagatttcccaaattaccatgatattcaagctatctggatatatttaagtgaatataatcaaggaaaaaggaaagacagagattcagggaaaaaatagcaacttgcatctccataaccttcttaataaagagttaaaagcattgttttccaggatggcaagacaactacccccattaaaacagagcaatgcaatgatgtctggcatgtagtacatgctcagaaaaagttaatgctatcattgataatagtgtagcttacactgaccaaactcccaagtgatcctagaactaccagtctctgttgataggaaagagcgtgttggattgggaactagcaccaacatgaattcttgttgaaattctggatcttcttgctatgacttgtcattactttgcccttttgtagggccccaggaccmatttgtattctacatatgttgatccattctgatctccataaattgttctgcacgagaattatcttgatatttcaactggagagttaatatacaagagagcttgtaaatatgaaagtttgacttttgggatcactctgtcatctttctcttaggataacaatggttccatctaatagttcttacagggaagcctattgtgcctcttgtattagatcacctctttggttaagaggagaggtactttgtaacagggctaatggttaaaatatttatgctctgttagcctgtctgtgaagaaagaagccaggaactgctgcgttttcctgaagggtttttaaatggcatcttcctggaaagatcaacttaaatctctcaagctggtctggggagatgcaacagaaggagtttgaacttctggaagtgaaaggtgaagctcaaagttctcagatttctggatggagggcccgaaaggagtataacctgcttaataaaatatcagacatagtgcgtgttgggagaaagaacgcctacttctttcactaactttaaaatagttattaacaattaagttatttttaaattttttaaaatagcttcattttcttcaccctactaagtaaaatatcttctggaaaaaaaggaaacaaatgtaaactttctgaacccaactgatccatcatactgaaattctgatacttgaaagaacgcacctccactgagcagggcgttttgttcttctatggtggaatacatagaacggagggcgggtgagtagacagcgaaagctaccaaaatctcttagatttaagagggagttgttcatgtagctaccgtcacactaacctttgctttaaaacaagtaaacggattgggcgagggatgtgacagtagcctatcagagaaggggccagaaagcaaaaacaaaatcaagagaaagrtaggaggcagctgccccactgccccagtacagatatcaaacaatttttaaaaacaatctggaaaagtgtttttctacgtgaaaatcattggtgtagtcgattcttctatgttcgtccgagtaacggctatcctagtacttctcggacactgtcatctcggtttttcttctaaccctctacccttctggaaaagtgttactttgtaccactacattagtcagaaacacacaccgccttgtacttgcataactgttaaaatgctctgctttcctgcaaaattaaaatagctggggaccaggcacttaaacccgtagaatctaatagacagaaagcccctgctttaccgcctttgcgccatccgggttgtctggccacgcctggggcggaaggggcggggagtaagagagagagaaagagagacagcactgtgcgtcatgtaccagcgccggaagttggtctcgacacctggactagccgggttgtatttggaaacgcggagtgagtttttccgtgctgtgtaggtaagcgaattggcgggttgrggtttgtggtggatatttgggccaaaactggaaagacacttggggtaaaaaggtccggtatgggggtagagttgagagtggctggggatacggtccatgctatcgctyktttccctattttcttttagtttagatgtttagccagtaggagttatttcattgttyttcsctcggtgagcctgttcccctgttgagggatataattttttttggctaacttctgctagagtttgggaaaatagaacttgtgttaaacgagaacgcgagctttacagtcagatctgtatccctttgacttttagtagctgagtgatcctgcggaaattaacatgtctaagtatcggttgcgtcctctgtaaaacaagagtgatgtctcctaggattgttatgaagattataatggcctaacacgtatgaagtagttattatgtccagtttggggtaaacgctcaatacttgtgtgtatgcgtttcgtccttgagacctaacccataggatttggggaaaggaacagattaggaattggatctttgtagcttttcctgagaaaaatgggcccggatggacttgtgagaagcccttttgagatattcagtatttgagtctgtgatttcaggggctaacaatggacacccagaaggacgttcaacctccaaagcagcaaccaatgatatatatctgtggaggtaagagtagcacytacctaaagtaagaatattttatttaagtttttttgaaatygttacatttattctttgcttaaatgagttactggtcttcagagttataaagtagaacactttagcaaccataaaaaaaatcgttgaggtcagtagacctgggttcgtccttggtcttctgtttactaacagaaaaaaacaaagctcgttgagatttcattctctctcctggaaatatgcatggcctacaacctttttctttcctatttaatatatttaataaaagcagcagacccttgagattgagtatattttagtgttttggattgccttaggtaaataatacakttaagataatttgtctgtaatattttyctcttaggcattgagtaaatttttttttttaattctagagtgtcacacagaaaatgaaataaaatctagggatccaatcagatgcagagaatgtggatacagaataatgtacaagaaaaggactaaaagatgtatccttttaacgatgctttctaaatatgagttaggaggaaatgaataatgctggggttgataaagattaatttctggttaaaatgataactttctggattacagtacttaaaaaacaaacatgattagcattttcatggaccaatgcataggctctaaataatctaaataatgctagttgattttggttctcataaatttattttttagggattctgtgcagtcaagcttgaggatagggatacattctgagaattgtgtccttaagcaatttcatcattcctacagaaacctagaccgtatatcctactatacatacacatctaggctatatggtatagcttattgctgctaggctacacacctgtacagcatgctattgtactgaatagacaattgtaacacaatgtttttgtatatctgaacatagaaaaggtacagcaaaaatagagtataatcttatgcgaccactgtttatatgtgctccatctttgaccaaaacgtcattatgggtgcatgactacatttatataagtattcattcttgagcttcagtttatggacaagctaaagttcacgaggagaaatacaaatattgtgtatactacctaatggaaaaagttgggcatacaaattgttcaaatactgagagtaggcccagcatggttgctcacacctataatcccagcactttgggaggctgcaggagttcaagaccagcctgggcaacatagtgtgacccccatgtggaaaaataaaatacagagtaaattgttatgatacaactaacacacattgtaaatcgacggattatccgctttaacattactttagtgtttttttttgtttgttttttgtttttttttgagacggagtctcgctctgtcacccaggctggtgtgcagtgacgcaatctcggctcacattgcaagctctgccttccgggttcatggcattctcctgcctcagcctcctgagtagctgggactacaggcacccgccaccatgcccggctaattttttttattttttagtaaagatggggtttcaccatgttagccaggatggtctcgatctcctgacctcgtgatccgcccacctcagcctcccaaagtactgggattacaggcgtgagccactgcgcctggcctgctttagtgttttttgatacattttatggaaaaggtggtaataaaaattgaaagtgtttttagtttatttaaaaaccagttgtcatagtaaatagtgaattccattcttttttgcattttaagttaaataacaaaccagcttattgcaaagagaaagtgactttgaaaccttcagtcttaataatgtttaagtaccgtttttgtccttaactcaaattaatacagtggtcgtttttgatgctcgatgaatgctgggaattcagaggaatgtcttcacttatacttggatttgctctcttcccrtttctgattgttgtatagctttcgattttgcttacagtagttcccccttatcttckggagatacattccaaggcccccagtgaactcctgaaacctcaaacagtaccaaacctttatacactgttttttccatatatatatacctatgataaagtataatgtataaattaagcatagcaagagattaataataatgtaatagaacaatgataacatactataataaaagttatgtgaatgtggttggtctctcttgctttcaaaatatcttcttgtacagtactcrcctattttagaatgtggttgactacaggtaaccaaaaccacagaaagggaaactttggatgaggggggcactactgtacttaggaatacaactatatacatatgattttatttttaagaccatattatatttgggtatctactaatattttgtataaagcaattttttgttccattacgtgactttttgttttattgtatatgtaatttaacacmcaataaagggtaaagttgcttccccaaaccacasttttaatcaaaacctagaatcatctgcagtccttgttaaaaatgcaggtttctagaaccctctgaagttctgattaaataaatttattgcaaaccactgtcctgtgtcactgtgtcatttgatatgaagtataccattgtgcttggtgtcagtatgcatatgtcatcttgagttcagtttttcatttattactaggtataggcctttctgtattttcatataatgcttggttctcttttaaatctcagaataatgaagggaaactttaattgttttctgtaaggcaaaatcaaccccaagcaaagtgaatgaagcaggctattaagccaagtgcagtttccaaggtgtaatcactcattaaggtcaacagttctgcttttaggatataaaaagaacaggcagtgactcgggaggctgagatgggaggatcacttgaacccaagagtttgaggctgcagtgagccataatcatgctgctgcactccagcctgatggacagtgcaacaccctgagtcaagggctggggaggggagcgttggtttacactgaattattggataaatgtttaagtcttcagccttgatctttgggatgtagaattaatggtcacacttatacgctattctgttcaaggattccatggttgtggaatgtcatgttggccagcctgatgtgcattttaaagattagatgtattccaactttattaatagttatgtctgtctttgacattcaaaatattgtccataatactttgttaaaaaaaaccctgcatttttaccaccatcttcatatattaaattctataaatttattacatgctatatgaaatacttccatgctcagatttttgttttgttttgtttttttaagaccgggtctccctctgttgtccagactggagtgcagtggcatgatcatagctcactacagcctccatctcccaggcttacacaatcttctcacctcagcttcctgaatagctgggactgcaagcacacaccaccatgctggctgattattttgatttttagtagagatgaagtctcactacattgcccaggctggcaatgaaattgagctttcataattttataattttagtatattccttcttgaactttttagatatgggagtctcaatacatggtatttctttatgacagttccctaaacagataaatccccaacttatgggataatatacttctcttaactcttctcattttagactaagtcctttgcatatcagtagtttaactgaatattgttatctggttaactgggcagaataacttcatgcaaaatgtattacagctggaactcagactgctttcagtcagccactttttgtgctcccttcatgtataaactagatgtaattttacctcttacctacctagacagtttcaaggaaaaaactgatataaaattgcttttaaaacattcttttgactagtgctctgtcaatatgaaaattagtaagcttgagcttgatgttagcacatcacttggtaccctgtaaactgcttactgactgcacacactgaaaagcacatctttgtccatgggaaaagcactgaatggagatttgttcaaattcagccctgcccctcaatgactggccaattcactttatttcttttaacttcagcttctttatcaaagtggaggaattatgattataagtaatcacagggattatagagataacagtgctttaagatagctatcttaagagattggagttatgaaaaattcaaaaatgaaatcagaaatgaagccaggagtggcggttcacacctgtaatcccggcactttgggaggccaaggcgggaggatcgcttgagctcaggagttcaagaccaatttggccaacatggtgaaaccctgtctctactaaaaatacagaaattacctgggtgtggtggtacatgcctgtaatcccagctagtcgggaggctgaggcatgaaaattgcttgaacccaggaagtggaggttgcagtgagctaagattgcaccactgcactccagcctgggcgacaagttgcctcataatacataatacacacatgtcctcacccttccttagaataagctttgtgtaataagtttaggtggcatggttatttgaacagagaggactgaaggatgagaaagaacattaccgaaacagaaaacactccatgtaaaagtcatggggtggaaagtgagcttaatcttgttcccacttcagaatcaagcccatgtgactcaaactttatgacaggagggatagtgggaggagatgaggttgcagaggtgggcagaggccagctcacttagggtgttgtgatgcaaagccattgggacagtaagcaggagagtgacctggtctgatgtgaagaattaccaggctgttgtgtgagaatagactatgtaggacaggtagcaacaaagaaacaacagaccgtctgtaatagttagtggtaatggtggctgggccagggctgtagttgtggaggtggtgagaagtatctggctgtgggacttactgatggattggttagtaattaagtgctcagtaaacaacatgggctttggtgtaaggctttgggtccaaatacgtgcaccaccccttgttacctggctaagtgaccttaccaggcctcactttatctccttgtttcttggatgatatcttcttttatctctatgaagactaaagtgatttaaaaaaattttttttttattttatagagccagcctctcactatattgcacaggctggtctgaactcctgggctcaagcagtctgcctgccttggcctcccaaagtgctgggattacaggcatgagccactgtgtcctgccgagcattagaatttttgccactaacagtgcttggtagcagaccgcaggtctgtaatttaagtgcaaaagggaaagagaaatacatttacagaactgccagacactgtaaattaactttgatcttcatcatctattttaactagtttgaaattataaaactgaaataaatttcctgacaagtaacctctattgttttattcatctgaattgtattagtattttgtcttattcaccttttcatccctgtgctgagtatggtgcctgactcataaccagcactcagaaaacgtggaattcatgaaaaggaagagggaattttgtctttcatttactcttttttttaaagaggaagaggtaagtaaatcttggttgcaatgcactctgaaattttaattacattttttatagttaaataggagtaatcaatttacttagcagggaatacagcagtccgggataacagaacagtagcagcgttttaaaaaaatattttatttatgggccaggtgtggtgtctcatgcctgtaatcccagcactttgggaggccgaggcgggcagatcacttgaggtcaggagttcaagaccagcctggcaaacacggtgaaacccatctctactaaaaatgcaaaaaaattagccgggtgtggtggcgggcgcctgtaatcctagctactcaggagcctgaggcaagagaatcgcttgaacctgggaggcagaggttgcaatgagccaagatcacgccaccgcactccagcctgggcgacagagcgagactctgtctccaaaaacaaaaaacaaaaaacataaatacaataaaaatttaaagtatttaaatatatatatacatatatatgtgtgtgtgtgtgtgtgtatatatatacacacacacacacacacacacacacacatatatgtatagtgtagaggcagggtctcactgtgttgcccaggctggtctccaactcctggcctcaagccatcctcccgcctcggcctcccaaagtgctaggattacaggcgtgagctcccgcgcccggctgatgccagcgttttaactctacaacaaactgaaactcaaacgagaggaagtggacctctcacaccaactcttatgcccaattggtcctctgccagtgaaggcggggaaggtgaacctgtggccgtcggcagatctgcagatctgccggactgcgggtcggggcgtggcaggggcctagtccccgccccggccgtcagcctgtcgcctctggctcgggccgggcgacgagaccctccctcagcacctgcagtgcagccagagccggtgcggcggccgcgacttccccgacgcggggcgctgagaagcagtgagtgcctgtgtgtacctgccggccgggaatataggacttgtcgcatctcagcccttccctcccagagcgggggcgagaggtcgaggcggggaggcgaaggggcggtgggccgcgagggagagggagcgatggggtggacgtccttcaaggccggggaacacgcggggctttccaggccgcgggggacggtggcgggtgtcggggcgcggtggcaacgctggagttcccgggtccaccggcgcggtcagccctggtgacccaagccaggggctggggagcaatctgagaccattgcggctgggctgtggggctccccagtcccggcaggtcctggcgccgctgtacatagaaaccgttgccacggcgggaggatgccgtttcttttcggtctccgactgcagggggcggtcggccctgtggatgcaggaaagagggtgcctcggtgggagagacccagcttttcgcgttagtaggcccgagcagtttgaactggaggtattactaagctggctacgaaatatgggaggtggatgtggatcaggatgatggagaaattaaatccagctaggatcgaaggttttcccaattagaaacaaagactgcaaacagaggtggaagagttctaaagtattgtataacttgttttttggaacttgagatggacattcagtagtcttgagaaggtgtatcctacagaaagaaagaaaaaaagagaatccttttttttcaaaaaggattctcagagagacttggtccaaaggtagtgagttctctcacttgattgttcagttatagatccacctcctcgttgtactctttctccccttctcactactgcacttgattagtcaaaaaaaaaaaaaaaagattctcagagaaatgttaaaacgatgttcagaatgaaattcatttgattaggtaagagatggctctatcatttcatgtgtttttaatcacattttattgaaatcataaaatctcaggggttgcaaaataccttcaattcaaggtaatctattttaatcccattagatgcttagatctctcccaccaaagatcccttgctctttggaaaaatccttctaaggcaacccattctattctgggcagcatcaataatttacgagttcttcatcttgctttcctgtaacttctacccttgaggttatccttgtcctgggagccattcatcaataggccctgaaggtatggtgtgaaagccacatctaatttctcagctagatctcatccggaagcctaagaactgtcatctatatcatatacctaagtcaaagccggcaggaatttggagaagtggacagtgtcatccttttctgcagaggtctgatatatgaccagactcccagagggctgaaagaaatacttctatgaattagacccattgctacttcttgtttttaaaatcattgcccaagtacagtgggttttctttaacctttgacagtgacccacaataagaaatatagtttactttgtaacctcgtgcatttatatacacacataatttccatttatatagacatgaagtaaaagtttgtataaagcaatatttactttaatgttatatgtcaggtagtctattttttattctattccatctcattataaaacaatgttaattgcaactcactaaatttatttatgggttgctacctgcagtttgaaaatcactggtacagtggttaagtatgtgggctctgtagttagcctattgagactcgtatccttagttcacatgtcgacttgctcatttgtaaaataggagtaattattaatatcctttatgagagaggttttgaagattaggtgagataagctatggcacatggtaatttagctccataaatgttaactgttattactaatgtcac

SEQ ID NO: 93209 - DNA, 32950 bp, Homo sapiens
  misc_feature (1)...(32950): n = A,T,C or G
tcaaaaagacccttaacttctacaattccagccaaataaacagaagttgctttcgaaagtctagggcctcccattactaggatcagtgagtttaggacttcagggtagtggaaagggccttggtcccacagagctgtctcagggcacttaaatttccctaagtgtaaaatggacagcttcaaccgtatcagtgtttctcacctttctcttttcttttcttttgagacagggtcttgctctgttacccaggctggagtgcaatggcaagatctcagctcagtgccgcctcaaccacccaggctaatcaatccttctacctcagcctcccaagtaactgggactacaggcctgtgccaccatgcttggctaattttttgtagagatggggtttcatcatgttgcccaggctggtatcaaacgcctgggctcaagagatcctcctgccccagcctctcaaagtgctgcgattacaggcgtgagccactgtgcctggctttttcttaaactcactctcctttttaataaagataaaattcttacacccttcctagtgggtacctttctccttattccaatagccgagaagatactgtggaactttactttctgtagattatatcacgaaaacaatagttgtcccccaagctcattttccaaaattaaataataattctaagtatgcttgtttgtacacagtacaggactttctgaagccacaggccacctccagtcctggtcactgatgcctggggtccttctctggctctcaattaaaagctatagtgtagtgactgagtaccccagttctggacacaacctgggtgagggtcgccaggtaaaatacagggcgttctggggaggtggcccacgcctgtaatcctagcactttgggaggccaaagtgggaggatcaggagttcaagaccagcctggccaacatggcaaacaatgtctatactaaaaataaaaaaattagcctggtgcagtggcacatgcctataatgccagctacttgggaggctgaggcacaagaatcacttgaaccagggaggcggagtttgcagtgagccaagaccacgccactgcactccagcctgggcaacagagcgagaccctatctcaaaaaaaaaaaaaatatagatacacacacacacacacacacacacacacacacacacacacacacacacatatggtgtcctggaatctatttcctagatctggcaaccctaacctagttcacatttgggcctctgcttccaggcagtgtgactataagcacagtctgtctttccttttttctttgtctcaccctctttcttcttctttccttcttccctccttgcctgcctgctttctccttctttcatttttcttcctccctttcctcccctccactccctcctccttccttcctttattccttacttcctctctccttttctctctctctttcttccctaattgtgtcaagtgcatcaatcttaattttaaatatgcagcttgatgaatttttacatatgcataaactcctgcaaccactacccagattaaggagcacgtttccagcatcccaggaaattttctcatgcctcttgctggtcagtatctcccccagaggtaaccactcttctcacagcctgttattgtcaattaattttgtatgttcttgaatttcataaaagtggaagtatgcaatatgagctcttaagtgtctggctgcttcttcttaacctaatgactgagattcattcaggttgctatatataacagtattttcccttttcattgctgtataatattccattgtgtgaatttttttttggaggggggagttttgtttcctgaaaacaccacaatttgtttatccatcctctgtctcatagatatttggttgtttccagtttggggtgtaaattcaaaataaaatcctaagggtccactaaatgaacacccttcttggcaaagggaaccccagaaaaactttaaaaactttgtttccagccatgatgagacaggaggtcaggcacaccacattacactcccttccttccttttgtggtttagatacaagaaaagatcagcatcaatgctaaaatagagggctgagtatggtgactcacacctgtaatcccagtcccctgggagactgaggaaggcagatcacttgaggccagaagttcgagaccagcctgggcaacatggtgaaactctgtctctacaaaataaaataaaataaaataaaataattagccaggcacggtggtgcgtgtctgtggtcccagctactggggaggctgaggtgagaggatcgcttgagcccaggaagcagaggctgcagtgagtcatgatctttccactgcactccagcatgggtaatagagtgagactctgtctcaaaaaaaaaaaaaaaagagagagagattataagactgacagaacagactttttgtggcaataagataccaaattataaacacagcctaaggccatgtcaggcaagggttaagtcaggtgcccctactcttaaggaataaactatgttctaattatgttacaagatttttctttttctctagcagcgaaacaagcactggcctcagaagaagcaatattaaaacagttacaactcatctagcacacagacacccaactgacaccctgttcctccagtcataacaacaactacagctttgattgaacaagagactgagtttggtaactttctcctaataaaaagatcactgactatggactgcttctggtggggttacgaaaccgcaacctcatgtgcctgcatttcctgaaaagacattttgatgtgtaggttctaattgtaatacattgattgattgattgatcaattgattgattgagatagggtcttactctgttgcccaggctggagtgcagtggcacgatcacaactcactgcaacctctgcctcctgggctcaagcaatcctcccacctcagcctcccaagtagctgggactacaggtgcacgcaactgcgcccggctactttttgtattttttgtagagacaggggtttcgccatgttgcccaagctggtctcaaactcctgggctcaagcgatccacccaccttggactccaaaagtgctagtattataggcatgagccaccatggctggcctaattgtaatacatttaaatgttaagtctccaccccaaagtgaacatgggttgtatgttacatgcacatttgttcatacacatgtgttggggccaccttcataaatattcatagcttctcctgtaacctgctggatatatcattcagccaaccccttcagcacaaagctcctaacccaacccctcctccttcaaagtgcccgtctctgttcttggtaggaggcatacttcccaggccatggactggtcaccttgtgggctataaccccttataagaaataagatttcttctcctctctgaatttacacatttgtgattttttttttttttttttttttagttaacaggggctatgaacattcttacagaagccttttgattgatgtgtgttttcatttatcttgggtatatatataggcgtgggcatgatagatattaggatagccatctttaacttcagtggatgctggagcaagtttctgaatttcaactctgaagtggggatgataataacagcacctgccttacagggctgtttcgagattcaaagagaaaatctgggtaaggcagggtgcggtggctcacgcctataatcccaccactttgggaggccaaggtgggcagatcacctgaggtcaggagttcaagaccagcctggccaacatggtgaaaccctgtctctactaaaaatagaaaaacaatgagccaggtgaggtggtatgtgcctgtaaacccagccactcgggagtctgaggcaggagaattgcttgaatctgggaggcagatgttgcagtgagttgagatggcaccactgcactccagcctgggcgacagagtgagactctgtctcagaaaaaaataaaaaagaaaaaaagaaaatccaggtatttagaattggtacaccgcaatttacaaaacgtaaattattgctgtgatggcagtggggagcatgaagatattggactaacttttatgaatgttcaagtgctcccatgatgaattaaacacacagggaactttataagggccatatgttatataagtgatacatgactattgtattaaaattcaaactagttagatataaagtaaaaagtgggtttcaccctatccattttttattattgaagaaaaaaaaatatgtcatagcgtggtggcttatgcctgtaatcccaaccctttgggaggtcggggtgggatgattgcttgaggccaggagtttgagaccagcttgggcaaaatagcaagaccctgtctttacaaaaagtaagtaatttggctgggtgttatggcatgcatctgtagtcctggctaggctgaagcagaaggattgcttgagcgcaggagttcaaggcgccactgcactctggcctgggtgacagagtgagatcctctctctctctctctctcttttttttttttttttttttgttttttgagactgggtctcactctgtcacccaggctagagtgcagtggcttgatcttggttcactgcaagctccgcctcccagttcaagtgattctcttgcctcagcctcccgagtagctgagattacggacatgtgccaccacggccggctaatttttgtatttttagtagagatagggtttcaccaacatgttagccaggctggtctcaaacgcctaacctcaagtgatccatccacctcggcctcccaaagtgctgcgattacaggcaagagccactgcgcctggcctgaccctgtctgttatcttttctttttctttttttttgttttcttttttttttttagacagagtatcgctctgtagcccaggctggagtgtgcagtggtgccatcttggctcactgctacctccacccaccaggttcaagcaattctcctgcctcagcctcctgtgtagccaggattacaggcacaccccaccactcctggctgattttttgtaattttagtagagacggggtttcgccatgttggccaggctggtctcgaactcctgacctcaggtgatccacccaccatggcctcccaaagtgtcagaattacaggtgtgaggcactgtgcccagccgaccctcttttaaaaaaggaaaaaatactatgcagtgagtattttgcatgcattttcttatttcatcttcgtctttttatttgatgatactaaaggcaggtgttagaggctggattgctaaagctgacccaaagaatgcctccctcagggctggttggtccctctctctcaggcctcagtcttcccatctgtacagtgaggtgcctgcagatctctgggctctaaaaatcacagctccatgtttatccctggcagaggaagggcctggagtcctgctgcttgcgtctctgggatacgggagcaaagagccacgcatcctcatggcccacacaggcgtcacctccagtctctccttggcctcatctccccagcgtcctggaatggcatcgggctggcccagggagcccctgtcctgtgcctctcctttcccctcaggggctgccaggctgaccacccccaccgcaggccaggcctacagtgccccatggaacgtcctgaccctcccccagggtggcagcaggaagaaggaagaaaggggatcctctccagctggccagagagacagaccttcttgtgctcatcaaccctccaagaatgcctgccctccctccttcccccaaggcctgtccacaggggcttgagatcagccagaaaagtcaggcaacttttcagggactgggagcgaggtctcccggccgggcctgggtccagtctctgtgggcagtgcagtgccgagccccacccctcaagccgtgccctgtccatagctccagactttgaccctgcactccagtccgggctggcggacagagggctggaaacaagacgctccagaatcaggagcttcccctcaggaaatagcatcctgtgtccccgcactgcagttgtctggtctctccagcagtttggtacttccggtgagtggcagatgcacctttgagctggggacargggttgggagargggagaggcaaaggatttcatgtcctcccaatgtcaaagacagggctcaacattacagcctaaggcaggtgacaggaaaggagagatccagcctctcaaacatccagcagagagaccataggtaagtgatttttccctccccaagcctcagtttcttcacctggaacatggggatcataactcccctcttacagcgtgagtctgagtgttaaaagaggtggtgcatgtaaagtgcttagagcagatctaggcacatagcaagtactcaaatggtagttattattatttttggtgggggagttggtaggctggttctcaaacttttatagcttctgttccatttcaaggataaactctgcaaatmacttcatgagaagtagccgtgtggtgcaaccagggagaactaattatgttcattcaaatgcctcatctctggcttactgatttttttttttaaaaagaagtctttcatattctttgctatgggcacatarcaatcaaaggcatcagctgtctcagattgccttctaggggacaagggaggtcctaggcagataaatgcaagactgaaagacaagcagaaagcatcaagtggcaactgcatgccaactgcctaaatatttttttggagcagtgcagaaagcgccgatagaactgggtctaggtccgaatgctgtcccatactgactgcgtaaccttgggtgggtgacttctcctccctaaacctcagtcccagcctccagaatgagggcggtaaccttccctacttcctagagcagttgagaggattgagaggattatgtcggtactgcatctacaggtgtctggcaagtggcagagaccaaaatacattggttcccttcctgctccacacttacacagacattctaatcacacacacacacacacacacacacacacacacaaatataataatcccagctgtttgcatcttctgggatacatactccaagcttgctgggttgaagtaatgatgtaaaacagaggagaacggcaacactaataaaaacatcagcaacaacacgaaaatgtccaaccgaataactgagctgggtgcgtttaagtccaaaagctcattacctacacgcatgaatgattttacctaaggctggatctgccacatctgacaatctgtctctggcttgtcatgaggacctcatgcatttattttgtattttaaaacmcacacacacacacacacacacacacacacacacgttgctataatcagtgtcaactttgactcatatcttgaatttttttaaaaaaagataattgacttaggactcacacttttttccttttaaattttttttttttttttttttttgacagagtttcactcttgtcacctgggctggagtgcaatggcatgatttctgcccactgcaatctccacctcccaggttcaagggattctcctgcctcggcctcccgagtagctggaatttcaggcgtgcaccaccatgccaagctaatttttttgtatttttgtagagacagggtttcaccatattggccaggctggtcttgaactccygacctcaagtgatctgccagcctcgacctcccaaagtgctggaattaaagacgtgagccactgtgcccggcctttttgattttccattctattcctaccaacactctaaaaattcctacaggcattttattttattttattttatcttattttatattatattttatgtttgaaatgcaggactctgaagcttcagctgttcctatttaccggcttgattctcagatttttcaaaccatgtgatttactggcaagcatggcatttaagcacctaggcttatgagtcaggctggcctgggctctgcctctcaccacctgggtgtccaggagctgatattccagtgaggagacaataaggcaaggagctttgtcagctctcataaaagtttatagatgaggtcgggcatggtggctcacgcctgtaatcctagcactttgagagtctgaggccagcaaatcacctgaggtcagaagtttgagaccagcctggccaacatggtgaaaccttgtctctactaaaaatacaaaaattagccaggcatgttggtgcatgcctgtaatcccagctactcaggaggctgaggcaggagaatcacctgaacccrggaggcagagtctgcagtgagccaagaytgtaccattgcactccagcctgggcgacaagagtgaaactctgtctcgaaaaaataaagtttatagatgaggaaactgaggttcgattaggattaaccaactcatcctggtttgcctgggactctgatgcactgacttttagtctgaaagtctgcatcctgggaggaccctcagycctgggcaagctggggaggttggtcaccctcactcagtcaagttgagcaacttgcccagggttacatggctggtgtgtgcccaagtcaggctgcgaacctgggtctgtctgactctcagcctgggccatactgtctcttagattcttcatggagaattaggaaaaatacagaaagccctttattcctctgccttctcattgttaacatataaaaatggtcaagcgggygggtgcagtggcacacacctgaaagcccagcgctttgggaggctgaggggggaggattgcttgagcctaggaattggaggtggcagtgagctatgattgtgccactgcactccagcctgggtgacagagtgagaccttgtctcttaaaaaaaagaaaaagagtggtcagctctccggaaattatgcagacagtcaaaaagcccagagaggggaattaacttagccaaggtcgcacagcaaggcagaagtgaagccaggtctgactctgcctttctcttctcctctttttttttttgaggcagaatttcgctctgttgcccagactggaatgcagtggtgcgaactcgactcgctgcaacctctgctgcccaggttcaagcgattctcctgcctcagcctcccgagyagctgggattacaggcgcctgccaccgcgcctggctaatttttgtagttttcagtagagatggggtttcaccatcttggccagactggtcttgaagtcctgacctcgtgatccacccgcctcggcctcccraggtattgggattacaggcgtaagccactgcagctggtcctccctctctccttttgttcctgcaatgtctttgttctatgtgatttttcaaaatgctaggagacaggaaggaggctgctgtgtgttgagggcctactctgtgccaggcgtggtaccaagaacttttgctaaacttcttatttaatccttaaaatgaccctgtgagattgggattaaccctgttttgcagatgaagagcttgtgtctccagaggcaaagtatgggggaagagggaagagagaagaccaagggtccctgagaggggctgtcmcctaagccccagtatccaagctcgggctcgaagctggaaggagaattgcctagaggaacgatacctttctgtttgttggttctatctccaacttggcttctgaaaccccaacagagtccagttcttgtgggctggagccgttttccctcctttataaaactaggccatattaagaatgtcccgctgtccagggccacaggcccgagttgccaggagctgaggtctgcrggaggagagttgtgagtgaagakgagggaaagttgaatttggctcttctgggcacaaataattctcttgttctgcctcagcaggagcctgcagaatatttccctgctgtgcgggcttaagtagcttcaaggttaaaagctggtaggccttctaaacttctcagggcccaatcagccctgtgccccaaggcaggtggagttctgtgctggaagaccaagttctgaggccagacactgcgtctgtcatgctcatagctgcatttgctagctgccagcctggcacatggtaggtgtgcattaagcgtgtgttgagtttactcaaattgaaattaagtcacagctgtaccatttaactggctgtgtgacttcaggtaagtcacatcacctctctgaaccacagtttcctcctctgtaagacgggactgataacagcagcccctacctcatgasagtgttgggagacttggatgaatggatgcttgtgaagcacttagtgccggggccagctggctcacagtaggtgctccacaaatgtcagtatattacttcttttgcatcaggcagcttgttaaatttgttacgtttggcatcttgttcaatttcccatccatcccctcaagcataggttattagrggttgaagcatcttgcccaaagttaacggccagtaggtggcagagctgagtcctgaagccagagcccatcgcactaaccaccggcctacccagcctacagttggtcgtgccctctgctgggtcttttctattcccagcccagaaactgggtgtctggggacgctccccagagaaagttgcatcattcaccagccgtgtgactgtggccaagtctyggtcacttctccatacctcagtgtttccatttgcaaaacgggaacaatgatattccttcctcctaggggtcatcgggaaggtcaaatataaaaagggcttggtggtgtctggcaccttctaagccttcagtggatggtggcaatggcgctaaggrtgatggagatgatggtgatgatgktgtgcctcaacccttccttcccacaggctgctgcaatgcgtgtggtggtgattggagcaggagtcatcgggctgtccaccgccctctgcatccatgagcgctaccactcagtcctgcagccactggacataaaggtctacgcggaccgcttcaccccactcaccaccaccgacgtggctgccggcctctggcagccctacctttctgaccccaacaacccacaggaggcgtgagtgagggtcacatagggtagcctggggtgcccatggacctaagtctgcagagggagtcagggttcccatcaccaagagcaagccccttgtggaagctctgatctagcataaaataaagaaaatgccaggcgtggtggttcacgcctttaatcctagcactttgggaggtcgaggtgggaggatcacttgaggccaggagttccagatcagcctgggcaacgtggtgaaaccccatctctaccaaaaatacaaaaaattagccgggcatggtggcgcacacctgtaatcccagctactcgggaggctgaggcaggaaaaccatttgagcctaggaggtgaaggtggcagtgagctgagattccgccactgcactcgtgacagagtgagactctgtttcaaaaagaaaaaaataaagaaaagattcataaatattaagccccttgctctgtgccagatactaggaggctttgtctcgtcttccctaaactgggtgcctgtcaataccacatgattggtgaatctggaaaacttcctctgttttaatttatacatttttatttattttttgagattgtgtttcactcttgtcgcccagactggagtgcaatggcgtgatcctggctcactgcatcctctgcctcccaggttcaagcgattctcctgcctcagcttcccaagtaactgggattacaggcatctgccaccacgcctggctaatttttgtatttttagtagagatggagtttcatgttggccagactggtctcgaactcctgacctcaagtgatctgcccaccttgacctcccaaagtgctgggattacaggcatgagccatcatgccttgccaaattttatctttttaaatagagatagggtctcactatgttgcccgggctggtcttraactcctgggctcaagtgatctgccctccttggcctcccaaagtgctggaattacaggcatgagccatcatgccttgccaaattttatctttttaaatagagatagggtctcactatgttrcccgggctggtcttgaactcctgggctcaagtgatctgccctccttggcctcccaaagtgctgggattacaggtgtgagcccttgcacccagctgaatctagaaaacttctaagtgggtgaacatctaagtgggtggatggatgcacagatttatcaaataaattgcaaaggtcattatggtagtttagaaactgccagatggttcagcaaatggaacacccaatgaatagcagctcaaacagattaaaaaaaaatttttaagaggcatcctgtcacccaggctgaagtgcagtgacatgatcatagctcattgcagccttgacctcctgggctcaagtgatcctcccacctcagcctcccaagtagcgaggacacacatgcatgctatcatgcctggataattttctttattttttgtagagccagggtcttcctatgttacccaggcttgtctcaaactcctgacctcaagtgaccctcctgcctcagcctcctgaagagctgggattataggcatgagccactgcamccagccagaattttaattcacacagctgtaaaaaaccaatgattctgatcagtgggcagtgattcggggcccaggctccttccatctaatggctctgccgtttttccacgtgcttttgaggtcacctcaatgtcaccattcacatgggctggtgactgcagaaggatcatgcaggaccacacgtgcagagtctttagagtcccttggccagaaacaagtcacacagtcacatttagctgcgagagggtctaggaaatgtaggtgagctgtgtgcccagggggaggaggaaaagttgtaggagcggcaagtcgatgtctgccaccagtgtttacaaggaggggtgcttgcagccagactgaacagtgtggctcataatccccaaagccaggtcaaggacttcactgaaactcatcagccatgtaatcccatgctggaggtgcactccatatggttatgatggggcatccttcattccctctcttctttattctattaatggggaaatattggaaaatttaggagggagaagacccaaggcatttggggagttgcaggagtgaacgtggtggatttctgggttttggacacaccccaagctcctgatcatgccacagccccatgccagctgacctaaggttttttgcccagctcagggcattgggtgatcgaactcttcatgacccttccagggactggagccaacagacctttgactatctcctgagccatgtccattctcccaacgctgaaaacctgggcctgttcctaatctcrggctacaacctcttccatgargccattccggtgggtgaacagttcttgaccatgagggatgagcacccagggctggggtagtgagggtgggtgcagcagagccttaatcacagatgagggcggggtgctttgagtctcgtaggcaacagactcctgggttcaaaacasgtttggtttaaattctatttttgctttgaaaattatttttgttttacattttgctgttaaattggcagaggacaaagaatcttctgatgcccaggggaaactagcctttgattagcatggctaaaatacaaacatgttctgcagtgacgggcacttggtgctgaagccaaaaggtttcaagtgcccctgaaggtcccaaggctttttatcaagaagraataaaatactcatcaaagcaaaaactgccaaagcatttattatgtgccaggyccagtcctaactaatttacagctagcgactaatttaattctctttataaccgggaggtaagggctgtccttatcctcacttaataaatgagaaaacggaggctccaagaaatggagtaacttgcccaaggccacaragctcgccagtggcagagctgggatttgaacccaggccatctgtgactccatggtgtccagtgtgctaacaggaacagcacagccctgggacggtttgctcaggctccttggagagggtggtctggcgctgtgcccagagccccgtgccagctctcaaggttcattcaacctttggcactgtgctaagggctttatccacattatctgttacctttcatgggaccaagagtatttttttttttttgagacagggtctcactgtattgcccaggctggagtgcattggcatgatctcggctcactgcaacctcygcttcctgggttcaagccattctcctgtctcagcctcctgagtaattgggattacaggtgcgcactaccacgcctggctaatttttgtatttttaagagatggggtttcactatgacggccgggctggtctcgaactcctgacctcaagtgatctgcctgccttggcctcccaaagtgctgggattacaggcgtgaaccactgcacccggccaagagtgattattaactccatgatacagacaaggaaactgagtctcagagaattcaagtagcaagtgatgaggctggggtctctgacactatgctctgytgtctgacactatgctctgttgctttctctcatccccggggactctcactgtttctgctttctctcccctatttctgacttttcccctataactcaccctcggtcttactcttacccttaccataaataggggttaagaacatgaactctggaactaagctgtatgggttaaaatcycaacaccaccatttattagctgtgtaatcttagacaagttatttaatctttctaagcctcaattggtccatctgtaaactggggaaagaatagcatccaccccaatggcttcttgtgaagattaaatggaccagtataagaaaatgcttggaacagtgccttatatgcacttagcattacataagtctctgtcattatcattttttttttttttgagatgaagtctcgctctgtggcccaggctggagtgcagcggcacaatttcggcttactgcaacctccagctcccagattcaagcaattctcctgcctcaatctcctgagtatctaggattacaggcatgcaccaccatatcttgctaatttttgtattattatttagtataaacagggtttcaccatgttggccagactggtctggagctcctgacctcaggtgatccacccatctcagcttcccaaagtgctgggattacaggtgtgagccacctcgcctggcccattatcattattattgacttccatcccacccagtgccccctttgtccttcctcttcaggacccttcctggaaggacacagttctgggatttcggaagctgacccccagagagctggatatgttcccagattacgggtgagtttattgtcacaggcaaaggggactggggcctgacragttagcagacctgtccagaaggcagcagagggtagaggcaccagatttcctgtcctacccaggccctggtaccctggtctcctggtccttggtccagctccttcagagaggctacccactcaaacctggccttgggctgggaaggtagggggtatgaaatcacagatctcaagcccagaagctccatatcaccatattgttttgtagakgaagatactgagtttcagagaggctaagtgmcttcctaaggtcacacagccaagtggccaaactgggattccaaccagtctgtatgaccccacacccctcctttcttttctctacagcctgatgcctctctggtcttctcctcaccccaccccacaccacacctgaatcccctctacgaatgcacattcaatctccacttgcattttccaatgtcagatatggccttttctgatagaaaaattttccttgcattgagctcaaaaccacgtccccccttgaacttcacgtagtggtcctggcactaccctttgggcccacagaacaacattgctcccacctccatttcacagccttcaaatatagctctgatttttacctttatttccaccttttgcttactgtgactctagctatggctggttccacacaagcctaattctggagggaaagaacyatctacagtggctgactgaaaggtgagattttaagcttcactttgagggaggtacctcmcagagaccaagttgtagtggaagatggttcgtgggcttccctcagcatggactaacccccaggtttgaagaatacccttaggcctggtgtgggagctatccttggtcctgatcaccgctgggcacagaggcaatggatcctgagcctagctgagcatcagaaccacctgggcagctgtttacacatgatgtccattaacaacctctttcaaatccctaatgtttgtgtaatagttttagatgtattcttttaaggtttccagatacatttacatcatctgcaaaacataagctgccttttatttttatctccctctctctttttttttcttctctaactgctttggccaatacctctagaacaatgttactcatacagatgatagtggatgkctttgacttgttcctcatgttaataggaatcttgcagtgttctaaattagcaaacactcacttgagagatacattggtatttatattcacatacattcatattaagggagattccataccttttttgtgtgtgtgagatggagtctcgctctgtcacccaggctggagtgcagtggtgcgatcttggctcactgcaagctctgcctcctgggttcatgtcattctcctgcctcagcctcctgagtagctgcgactacaggtgcctgccaccaccacacctggctaattttttgtatttttagtagagatgggttttcaccatgttagccaggatggtctcaatctcctgacctcgtaatctgcccgcctcggcctcccaaaatgctgggattacaggtgtcagccaccacgcccagcctgattccatacattttttatatattactgttttttaaagatttttaggccaggcatggtggttcatacctgtaatcctagcacwttgagaggccgaggtgggcagatcacttgagcccaggagttcaagaccagcctgggcaacatggcaaaaccctgtctctacagaaaaattcaaaaatcagccaggtataatggtgcatgcctgtagtcacagctacttaggaggctgaggtgggaggatggctttatcccgggaaggagaggctgcagtgagctgtgatcatgccactgcactccagcctgggtgacagggcgagaccctgtctcaaaaaaaaaaaaaaagattaaaaaaatatggaatatatagtggcttttatcagatgacctcagaagattttttttaaatgtagattttaggaccccactctatacctgctgaattagaacttctgggataaggttcataaatttgctttttttcatttttttgagacaaaatcttactttgtcacccaggctggagtgggatgtagtggtatgaacacaactcacagcagcctcaacttcctgggctcaartgatsctcccacctcagcctccaaagtagctgggaccacatgcatgtgccacaatgcctatctaatttttaaatatttttgtagagatagggtctcactatgttgcccaggctggtctcaaacccctgggctcaagcaatcttcctgcctcrgcctcccaaagtgctgggattacaggcgtgagcaaacaggcctagcaaaaatttgcattttaagaagcttcctggcgattctaattatcagccatgtttgggaatcattgtactaagacatggctatttctcctaacctggggacacatgacccttgtccagtcttttccaggaaaaacatgccctcaagatgtttttctatcttgaggaaatgatggaaatgagatagttccaagggtatgcttcaccttctttttggcttatttcctgttctttggatgtttctagtgtatttctttctttcttcttttttttttttttttttttgagacagagtcttgctctgtcacccaggctggagwgcagtggcgcaatctcggctcactgcaagctccgcctcctgggttcatgcctttctcctgcctcagcctcccgagtagcttggaatacaggcgcctgccaccacgtctggctaattttttttttgtattgttagtagagacggggtttcaccrtsttagccaggatggtctcaatctcctgacctcgtgatccgcccacctcggcctcccaaagtactgggattacaggcgtgagccaccgcgcctcgctgtttctagtgtatttctaatcgtgatagatgtttttcctatgggatgtttaaaaggagggtggatgtcctcagcccacctccctcctcatgcccggcttctgacaaaggggaatttggcactggtacaactctccccttctctactctgaatctcatygcctttgctgttacaaagcaatgtggtggtcataggaagtgctgggggctaagaggcctgggtttgagttccaactccatcattgactcactctatggccttcagcaaggcccttcccccactccatctgcccaacaaggggcttggaccatctctggtttctcaaaggagattttgtggaccaccagtccagtaggtgctcatgagctgatttgatgacacagccatcttctcaagcagcatcctgtgcaactaacgtccgcagaaggttgtttgggaaaggtccctgtgccaccctcttggtgggatggggcagatagctgaatactgggctttttgatgtgtttgatcatcccaggttaactgagaggggagtgaagttcttccagcggaaagtggagtcttttgaggaggtgagttgcagggctgatgcggtggatggggcagggagaagaggggaggcctctgcttcttgctgctgagtcgggggctcccttctcaggctcctagrgtccccacaggcctgcctcagacccttgccccagaagcactcaggtattctgaaggaggaagtctctgccttcatgttggtagtgggaacaaaggaacactgggatcatggtggccattaggagctgatttatatctgagactcaatgagttttgggkctagagagctggccrcattttctcagtgtcagctgcactccaaggtcagaacttggttgcttcctagccctaccgacatctgtgttggtctttctgcaaagtccaggccctcagctgactcacctctaaagaagcaccaccaccaataataatgacaggaaaagccaccatctccaggcaccagcaaaaagagctttactgtatggcttcattcaatcccagcatctaaaaccctgcttggcacaaggaaggcgctccgtacatgtagctactagtgctatgtcatgaagactaacctgctctggtcaggccctgatggacaccgaagatacatggtcgacccaatgcagtcctcattctcagtcattcactcaggaacaatagtagcgtcttgcaatgtgtgtgtcccttaacttactcgtggtgagagtcactggggctgggttggggagcttaggggctcacgatgcgtgcttgagatgagatcatctcatctgtagacagagctggggttccaacgtgtcttctgcaaatgtcttggcagagtagaaggcaagagaataaagttaaaaggagtcagaaggagaaagagaactctctctgcttcctttctgacttcttttgggaggttccaggaagatttcccccatccaaagaacygttttacaaccacttttatattcagagttgtgcaggagcctcataacagcctatgaacagccatgggcagcctcattttacaggggcagctgagaattaaggaggtaaccagacattttcaaggtcacacgtcagataaatggcagtatgaaaatttgaagccaggcccctctgattcctcattgagacctctccccactgttcatcagggagtagacagattgagggtagaagaaaggggaagagagaacagggrataccagggtcttccccacctktcatcccccactaccctgttggttgctaccaggtggcaagagaaggcgcagacgtgattgtcaactgcactggggtatgggctggggcgctacaacgagaccccctgctgcagccaggccgggggcagatcatgaaggtgagtgtgagggtgagacccctaccttttgttaataggaagatcattctgcatgcttatttcatccctcaagatcatggacaaatcaggaacatctgttagaggaaccccccggactgcagggaattgacatgtaaaaaaaacaaacctgtcccacccccattgctctctttcaggatttcctcttgatcgtgaagcatgcatgtatgcgcttgtacctatgtgggagcagcatatgcctgtattgcaataaaaatagcaaacattagagtgtttaccaagcgcgagatacagtcctaagcactttattgtgtttattattattattaattattaattgtgttattattattatcattgttattattatttttgagacagggtatcactccattgcccaggttagagtgcagtatcttgatcatggctcactgtagccttgacctcccaggctcccaccttagcctactgagtagctgagactacaagcgcatgccaccaccatgctcagccaatttttttattttttgtagagaaaggatttcaccatattgctcaggctggtctcaaactcctgggctcaagtgatccccccaccttggcctgtcaaagtgctgggattacaggcgtgagccaccacgctcagcctattgtgttaattaatttagtgatggccacagcccttcgagctgggtactaccatatcgttattgtcatcttacagatgaagaaattgaggcacagaggagttaagtaacaggcacaagttcacacggtagtacgcagtgcaattgggattggaatccaggcaacctggcttaagagcctgtgcgtgcaagcattgttccatgcctcctcttgctgtgtgtgtgcatatgagggtatgtgtgtgtgcatgtatgtgtgtgtgtgtatgtaagggtatgtgtgcatatgtgtgtgtgcatgtgtgagggtgtgtgtgcatgtgtgagggtgtgtgtgcatgtgtgtgagggtgtgtgcatatgtgatggtgtgtgcacatatgtgagggtgtgtgtgcatgtgtgtgagggtgtgtgcatatgtgtgayggtgtgtgtgcacgtatgtgggggtgattgtgcatgtatgtgagggtgtatgtgcatatgtgtgatggtgtgcgtgcatgcacaccatgtgagggtatgtgtgtgtgcatgtgtgtgaaggtgtgtgcgcatgtgagagtgtatgtacgtgtgtgatggtgtgtgtgtgtgagrgtatgtatgcatgtgtgtgagggtatgtgtgtgcatgtgtgtgagggtgtgtgcatgtatgtaagggtgtgtgtrcatgcatgtgtgtgaggggtatatgtgtggatgcatgtgagggtgtgtgtgtgcatgtgtgtgagggtgtgtgtctgagggtgtgtgtgtgcatgtgcacctgtgaatgttcataggtgtgcaggtgtgtgtgcttctgtgtgtaggggtgcgtgtgtgtgttcctaatgtgggctgatgggtgtaacaaccaaatgagtgactgaagcataagtctcaaatcatcgaggtttatggagccagcttgagggcgcacccaggaaaaacgcgagtcacagatgcacctgtgactcctttttccaaagaggttctcaggagatttagtctttatacattttctttaaaaaaaaaaagtgagagaagggtgtagcagcgagagaatgattgcatacttgtgaaactttagttagtgcccagtaaatctacattttacataagatgaaggtttgggccaggcgtggtgactcacacctgtaatcccagcactttgggaggctgaggcaggtggatcaygaggtcaggagttygagaccagcctggccaacgtggtgaaaccccatctctactaaaaatacaaaaaattagctgggtgtggtggcrggtgcctgtaatcccagctactcgggaggctgacgcaggagaatcgcttgaacccgggaggcagaggctgcagtgagccgagactacaccactgcactccagcctggcaacagagcraggctgtctcaaaaaaaaaaaaaaaaaaaaaaattgaaggtttgaaggaaaaaggaatggaggaagttctgtatctgggaagataagcttgtcattgatgttatcagtgtggagtctgttgaaagggctggtttctgcttaccccttagggaagaaagcctaactttggtcaggtcattgagggaggggatataatgagacgtgtcggacctcccttccccccgcagctgtgaactcagctccaaggtttctctggggctcctggggccaagagggggtctgttcagtcggttggggacttagaattttatttttatttctcatgtgtatgcatttacatgtgtgtactggtgcttttcttcggacatgtgggtgaggagaaacaatgcttcagggagcaggggtggctgccaattagggcagctcttcctgcaagaggcaagcagtcaggtgcagacttgggccatagtgtcatgagaggtcttataaggaatcagcctggccactcttgtcaggacatctggccacagaggggagcaagggcagccacattgactcacctccgctgatgagactttcctgccctgaatcaacaggtggacgccccttggatgaagcacttcattctcacccatgacccagagagaggcatctacaattccccgtacatcatcccagggtaaaattggactgttctcgggcagaagagtggtccccttcatgccctcttcatgaccctgctgcctcccccaagctccttactccctgcagttgttccctttcaatgtttttatgtacttagctattttttattattattttttgagacagagtttcactcttattgcccaggctggagtgtaatggtgcgatcttggctcactgcaacctctgcctcccaggttcaagcaattatcctgcctcagcctcccaagtagctgagattacaggtgcccaccaccacatccagctaattttttgtatttttagtagagacagggtttcaccatgttggccaggctggtcttgaactcctgactcaggtgatccacctacccttgcctcccaaagtgctgggattacaggcgtgagccaccgtgcctggcccctttcaatgtttttagtgagtttgagctactgaatccctgggaaggcagactcagcctcgactgaggtctaccgtgaacattcttttggatgacaatagtggtgatgctggagacaaaggcagtggatgtaatgtggtgacactaaaagtggtatgtaggtggctcacgcctgtaatcccagcactttgcgaggccaatgtgggaggatttcttgagcccaggagttcaagaccagcttgggcaacatggcaagaccccgtctctacaaaaatacaaaaattagccgggcgtgatggtgtatgcctatggtcccagctattcgagaggctgagatgggaggattgcttgaacctgggaggttgaggatgcagtgagccatgttcacaccactgtactccagcttgggccacagagcgagaccccatctcaaaaaaaaaaaaaagtggtgtgaatggcaataatgggagtgggaatgggaatggtgattggggctgatggtgatgataatgttaacggtggagatgacaatgtcactgaaaccagtggtggtgttcatgggatgacaatattgttgatagcggaatggtggtattagggataatattgtattgatggggaagacagcgttcatgggggtggtgattagcrtaagagttgtagagtggtgatgttaatggaggtggtctggtgctgatgaggagatcaatgttgatgaaggtgtgattgggagtggggatggtagctggtgctgatggaaatgacactatcaatgatgttaatactgtagcagagctgacagtctcaaaggcaatgttaataacatggttgcaccaaccatgttatctcaatggcgatgttactggtgtcgtggagatgacaatatcaatggcaatgttagtggtgrtggtgaaatgatgaatgcagttggtggtgatgacctattaatgatagtagcaaagacaatgttgttgatggagatgacaacattgatggaagtggtgatggaagagttcgttgttggtgttgatggtgatgacagtggcaattgaggtagtgatggtggtggtgttagcagaggtgacaaggttgatggtaatgacctttattcatctcagagccttcattttccttcatcyttgaccctcctcatttgtatctaggacccagacagttactcttggaggcatcttccagttgggaaactggagtgaactaaacaatatccaggaccacaacaccatttgggaaggctgctgcagactggagcccacactgaaggtaaggtagggaggagtagcagtgccctaaaccaaggtcgtgggagcttggtaatgaggacacttcaggacgggaagatgccaccgctgggataactgggcaaattaattccagcaagggatgtggaacataacagaatttgataatgtacagggaagttcttgctatgggctaatgaatcctgtctggccatggctgagagcccttggttttcacatttgtctgcgagtgatgatgacagtagtgatggtgatgaggatgagttggtactgatggtgaggaaaatgctgagaatggtaatagtgatggtgataaggtggtgacagttgttaaaattatggtggtggctgatggtgagggtagtggttgatgatggaattggtggaaaggtggaagcagtaatggtaatgatgttggtagctgataaagatggtgttggtggtagtggtgattgataaagatgactgtgattatattagtggtggtggtgatgagattctaaaagctaactccctactacctaaaaatggcagcaggaaaaaaaaatccagaaatgagtgatcagcacttttctttccagaatgcaagaattattggtgaacgaactggcttccggccagtacgcccccagattcggctagaaagagaacagcttcgcactggaccttcaaacacagaggtatgctcccatggcaaggaaagtaatgccctcttccactcctcagatggctctggcattttcagggarcagtcatgtctgatctcaagttccacacaggctccatagcaggcaggggcagtggtggctaatatcccctcctctataaatggggaaactgaggctcaatgatggttaaggacctgctcaaggttacatagaggggcagtggtgatgttaatggaggtggtgctgatgagatcaatgttgataatggtgtgactgggagtggggatggtagctggtgctgatggaaatgacactatcaagtatgttagtaccacagcagaggtgacgatctcaaaggcagtgttaacatggctgcactaactgtctcattggcaatattaatcgtgtggcagagatgacagtatcaatggcagtgttaatgatggtggtgaaatggtgaatggggttggttttctaaagtctgtggtcaaataacaggaaaatgtgtacttactggatgtgtacttcgtgtcagacacagcagcaagtccattacatgaatgaccttattaaatctcctctggagctctttgggatagggacagttctccctatgcttcggatgaggaaactggggtgaattaagaggtgaagtcacttgcccaagtcagaccactggtggaaggcagggctgggatgtgatttgaatttgactccaaggctatttccagatatccattttgtggctgccccatcatctcttgcaactgttccagggggtccccaccattccaccccggtgccaagagaarctcaggtggcatctggctttgcccaggactcttcgggaggctcctgagtcttccagggcagaagagcttcatctattctttccactgtccctctcrgacctggccaccttctctcttgcctctcctaggtcatccacaactatggccatggaggctacgggctcaccatccactggggatgtgccctggaggcagccaagctctttgkkagaatcctggaagaaaagaaattgtccagaatgccaccatcccacctctgaagactccagtgactgctgcctcccccsacaagaactcccttctcccctcagccaatgaatcaatgtgctccttcataagccattgcttctccctcacttctttcctcaaagaagcatgaggtgagagaaagccacaaagtcagtgcctggagaagggttcagcccaacatggggcccctctcatcactgaaatccctctaccttctctgggtctggcattataaagaacagctgaggctgtcattccatgagtcttcagaagaaaggacagctcagaaartcaaagaggccaactgcccagagccacagaaaatggaggataattgaggctaagtaacctgattacaagttgtactaacatattaaaggttctgaaaagtcctgcagcaaagacaactatctgatgttgtttaacccagtgcttgctaaacctatctggctatggaactcttttgcccagagcacccatgaatgccatgacacaaatctgagaaaatgctggaacagattttgttgtatctgttgtgtttgttgtaggaggttatacatacaactggggtgtggagggggcagagaggtgaggcactgaactagtaacacatggtgtttgttccacatctagaattccaaatggcatcagctattcaccgagtggccccatgagcaccacgtaacctttgaggaggggccactggagggatcatcccacaaggaaccccttcatagagaactgttttagtccattttctgttgcttataacagaatatctgaaactggagattttttttttttttttttgagacaggatctcactctgtcacccaggctggtgtgcagtggcatgattttggctcactgcaacctccgcctcccaggctcaaatgatcctccctcctcagccacccgagtagctgggactacaggcgcttgctaccatgcccagctaattttgtgtgtgtgtgtgtgtgtgtgtgttttgtagagagtgttttgtagagactgggtttggccatgttgtccaggctggcgttgaactcctgggatcaagtgatcctcctgcctcagcctccaaagtggtgggattataggcataagccaccacgcctggcggaaactgtggaattaatagagaaaaggaatttatttattaccgttatagagtctgagaagtccaaggttgaggggccacatctggtgagagccttctctctggctggtgcagaggtggggactctctgcagagtcccagggaggcttagggcatcacgtggtgagggggctgattgtgctaatgtgctagctcagctctgtcccttgtcttagaaagccaccattttccttcccaagatgacccattaatccattaacctaataacccattaattgataaatggattaatccatttatgagagcagcgctcttaggatccaatcacctcttaaaggcgccacctctccagaccaccactaaggtggtggactaaggactaagtctcaacgtgagttttggcagggacgtttaagcaatagcaagaactaaactcaccaagcatactccttttttggggggcaatttaacatctctcttgtctttgggctggcaccctcggaaatgacaaacaagctcccagatgtttttgaaagccttaaatgagcctgggagacccccatagcatcttcatccctaattaccagcctcagcctctgaggtcgattttcacctgtctgggtttctgtgacaggccagagcctaggaagcctcgtgcatcttggcccaggagtgccccgtgtgctgtgaagaggtctcagttggctcctgccatgccctgccatttccatgagggctgtttcatgaagcacctgccatgatgctggccaagcctagtctaagtagggtgagagagccgagatttaaggtagacatcaatcctaacaacaacagttattattgttattattttgagacggaatctcactctgtcgcccaggctggagtgcrgtggcgcaatctcagctcactgcaaccttcacctcccaggttcaagcaattctcggcctcagcttccagagtagctgggattacaggcgcccgccaacctgcctggctaatttttgtattttaagtaaagatggggtttcaccatcttggccaggctggttgtgaactcctgacctcatgagccacctgccttggcctcccgaagtgctgggattacaggtatgagccaccgcgcccagccagtaattattattatagctaaaacttaatatattcagtctgggtaccatactttgtgctaaactcttacaaaacattgctcatttaatccttacacatgcctcatgaggtagctattatcccatttcataggtgagaagactgaggcagagaaaggcagcctggccgggtgcggtggcttacacctgtaatcccagcactttgggagggcgaggcaggtagatcacttgaggtcaggagttcgacacaagcctggccaacatggtgaaaccctgtttctactaaaaataaaaaaattagcggggcgtgctggcaggtgcctgtaatcccagctattctggaggctgaggcaggaaaatcacttgaacctaggaggcggaggttgcagtgagcctagatcatgccactgcactccagcctgggcaacacagtgaggctctgtcaaaaaaaaaaagaaagagaaagaaagaaagagggagggagggagggaaagagggagggagggagagagagaggaaggaaggaaggaaggaaggaaggaaggaaagaaagaaaagaagaaaagaaaagaaaagagagaaaggatggaaggtagcctaaagtcaatagctgggatgcgatagaatagagattctggctcagaaattatgcaattccagtgcttcactttctttccccgcccccgacagagtcttgctctgtcgcacaagctggagtgcagtggcatgatcttgactcattgcaacctccgcctcccgggttcaaacagttgtcctgcctcagcctcacgagtagctgagattacaggcacgcaccaccatggccggctaatttttgtgttttcagtagagacggggtttcaccatgttggtcaggctggtctcaaactcctgaccttgtgatctgcccacctcggcctcccaggtgctgggattacaggcgtgagccaccgcaccaggccgagtgcttcactttcaactaccacacaagactgaatccaaattgtggaggggagcagggggtgttggcggggtggggaatatgtagctatgaagggatcggttgggcctcttcctcaactctctccgcaagcacactgaaaaggaactagctctctcttcctcatagctacatttgggccaagatgagaggactctgacaaggatcccagggcaagggcacttcctggtgcttggagtaagacccaggatttagtttttgaccaatgtgatttctttatccagcctaaaattctgtagggcaggggcccccaacccccgggccatggactgataatggtctgtggcctattaggaactgggccacacagcagggcatgggtggtgggtgagcgagcattaccgcatgaactctgcctcctgtcagatcagcggtggcattagattctcataggagtgcaaaccctattgtgaactgtgcatgcgagggatctaggttgcttgctccttatgagaatttgctttttgtttttttttttgcttttgttttttgtttttcgagactgagtctcgttctgtcacccaggctggagtgcagtggcataatctcggctcactgaaccctccacctcctgggttcaagagattttcctgcctcagtctctcaagtaattgggactacaggtgcgtgccaccacgcctggctgatttttgtatttttaatagaggcagggttttaccatgttggccaggctgttcttgaactcctgacctcaaatgatccacccaccttggccttccaaactcctgggattgcaggcatgagccaccacccccagccccttatgagaaatctaatgcctgaactaccactgccccccacagcacccccacagcaccccatctgtggaaaaattgtcttccacaaaaccagtccctggtgccaaaaaggttggggacacctggcctagggagaatgatccctacctgccagccaaggctagctgtcagtagaaatcctataggactcagtacacagtgaactcacaaaattgtatggggacacgagattccacattcagacccagaatgaccctcttgttctttctgcaaatgctaagaacctccttgaaaatgtatactaaaattaagaatagaaggatcatggggaaatcctgcaacccacatagttctgtaaattttatagtggttgatttttacacaggaagtcttcacttaatgtcgtggctaaaaaattagccgagtgtggtggcacatgcctgtaatcccagcaacttggaaggctgaggcacaagaattgcttgaacctgagaggtggaggttgcagtgagcctagaccatgccactgcactccagcctgggtgacagagcgagactctgtctcctaaaaaattaattaaaataaaataaaaacaggaatgaatatcacatgcacatctttggggtgtgggaggaaaccggatacccggagaacacccatgtagacatggagagaacgtgcaagctctacacagacagtggcccctgccggaattgattttttttttttttatttctcatcgaggttgtaatgaaataagttattcgaggatatgttatacttttcctttgcctaacactgctacttctgtcctgaaggcaatttgcaactggattttcagtgaattcttggcagcttgatgaatttagaaaaggctattctttcctcatcgaatcgtcttggcacttttgtggaaaatcagttgactataaatgtatgggtttggtcaggcacagtggctcatgcctctaatcccaacactgggagggctaggtgggcggatcacttgagctcaggaattcgagaccaccctgggcaacatggcaaaaccctgtctctaccaaaaatacaaaaattagctgggcgtggtggtgcacacctgtggtcccagctacttgggaggctgaggtgggaggatcgctggagcctgggaagtcgaggctgcagtgagctgtgatcatgccactgcactccagcctggatgacagagcaagatgctgtctccataataaaaataaaaataaatgtatgtgtttatttttggaccctattccacagatctatcttatgctagtaccacactgtcttgatttccgtagcattctcgtacattttaaaatcaggaagtgtgagtcctccaactttgttcctctttttcaagacttttgttttggctcttctgggtccttttcatttctgtatgagtttaaaatcagcctgacaggctaggcatggtggctcacacctgtaatcccggcactttgggaggctgaggcccgtggatcacttgggggcaggagctcaagaccagcaggggcaacatggtgagaccccgtctctaccaaaaatacaaaaaattagctgggcatggtggcacatgcctgtaatcccagctactcaggaggctgagacaggagaatcgcttgaacccaggnnnnnnnnnnnnnnnnnnnnnnnnnnnnnnnnnnnnnnnnnnnnnnnnnnnnnnnnnnnnnnnnnnnnnnnnnnnnnnnnnnnnnnnnnnnnnnnnnnnnnnnnnnnnnnnnnnnnnnnnnnnnnnnnnnnnnnnnnnnnnnnnnnnnnnnnnnnnnnnnnnnnnnnnnnnnnnnnnnnnnnnnnnnnnnnnnnnnnnnnnnnnnnnnnnnnnnnnnnnnnnnnnnnnnnnnnnnnnnnnnnnnnnnnnnnnnnnnnnnnnnnnnnnnnnnnnnnnnnnnnnnnnnnnnnnnnnnnnnnnnnnnnnnnnnnnnnnnnnnnnnnnnnnnnnnnnnnnnnnnnnnnnnnnnnnnnnnnnnnnnnnnnnnnnnnnnnnnnnnnnnnnnnnnnnnnnnngtaaaaggggggagggtggcggggttttggtatatctattgcaatgcactcattctctttgctgctactcctcctccttctcctcctcctccttcacctcctcctctaccttcttctcctaatgctgcttctcctcctcctcctccttctcctccttctcctcctccttcttctcctcctcctcttcctcttccttttcctcttccttcttcctcttcctcctcctcctccttccttctcctcctcttccttcttcttttatttttcttgagccagagtctcactctgttacccaggctggagtgcagtggcatggtcacagctcactacagcctcgacttcccaggctcaggtgattctcccacctcagcctccaagtagctgggaccacaggagcacaccaccaggcttggctaattt

SEQ ID NO: 93210 - DNA, 43536 bp, Homo sapiens
ttttaaatttttaaagctttttgactcttttgtaataacacttagcttaaaacagtgcatagctgcacaaaattttctttctttatattcttattctataaactctttcctattttttaaaataatttactttttgaactttttttgttaaaaactaagacacacacatgcattagtctgtgcctacacagggtcaggatcatcaatattactgttttccacctccacatcttgtcccactggaaggtctccaggggcaataaatacatgaagctgtcatttcctatgatagccataccttcttctggaatacctcctgaaggacctgcctgaagctattttacagttactgatttttttatatatataattagaaggagtatacactaaaataatgataactatagtaaatacataaatcagtaatatagattatcactatcaagtattatgtagtgtacataattatataagctatactttacacactggcagatttgtttacagtagcatcaacacaaacacatgagtaatgtgttgtgctatgactataacgtcactatgataggaacttttcagctccattataatcttataggaccaccaccatatatggggtctatcattgaccaaaatgttacatggcacttgactgtatcctatttgttagaagttagtattaatagccgggtgccgtggctcacgcctgtaatgtcagcactttgggaggccgaggcaggtgaatcacgaggtcaagagatcaagatgatccttgctaacacggtgaaaccccgtctctactaaaaattaaaaaaattagctggatgtggtggtactcgcctgtaatcccagctattcgggaggctgaggcagcagaatcacttgaatccggaaggcggaggttgtagtaagccgagaccgtgccactgcactccagcctggtgcccgagcgagactctgtctcaaacaaacaaacaaacaaacaaacaaacaaaagttaatattgatggcctatatgcaaagggaagtgcattagacaccaccttttaaggggaggtgtatccaagttctggaacagcatatggtaccagaaatattgttgtggccatttttggaaaatacaatatgccataaagtccatatgaagatgcagaatcctcttactccttgagatctttcagttacgcgtgttatttttttccatttgctcttccaataactttgaacatcctgggggaaactcatactgcctacactattctgagtactgtgatgtttttgctgtgtcatttaagaatattcaattctgccacagaaattgagagaaactaagtatgggagcaaatggcttgttagacataatgaaatttgtaagatgtattaagtataaataataaataattacactgtgaggcatgttaaaaataggatgaatggaacatatatgtattgaacatacacaaaaataatggaacacatgagagttccacttttagattaaaagggctagaaggaccaagtaaatttttttttttgagacggagtttcgctcttgttgcccaggctggagggcagtggcacaatctcagctcaccacaacttccgcctcccaggttcaagcgattgttctgcctcagcctcccgagtagctgggattacacgcttgcaccaccacgcctggctaattttttatttttagtagagacagggtttctccacgttggtcaggctggtctcgcactcccgacctcaggtgatctgcccacctcggcctcccaaagtgctgggattacaggcgtgggacacggtgcccagccccaaataaatcttaaatattcataaggtaatgatcatgttactgccagactgacaactatgttatccctaaaccagccactcactggtgagatccactctggccccacacgtgctctgtccaagaaacacagataccatccatagctgctcagtaggttaattataactggttataaatgcagttatagctggagtcaggttccagcagttctccaaaagaaaagtgtgtgctggctccaccttctacctgctgagcagtcttgctcatcctcactatggtcctcataactacaccaccagcaaggaagtctgatgcatcaaacagtacacgaacagtaacattaagattcagatggtataatccttccactctctcccctccccacatcctaaccaaaatatgttagtccactcaatctctttccccttgctgttatgttttaaaatgatttaatagggtacagcttgtgtgcttgtttggcacagaactggcacctgttttgtgaagtggcagctaagaagactctggctgacagaaagcccaaagaaggaggcaagattgagaacaacaatcctattaatttgaaggtggcagggcagaatgggtctgtggtgcagtttaagattaaaaggcatattccagccgggcgcagtggctcacacttgtaatcccagcactttaggaggccaaggtgggcggatcacctgaggtcaggagctcgagaccagcctggccaacatggtgaaaccccgtctccactaaaaaaaaatacaagaattagccaggtgtggtggcaggtgcttgtaatcccagttactcgggaagctgaggcaggagaatcacttgaacctgggagacagaggctgcagtgagccgagatcccgccactgcactccagcctgggtgacagaatgagactccgtcttaaaaaaaaaaaaaaaaaggtgtataccacttagtaaattaatgaaagcctattgtgaacagggttaggcaatgaggttgatcagattctagacttcatgtgcaaccaatcaatgaaatagacacacctgtaaagttgaagatggaggctaaagatacaattaatgtgttccaaggacaggaggttttgactaaaaatggagcctgctactttattacagaactctgttcttacggaccaagaatgcattttcaattagaaaactgcgatttggttccatcacaccctgactactacagtatagttttctctatcattttcctcttccccattactttattatatgtatatattagttacaatgtaactatgtaaacaattaaatgtgtaactgcaagatctctaggagtaacagaattctacatcttcatatagtctttatggcatattgtatatgccatagttataatgcataaaagcgtattgcattttttaaccaaatggtcaattttttttttttttttttgagacggggtgttgctcttgttgcccaggctggagtgcagtggcgcgatcttggctcaccacaacctccgtctcccgggttcaagtgattctcctgcctcagccttccgagtagctgggattacaggcatgcgccaccgtgcccggctaattttgtatttttttagtagagatggggtttctccatgttggtcaggctggtctcgaactcccgacctcaggtgacccacccgccttggcctcccaaagtgctgggattacaggcgtgagccactgcgcctggccccaatgttacttttgatccgcatcaaatgaagataggatgggcggagaaatatggttttgtgaagactcccttctccattaatgccatgctcattcaggtcttatctttatattccagttcgttattttgctctgttttaaccaaaaaaaccccacacacaaaacaaaacaccataacagtttttgcatatcttcttcagttgaagaattgtaatgtattttgtttatgattgtaaagccaaggacaattcttttttttttttttgagactgagttttgctcttgtcatcaaggcaggagtgcaatggcacaatctcagctcactgtaacctctgcctccaggattcaagctattctcctgcctcagcctctcaagtagctagaattataggcatgcgccaacacgcccggctaatttttgtatttttagtagagacgggttttgccatgttggttaggctggtctcgaactcctggcctcaggtgatccacccgccttggcctcccaaagtgctgggattacaggcgtgagccaccgtgccggcctagccaagacaattttataactctttgtacgtggctattacatgtaaggcaatctttcagtaatgacacattactcttaaaaaaaaatcctagttttcctttcaagtcaaatgtcttgtttgaataaacttatttaaaatgaaaataaattgatttaataaactgtgtgactcaggcatctcaatttgatctgagccttttgaactcagccatctgagttccatgaccctctgggatggcctgactcgtacgtggaagctaccattgcatcaaggtaatttcccaccccaataagtgttttacaagtaatatattattaaattcacacaacaaccttatgaggaagggattattattcttatcctgtagatgagaaagctgagtctcagagaggttaattgacccaaggtagcatagctaataagtgagggaactagaattcatgcccatgatgatatgactttttcaccaaactcattcatgtttgtatcttgaatacctaaacgtgatgcccgacacacaattattgtttgatgactttaattgaatctgattatttgccacgtggcctatagtaaattgagactcagttgcctagcagaatgtatgtggctattatttaaagttcacagatgaaaaaaatttcactcagcatttgacccctagtagttgctttaagaaagactgtctacccctacgctatggcaggtttgagaaagggctttcagcattttcaacgcttaaagtgagatcttgatcctatttaccatccttcagccagccacaaaacaggtgcatgctgttcaggtcatggcaagatcccgtcaatctttcagcttcaaactacttaaacaaatctctcttccattttatttttgttagaccaaactatttttttcaaaatatatttttttcaaaatatttgcctgactttagtaacgtgtccctctccccctcactcacccgcattcacacacacacacacactttcccccagacacttccccttttcggttgtttacgcacgaaaccagccagccctttccctagcgaagtgtttggcggtgtagctgtcccgtccccggcgcttcccacagcaacagcgcgttctcttcgcctcccgcagtctctcaggacaggccaggctagcgcaaagtaccgtgttcctggaacaccacgagggcgagctcgggaatctcgagccggcctgcaggacacctgccgcaccaagtggctagagcccggggagggcgaggcgaggtgggacgaggcggggtggtgagcgggccgggaaggcgaggccgcgcggactctgggatagctcctcaggagtgggcgcccggagtgggcgagcggaggaggcggggccgatgaggtgaggtggggccagctggagtaggctaagcagtccagagcagggggcgtccctcagtggaaagccgggcgactgggcggtgcaacagagtaaggcggggccagcggaagcagggagatttccttaggccgcaggcggggaaatggggctggccggggtaggcggagccccgaggcaggggaggcgtggctggcagaggtaggcggtgccccaaggcaggcggggcttgccgagacagggataatcccttaggccacaggctgggaggcagggcaggccgaggcggggaggatcccttaggccgcagtaggggaggcgggtcggccgaggcggggagaaacccttaggccgcaggcggggaggcggggctggccgaagttaggcggagccccgaggcgggggaggcggggccgggccggcgcagggagagtcactcaatggacaggcgagaaagcagkaccggcgcggcggggcggggccggccgagtccctagagctgggggcggggcggacccagcggaccagcggaccacctgggtgctgtcgtagttggaggtggcctgaggagctcagttccctcagcgcccgtagcttcggcggagtctgcgcgatgggcgacccggaaaggccggaagcggccgggctggatcaggatgaggtaaatgttgctgttgcgtcktccccctcaccgcagtcacgccagcccgttagattgcaagttrcaggaccgctgtaggaaatgttattcgccgcggtcaggacaggcctgtccgcccgccctcrccgcagcctggcttcgtcgttgcgagcgccggggaggccgtccccggggagggcggaggaaggagctgactttgggtttgcgtcccgctcgctgctctgccccggggccagccaaggacgacgcttggaggcctcaggccggggtgagacttacscctgcgtttatccgcctcacgctctcccaccctccttccctgttttggagccctggccagggaaaccgaggcaaggaaagaggactgtggcggctctgctggagaggtgcataccatttgggatggtgacaaggagttggagaacgcgtgtggaaattgacacaggtggctggggtgaagatgacaggtagaaggggacacgaaatcctcatgacctcctcccagtgaaaaaatcagggtaggaggccagttttgctcaggcccggctccttaactaactgaatcttyggggtgtcactttcttcctttatacaatggaagtgatacttcasagagaattaagtaaaatgctttatgcaaagtgccacgaaaattgtaggtgcttaataagcccaagttgttcatccaagttgtttatgctgataaaagtacctaaaataaataaaccagaatttgttagactgtaggattgtatggtagtttaaactgttgctgtataattttcaaacactgtcattttgcaaatacttctaagccctttgtggacaagagaaatgctttttgtactactggaacctgttgctgtggtatctttgatttaatactgtgaagatttgggggaaacaaacgtttccaccccaagagattcatgcttggccctacatttctttagaaagttgtagattccaggtttgagattttattttatttaacttgatttttgtaagcatttagtaactaactgtaaatatccctcaagctttttcttcctgttttgaaacaaatgcgtttagtaccaacttccctactcaaaggggaaaattcagactgctgtttatgctaatggcaccagcagtgattcaggcttaacacctggatattacattttatttattactcctatctcaatgatacagacccgcaaggacagacagaattttagattcagaatgaattttagtggtccaaaagtttttaacttgagatgctgggttgcctgaagcactttgtttttctagatgccagagtgcataataggagacctgcatcagagtcacttggagtattttgtaaaaaatgtraattgctggaccaacaccccaaacatagtgaatcaaaatctcttgagatctgcatttttaacaagtacttcaggtgatcctggtacacatattaaaacaaaaacaaaaaaccccccactgtcttaaagggtccatagatagactagaaggggctttataaatctcctgaagtgatatgtagattttgtatgtgcagatgtgaatcttctgagaaaggggtccatagttattgtcaatttctcagagttaactattgctaatctaattcatagtctattgtcaaggtaaagtttaggccagaaaacattaaatggcatgcscaggactcagtagaggagctaaatttaaaaccaagttcttgcacctgggcgggtatcccattggttccgtcagactttgtgggaatagaagtgaaaataatacttasaagtagtgtatgactatgacaacatacagctattttacagaagtagaagagacataaaggcaaagaaacggaagtggtggaattggggctggataggaggtaagagcctggtatgatgccagcctagattggggcatcrtaagtgcttgctgggraatcttgacctaaattgttgtcctgacatgcccaggcatgtcttccaactgggtgaccagaaattgagtcagtcggaaactggaagtaccattctggaaaaaacagcagaatgtcactaaggaatgcctactgctaaactttatttcaaattctcatcactttacacctgtgcggctataataattttgttgtttctctatctcctatcttacctgccattcaatcctaattaccattgccaagttaatccttcattagaccagtgcctcagtgtcactgaccctgtgtcccccaaaaaactcccaaaagrgtctcaattcctaccaaaaagcctggccaacacctcaggctggtgaagtcttgttgaagctgcttttttcatgctaactgccacatcttaattcaagtcctcatttccatctttgaaattggttccttagttgcttgcaaaatctagttttttatcaattaatcctatacgtggttttctgattagtcttcctaatgccacctctattcatgttaattcccattcagaaactctccatgactatttgtacccccaaatctgtggggtacagattttcaaactgtaccctgctatgaacgccagcacctggggttgggggcaaatggggagaattggagtatgagccttctagacctccgatgtttgaagatctttggccacaaaattgattcctaacctcttagtctgatttatcttaagagtctagatcctttgctttagccaaatcacatcattcctacttttgcttttccttgtcctgcatccatttcagcctgttttaatctcagctggcttctcttctttcatctgccctttaaatatcagcattctctaagactgtatcctcagttgtcttgctgctctatatgttctctctggataatcacatccattcccttggcaaccactaatgggatctccatcactcgtgttctgcagtgttatatttttaactgcttactggacatcttgaaactgaattcattatcttttctattcttttttttttgagacggagtctcactctgtcaccaggctggagtacatacagtggcacaatctcggctcactgcaacctctgcctcttgggttcaagtgattctcctgcctcagcctcccgagtagttgggagtacaggcgtacgccaccacgcccggctaatttttgtatttttagtagagacggggtttcaccatgttggccaggatggtctcaatctcttgaccttgtgatccgcccgcctcggcctccgaaagtgctgggattacaggcgtgaggcaccacgccgggcctgaattcattatctcttctaatgacctagttgactttgtgaggatattgtgtttgtaactttgttgttgtcgcctggcttggtgggaggagttaaattaaacttccgttaaacatctaatgtgagaagcaaaatttttgtctgatttatttatttattctccaggtactgagcaccttgtgtgtgccttttagatcttgttatcacccagttactggagctggaaacatcaagggcatctttaactgttcttgccccttgtcccaaattcaaatttttaggaagaataattcattctacttctgaatatcacttaaatcaatttttgtgtgtgtttctagttcaggcaagagatgggtagtacaataatcttttcattgttctttctgcctctaatttctcttctaatctagcaatgtttctagaaaagcgatcttaaaagatatatctgattatgttatttgccttattaaaaaccttcagtggctcccaatagcatacatcttagagttattagatgccaaagtgttttatatcaaagcagaccactttaacctccaaaattttttaaaaatcagattactactaaccaattttgctcttttattaaccctgtaaaaatatagatacccatgagctttgaaatttctatgkctagtaggctgctctctcatgcacccatatatttctttttgttttgttttgttttttgagatggagtcttgctctgtcaccaggcctgagtgcagtggcgtgatctcagctcactgcaatctctgccttctgggttcaagtgattctcctgcctcagcctcccgagtagctgggactacaggtacgcgccaccacacccagctaatttttgtatttttagtagtgacagggtttcaccatgttggccaggatggtctcgatctcttgaccttatgatccgcccgcctcggcctcccaaagtgctgggattacaggcgtgagccaccgcgccctgcccatcatatcttttttcacattttttttttcttctaaaatatgggttcttagattaggtccacagagggtactgtggagagcctagagtttcaagatgcatgaactttctgaaattgtattcaaatgtatgtttgtgcacgtttctaagcattatgaaataatacgtcatctctagcccagctcaaaggttgatgttggttaacctccttstcttcacattgcaaaatccctcataatacactcctaatccagctactcctcttaatagtctacaggttatcaggatagaacaggagaatgtgtatacaaatgtgactttcattctaacttaaaggtactagtcttcagcagatcagttatttatcatcatttaaaaacttcattcatcgkcagggcatttggtgctgaagagtgactgcttgtgatgtccttcccaacttccagtaacaaaagtatagaagttcccaactttcatactttgagtatatcccaaatttcagtaataaaaataacaaaggccaggagtttgagaccagccggggcaacatagcatgacccccatctctacaaaaaatttaaaaattatccaggtgtggtgacgtgtgcacatagtcctagctacttgggaggctgagacaggaggattgcttgagcacaggagtttgagactgcagtgatctatgatcacactactctgatctatgcactctagcctgggtgacggagcaagacccagtcttaaaaaaaaattgctcaaatatttgtggaatgagtaccaactaagtgccaggtactgtgctaagcacaagggattctacaagggtgaaaatggattttactttcaagaagcacaggaaattagagacaattaacagggaattaaattgcagtgagctatgtacttatatctggaacctaacccagacctttggggtgatgtgaagaggggaaaatgtgattgattttaatggttattgggttgtctcactgatgtattgtggtcctatgttaaattaaaattttctaaaggtacctagaaatctgagtacaggaagaagagaaattagcagcccatttacttagctaacatgcttgacacgatactaagctctgggaacatcacaacaaataaaaattggttcctcttctccagggctcaagtgctgtatctgaggaggcccatacctttaaacaagtagttaaaatcaagaccatctgtactgtgatggcagtaggtataaagcacgcaagcccccctgtatttgcatagccgtatgcttgtattttgggctttcttcttgctaagccttagcctcctctgctataacagttgctttggcgaggtgacaatggrtggacgctggagtaaggaacataacgggcctgtcacagtagagagagagacagttttggataggagtctagaagttgtatgtgttctaatcctggtttatacacgtttagcttatttgtatgtcctttgtttatactcattctcacacatgtgcgactcttctgattctcttctgatgttcccgctattttaaaaatatatgcatggcaccatttgctcttagagtgccatcgtgttttgaagcagtgtgaatacaggtatgtgtttctcactttattcacaaagctttgagacagcccacagtgagatcatatgcagtaatgttagaatgtaaatagcagtaacaaattggagtatcagaaggctaagatgaacaaaggttaagttgtaggtaatgagttttcagataagtattatattatttcagtgaagagtagaaagaaaaaacattaaagtagcttataccagtagcttattcattccagcaatcttatcagagaggctctaaagggacattttgttcacaaacttagaaatttgyccatcatgatgacatttatgggtctagctttgtacttatcctcaaactagcaataattacaataatttttgagtgcttactatataccaggctttgtttaaagcacttttaatcatcagaataaacctatgaggtaggaattattttacagctgaggagactgagggttagagaagttaagcagctttctatggtcacacacgcacttcctaacagtattagtcagctaccaggtaacagtaaggattcaacccaggcagacaggctctcaaaccaatgccgtctccctgacttccttagatgkatgtttaggtatgaataaagaagaaatgtctatataaaaggygtgtttgtactttatttttcaaagagatcatcttcagacaccaacgaaagtgaaataaagtcaaatgaagagccactcctaagaaagagttctcgccggtttgtcatctttccaatccagtaccctgatatttggaaaatgtataaacaggcacaggcttccttctggacagcagaagaggtacgtggcattgcctccaagagcattcacatcctatagtgcagtgttccttcttgttttacaggatattgaataactttaacttatacattgaagaagatcagttgtagaagataagtrttggaattactgagactaaatatgatgttctcaatrttttagtttagattactatctataaacaagttttctgctgcaacaatggcatctaattctgccagatttttatttccaatatattagaacattttttttctttttcttttttttttttttttttgagacagagtctcactctgtcacccaggctagagtgcagtggcgcgatctcagctcactgcaaactccacctcccgggttcaagcgattctcctgcctcagcttcctgagtagttgggattacaggcgccagccaccacgcccagctaatttttgtatttttagtagagatggggtttcaccacattggccaggctggtctcaaactcctgaccttgtgatccacctgcctcagcctcccaaagtgctgggattacaggcatgagccaccacgcccagccaacattttctatttttaaacagacttttagtttgatatggccaagtaagacttgtctgactagtcttacaaggtcagcagaataagtaaaattgcagctgtagtcaaaaaatgagtgaaagctgtagcaactctgctttcaattgagagatttatctgattgtacaaaatgagccgctgcatgaagagtttgatcctctaggctgtggactcactcccgagtcagccaggtggaactcacagtgctgctcccagtttggccctgccctcagctacatcaaacgtgacagagttgccactaatagatcagctgtagaaagctttttgttaattccacctgggagatcagttgaacacagcaaactagaaaatatttgctggttggtaaggacagtggtcatgaaaatgattgccctgtagtctaactgaacaaatagttattgtcttgatctttaaatataatgggtgatacctatacagcactcttgttctgtatatgtttgtatatgtatctctatagatagatgtatctatttggatagatagatttgaatctatttttcaagacattaattctataaatgttaaacacatgctgttaagaatgcaggctatggggtcagactgcctaggtacaaatcctgtgccactacttactagctatggaactgggaaagttacataacctctctgtgtatcctcatcagtaaattaggctaattgtacttggctatttgtgttgttatgaggatttatgagatatttaaaatggtagttgacacttagtaggcactaaataaatgtaaactattattttatgcacagaagggggaaaatttaacctagaaatcagaaggcaccagtgtttgaagcttctattacactaattttacccacttacccatctttgttatattgtagtgttatattgtcaacatctttgttatattatagttgacatatagagcaaaaaaccaaaccacacaaaaacaaacacccaatattttcatacgtggtcataatgcttgacacacctgactgtccctaactgtctgtggtttttagaaaggttttttgttagatacggttcagagaacgagtggaatacgcaggtggctttttcgttcattatgttaaaaaggtacttaggattcttaggattcttgaaattcatttggaaattaacttgcatcttttagcaaaggtaatatgtgacctgtaacaaagcaacactaatttttaaaaactgaaatctacaggttggtacgtgttctgtagctaattataggacgattcaaatacatattttgaagataaatcaaacacatttttagttccacatatttttcatttacaaattatgtaagttaccatttagtcagcttaaatggttgagcttaattcttaaatatggctgatcaacagaaaccctgatcaaaagacaaaagtctggggtttgggacttttttctttaaagccactcaggcagttatgataattgtctagtttggaatcagtatttaaatgatgaaattgagaatttgctcaaataagaaaaagctaggcaggaagggaatatttccaatgtagtgtaaataaaatttagaagacctttgaaactgagtgttcaaagaaataattttaatatttaagaggaagcatcttacaatattaacatttaatatcaaatatataatatataagaggtcgagcatggtggctcacacctgtaatccaagcactttgggaggctaaagtgggcagatcacttgaggtcaggagtttgagaccaacctggacaacatggtaaaaccctgtctctagtaaaaatacaaaaattagccaggcgtggcagcaggtgcctgtaatcccagctactcaggaggttgaggcaggagaatcgcttgagcccaggtagcagaggmtgcagtgagcccagatcatgccactgtattccagcctgggcaacagagtgagactgtctccgaaaaaaaaacctgaggggttataatatatatgaatgaagaagatgtccttcagttaaacctgagttgagcttttaatagaacagaacttgatttttaggttgcatattttaaaagatgaagacaaatatttcctccaccctgctccgttgtatccccagtgcttagcacggtgtcaggtgtgcagtaagtgctcagcaaacacttaaagaataaattagtgggaaaaaggatttggaaaatagcatgtgattaaaagattgggacattagtcctttttggaaaggtcaaagagattgaggcttgaggctttgtgggttttttttttkttgttgttgttgttgttttgtttttgagacagagttgcactctgttgccaggctggagtgcaatggcacgatcttggctcactgcaacctcctcctcctgggttcaagcgattctcctgcctcagcctcccaagtagctgggactacaggcatgcgccaccatgcctagctaattttgtatttttagtagagacagggtttcactatgttgaccaggttggtctcaatctcttgacctcatgatccactcaccttggcctcccaaagtgctgggattacaggcgtgagctaccgtgcccagccgagggtttgttagagtaaataaaagaaaggcaaaagacaaagacaattacatatttcaactgttcatgaagttaattatgaaaaatatttaaaagattttttctgacaaaattgaagcaggatagtttctccgatcccttcgtgggtgggaactggaatgcgcatgctggagctagctggctgctttggcgctggcaggggcaaactccactcacttgaacccattgcgctcagccccttgagggagggagcatgcaggtgagcaggtgcaggagcttgggtgaattcttttgggcaccggcaggagcaaaactccatgcaggcctcatggcagcatctgtgaggagtacccacaacccttgaagccccagaaggaatgtgttatagttaactctcttttagcttttgctgtccgcagatggcttaagttttaacggctcagtgggccctctgccttttcacatggggcagttggtctccaccagtgagggcagagggtcagtgtgacagcttttagcatccacacctgtggcacccacgctcttgttcagcatccaggaaaaatcagatcacatgaacaaatcgaagggtggtgaatacagaggattttgttgccaatgaaagtggctctcagtgggaagaggagctggaaaggggatggagtggaaaaataatcttctcctggagtctgtctggccgtccccagctgactcctctccaaaggaatgctgtcaagctgtccctctgaagttaagctgcttctctccgacatccaaccgtagtctctgacatccagctgcttctcctcttctcctctcctcttctctgctggtagagcctggggtttttatgggcacagggtaggggagtggggccatgggtggttttggaaagggcaacattatagtgggaaaacaggaatacatgtcactttgggctgcagttccaggattgagggtggartcctcgctggggaccatcttcttctgcccagaatttccctgcctcctgtccctatcaaaatgatgtctayatatgctgtgtgatggtatttggaggtggagccttgggaggtaattaggtcatgtgggtggagccctcatgaataggattagtgcccttaagagacatgagagatatgatctctctctctctgctatgtcaggatacagcaagaaggtggccatctgtaaatcagkaagagggccttcaccaataacccaaccatgctgacatcctgatcttgggctttcagcttccagaaatgttcaaaaagaaaaataaaagtatgctgtttaagcaacccagtcaatggtaatttgttatagcccccagaactgactaagggaaggtacatttaaagacaatttttggctgggtgcagtggctcaggcctgtactcccagcactttgggaggttgaggcgggcagatcacttgagctcaggagttcaaaaccagcctgggcaatatggcaaaaccctgtcactaccaaaaatacaaaaaattagccaggcatggttttgtgtgcctgtggtcccacctgtgcctctggaggctgaggtgggaggattgcttgagcctaggaggcagagactgtagtgagctgagattgtgccaccgcactccagactgggtgacggagtgaaaccccatctcaaaaattaaaaaaataaacaatttttaaattgtaggtttcaccaaattctaaagtacgtctcccttaattccaaagactaattctaatgaacattttcaaaaatatttccattcccaatggaagccatacctatgtataaactgctttaaaaaaaaaactgggttgttggccacctgtgatggctcacacctgtaatcccaacactttgagaggctgaggtaggaggattgcttgaggccaggagattgagaccagcctgggcaacatagtgagaccccatctctttaaaaaaacaaaacaaggccagctgtggtggctcgtgcctgtaatcccagcactttgggaggccgaggcaaacagatcatgaggtcaagagattgagaccatcctggccaacatggtgaaactccgtctctactaaaaaatacaaataattagctgggcatggtggcgcctgcctgtagtcccagctactcgggaggctgaggcaggaggattgcttgaacctgggaggcgaaggttgcagtgagccaagatcatgccactgcactctagcctggcgacagagcgagacttcatctcaaaacaaaacaaaactcaggttgttacctgcctggcattacttctggatgtaaaagtagactgattacctggcagtaaagtagcagctacagttggttaataggtgcctaattatctaacaccatagcamatattatataaaatgttaaagcagtgactgttgagattcattagtttatttacttcagtgccttcttgactagtttttactctcccccctccccttttagcccttctttcatttgcttcagtgccactagattatgttaatttgaatatttttaaagtacatcctggccagcttcttaattagccagaaaattcgattccatcktaattttttaaarataaattttattgtgtatgtttaaggtgtatgacatgatgttatatatatatatatataataaaatggttacccattatgtaacaaattaatatttcctttgcctcacatagtttagctgttcacccccccaccaagaatagctgtaatctactcatttaacaaaaatcctgaatataatacacttgttaacataacttttttttttatttctttgcagtgctaacatctttctttttccatagtttactggtagtgggatattcctacttaacaatagaagttagtttcccaaacactttgagaagaacttaactccaaattaaaatttttgaaaatctttttattccaggtcgacttatcaaaggatctccctcactggaacaagcttaaagcagatgagaagtacttcatctctcacatcttagccttttttgcagccagtgatggaattgtaaatgaaaatttggtaagatttttgcttgatttaacttttgttctcctttagcagttaaatgatgataatgtcagtaagattattaaattcagccaaagacaagatgtctaaaaaatgaactagrtgaagcttaactctttaaatgtttttctgatgaattgcttatccttkgaccagcaaactattattaaatcaagcataaatgatatgaatcaaaactatttacagtrcattaacatgagtttgatttttactctcagatagtaagcttaatagagaacctgcaccttaacctttggagctctgtaatagaacactggattctggctccccattttaaaacttgattatggttgatcaggaggcataatttctttttaaaaagaattagaaagataggccgggtacggtggctcatacctgtaatcccagcactttgggaggctgaggtgggcggatcacgaggtcaagagattgagaccatcctggccaacatggtgaaaacccatttctactaaaaatacaaaaattagctgggcgtgttggcgcatgcctgtagccccagctatttgggaggctgaagcaggagaatttcttgaacctgggaggcagaggttgcagtgagccaagatggcgccactgtactccagcctggtgacagatcgagactccatctcaaaaaaaaaaaaaaaaaaaaaaaagaatatactatgcaaataatttaccatggagaattgatggataaacagtactgcctaggatactgcttaaaataatccataaggtctttctgacctgtttgttacatgacaggcagtttttaagcgataatgctgatgtccagattctgatttgcagtgtttaatgagagcctrtagaactggatatatctattttccttatcttcttaggtggagcgctttagtcaggaggtgcaggttccagaggctcgctgtttctatggctttcaaattctcatcgagaatgttcactcagagatgtacagtttgctgatagacacttacatcwgagatcccaagaaaaggtattgttgggattttatttacaaaatattgcttacggcttggttatgttcagatcagaatttattccaaaactcaatgttaaggaaagattattcaagtatggaagtttctgagcataatattttctattgcttaataatgtattgggttttaaaaaaaacttgttatagaaccagttaacctttagatattttatctttaagaactgttcagtagcatcttctgtttagaaattgaatactcaaatttagctggttttgtatgagaccagattcaaaccaataatttgagttttatttctgttctatggacatgtaaaaatgtataaaaactacagatctggtagcataccgtagagttacaattattatctctgattaagtttagtccaattaagaaaaacaagtgaggccaaggcatggtggctcatggctgtaatcccagcaccttgggaggccgaagcaggtggatcacgaggtcaggagattgagaccatcctggctaacacagtgaaaccacgtctctactaaaaatactagccgggcgtggtggcgggcacctgtcgtcctagctactcgggaggctgaggcaggagaatggcatgaacccgggaggtggagcttgcagtgagccgagatcgtgccactgcactccagcctgggcaacagagcgagactctgtctcaaaaaaaaaaaaagaaaaacaagtgaataactttgctgttcattcttttgtttttacagggaatttttatttaatgcaattgaaaccatgccctatgttaagaaaaaagcagattgggccttgcgatggatagcagatagaaaatctacttttggtatgtggctctaatttatgtatgatcagatttgcctaaggtgatatgacagtattttatgtggtgtgactatccagtacgaatcaaagttacagcatggaaaaggagtacaaatgtctcaaatgcacctttaccaaaatcattattcctaataattaattagaaagtggtgataaagctgttacctattctacttaataagttggaagttgaaaagttaagatgttagtgcataattacagttaaacaggagtcagtcacatagcaataacaagagtattatagcaattcacagtttgtatctggcttttaagtttattttaggaatttttttttttttttttttttttgagacggagtctcgctctgtcacctaggctggagtgtggtggcgtgatcctggctcactgcaactgctgccttccaagttcaagcaattctccctgcctcagcctcctgagtagctgggattacaggcacctaccaccacgctcagcttatttttgtattttttaatagagatgggggttttgccatgttggccagactagtcttgaactcttgatctcaggtgacccgcccaccttggcctcccaaagtgctgggactgcaggcatgagccactgtgcctggcctattttagaaatttaaagcaagtgaaatcttaacatttttcaggaaacaaatatctagtttctcaaaaactaaagattagtgtaatcaactaggacaaaaccaatttgtaataacaggcttatttttcataggtaagctaaatgcaaacacccttctggctgagttgagatcccatagcatttttttaaggaagtgtatcatattatgtcttatacatagtagttgctcaataaatacttactaaatttaattaaaatatttatatatttcatttggatagctctaagtacccatctcattcttatctatttttaattggtgttctttactttctggttttattctttatgtgaggaagcaagtctcaaaatttttggtctcaggcccctttgtactcttaaaaattattgagcactccaaagtgcctttatttgggtaggttatgggtattgttatttttgcattagaaattaacattgagataatttaaaaatatttattagtgcattctaagatagcaataatcaacccattatattttaatacagataacacttttatataagtttctatattttccaaaaaaaagaatagcatgcttttaaatttctgtaactcttttaaatgtctgacttaataggaaacagttggagtaccatatctgcctttgcattcgatttgttgcagtgtatatgtatatagtatatgcctcatttaaatatgtattatmgttagaaaagggaggaatattttatttagcttttcagattattacggatatgtcatgtagcctctagaaaataccattgtaaagtatgagagactggtagttaaaaaaaaataatgccttaatgttattatgaaaatagttttgacctcacaggtctcctgggtctgtggatctctcagggactcttggaccacactgaagaaccagtgatatagtgcgtatatgggccagcatgtagtataccagggatgaagcagatatgtttgcctccttgccttcagttcatttcaagaatgagaaaagcagccaggcatggtggctcacgcctgtaatcccagtgctttggaagactgagacaggtgatcacttgaggccagcagttgaagaccagtctgggcaacaaagcaaggcccccatctctacaacaaatttaaaaactagccaggtgtggtggcatgcacctgtataccctgctacttgggaggctgagagaggaggaccacttaagcccaggtgtttgaggctacagtgagctatgatccactgtgctgcagcctgggtgacagagcaagacccagactctaaaaaaaaaaaaaaaatttaaataggaatgagaaaatcactggttctcaatatatgtaaaagtcatctggagaatttgtggaaaaacttttaagaatcctgccaaaactgatgtaggaggcccaggtgggactgaggaatctgcattttgtattcakctgattccctcacaaggagcttcagaaacactttgggaaatgctggctttagagaaaaaagaagggaagaggcagagtgttccatatacgctgaaaatattagtatgggtaggtagtgatgaaaaatgatgagcaggcccacggaaagcatgtatttcatgaactacccaagaaggacaacctagaaatagagaacacagagaaggctggcagtcaccatgtaactacatgaggactccagctagattctccatattgcttaatctcaagggaaactccatttcaggttctaatatagggtctcagaggaaagaacatgttctaaaattgtggaggggagttgaatgggtgtagagtggaacagggaaagaggaaagagtgaagagtgcattggtggctctcctttttgggagtggagctaaaagacagtaacatggaaatattgccttgctttgctgcacactgctactttcctttaaccagctgaggaagtgctgtttcatgaactgatttggctacctgcaccattagtagctctaagttgaaaagggcagctctttcacctggcttagggttttgcctaacatttttggtgaccttcttagtgccttttgcactaagatccagcgtagcaactattctttccttatatccagactcttataagcctttatttttagctaaagagaaactaagaatatttctttaaaaattattagcttggaagtttatgttataaggagattcaattcctatagagcaaaaattttcctaattatatatctgcatagatttttaaaaattgagacatcctgtttaatttttaaaatatctttaaataacttcaaaacaaatatacagattaaaacttaatatatgtaatgaaatttcatttcaagcctcaaaaaatattagctacacaatcttagtacattgccatcatagaggtcagctgtatcttaaaaatgtatccgactttcccctctctaaaatgaatcatgaggcctttacattcactatagtttttaggagaaatgttccggaaccctctttttatttcacatatgttctcaaaaaattgtaaaatgtaccacttataatcctttaatcttctccaaaaaagaatagccttctataactatgttatgattttcattctttagtattcacattaatgtatagcatggttacaataccaattttccactaggcacagtggcttgtgcctataatcccagctacttgtgaggctgagatgagaggatggcttgagccagaagttcaaaccagccagggcaacgtagagagaccttagctctaaagaaataaaaaaattagccaggcatggtgacgcacgcctgtagtcccagctacgtcagaggctaaggtgggagcattgtttgagcccaggagtttgagactgtttgaattattaatgcaccattgcactacagcctgggtgacaagagcaagaccccatactgtctctaacaaaaattaaaatatcaatttttcttttattcacgtttgtatttaattatagtctactttcctgacagataattatccttatgatgttaccttaatgtcaattaaaaacgtatcaataagttatcttaatagtaagataaaagatacagtaagttatatgttaaactaatgacaagcctcatcttaagaatagtgatgatgatgatgatttttgagatgggctcactctgtcgcccagctggagtgcagtggtgtgatcatagcgcactgcagccttgacctcctgggctcaagcattcctcccacatcaacctcccaggtagctgtgactacaggtgcgcaccaccacacccagctaatttttaaattttttgtagagatggggttttgctatgttgcccaggctggtctctaactcctgcattcaagtgatcctccttcctcggtctaccaaagtgctggtattacagatgtgagccactgcagcacttggcctagaatggattttaatgtcttctctcatctagtacttatataggttccattgagtcagttcaggacttgtttattaagtgacttctttgggtgtggtcctgtgacatgtactgaggtataaaccgtgatgtcacctatgaaaacggtttgtagtgcactcaagcactcagctgcctgtatctcaccgtcttatagaccaaacctttttccttagacatatataaatacttttctcaggcatatgcagtgtggtgacataagcaccttgtgaatgaccttttgggttacagctctgatcatcctgcataatgttacagatatgatgccactgtagacaatttattaataggagatggatttctacgaagtccttgcctaacaatgagtaacctttaaaattggccattttgtatttagcagaaaacagtatttttgcttatgttatggggacattttatctaatagatatatttattatcctcagttgggtttatctattttttttaaattgcagatacacgccagtggtttttgaaatgtttgcagatggtctgtaagataccataggtttctaaaaatataaacttaagcaacctctcctcctttcagaggaagacacttgtcataaagtctaccttctactctccagtacacacacacacatatgtatacatactgcacacatgtgcatgtacctgcactcatagtcatgtgtggtgcacacgtaaatcacctcttgttttgagtatggaaggtccttctttgtccaacgccaagacctacagaagtccatcgtctgacagaggatttgaaggaggcatacctttctgctccagtaggtagaggtggckcattttctcctatggagatctttggccatggcactaacttgtgtattttgtttctttgcaaacagttgtggtatttattgttatatatgtgtatatatatatatgcaaatgtttgcagtatatttcaaaaattgaaacgattttatgtctcccaggggaaagagtggtggcctttgctgctgtagaaggagttttcttctcaggatcttttgctgctatattctggctaaagaagagaggtcttatgccaggactcactttttccaatgaactcatcagcagagatgaagtaaggaatggaatgtttttctagttatatttgtattcatatttgatgttcatctatttttcttttccatctttttttttttttttttgagacaggatctcactctgtcacccaggctggcatacagtggcacgatcatggcttgctgcagcctcgacttccctgggctcaagcattcctccyatctcagcctccattgttgctgggacagcaggcatataccactacacctggcctaattttggtatctttagtttttttagagacagggcttcaccacrttgcccaggctggtcttgaactcctggcctcaagcgatctgcctgcctcagccttccaaagtgctgggattacaggcatgaattactgtacccagcctatttatttttctttctcctgaaaaatgctgtggtgacatgagtatcctggtaattaaaataggaagtcacgtcatcttgcttttaagacactgcattttcctcctgtgtctcttaccatttctcctcggtctcctggtcattcttaatatcagtgtcctcctaggttcccgcactggccttgctccttcactatatatgccctcctggctgatcttgtttactgtaatggaatcagctaccatctaaatgctcataactccgaaaacctaccctttgtcccagatattctttcctaagtgccaaacccatgtatgctagtgcatgttagacattttctcctttaagttcccccaggtatctcaaacctgttatttcagaaatcaaactcatcatctttctccaaaaatttgttgttccttctgtttttcctatttcattgagtgtctctatccttcttttccaatcatctaatttaaatttaggaatcattttagattgcttcttctttttcagccacatccgatcagtaagtaagcctggtctccctctgcctgctataccctttctaccctttccatctttcttaccacccctttttttttttttaaacctttttggattaccttctcagaagagacatctcaaaactttcctgatcaattaggtgaaactggccactctttcctttatgtatccatttgaaacctgaacctgtccatgtcttggagtccatagcatgtattgtacttcttctttctctcttctgctagactttaagctccttagtgcagggactttgttttatttatctttctgttctcaatgttttggctattatagccattcagttaacatttattgcctacactaatccttaacttctctgaaccttggtttcttcaactataaaacttaaccgttttgttagaatgcaatgaaatagtgtatgtgaaagtatttttttaaatgccataaaatgcttcatataattactttttgctttttcatggctttaaatttttaataacttttattagaaatgtcatataggattgttatagagaattgagagaataaaaaattaatctcaacacagagagaactacatttactgttttgttgaagtatttctttatagactttttttctacatttaattctatttagatatataaacatattttaatcattcatatatttaggagttgagatgttctttttccacttggcaaaatactgcaatcatttttctgtggcattaagcaccttttgaaaatagtagttttgttaaatgtataatctaatgaatgaatcatttatttgacttttataattagaaatttagattatttccaggttttttgttttactatagtataaaatgaatacctttacatatatataagctttgtcctccctttatattattttcctaagcttgatcacaaaaagtagaattactaagttataaagcattcatacatacttacttgcagattttttttccagtaattttataacaattttcagccccatctagcaatgtatgaacattttctaccatactctcaccagaatttagattaatttgctaaatgtttggcaaatttgatagggttaattggtatctcattattggttttatttgcattgtttaattattacttagattgaacacttttttcataatgatattagtgatttgtattttttctgtagttgcctacttttatcttttgcctttattactggtgcaatattaacatttttgttatttaactctgagtgctctcactattttaaggttatttcttcagtagtctattatacttaaaggaaggggtcatgcttgcttgttcattggtttattcccaatgtacagtgactgattgggtcctttcaacaagtacacctttatagcatttgttatatttatagcacaaatataatataaaatacaaatttgcttatatttatttcacatattttcccaatttatcctttgctttttaatttttgttcttttaacatacaaaaccttaaattttatgtaatccacttccagagataaattaattacacattttttttcttggttttttaacctttaagtctgtaatgcaattggaatttgtaaagtaggatttagcataaatataataaagaataagttagaatttaattttattttaaacactcttgggaagtttttccaatttgccttgttaagtaatccatcatcctttcttcattgacttgcgctgtcttctttattatctattaaggttttattagactaaaatcggtttcatggctatttttacttccttattgacctatcagattttattctataacaaaccattttaattattatagtttcatatattttaataatttgtaggataaatatcgaaacttttcttttgaaagtgttcttacaagattctgtccgtttattctattcttttttttttttttttttttttgagacagggtctttctctgtcacccaggctgagtgcaagtggtatgatcctggctcactgtagctttgacctcctgggctcaagcagtcctcccacctcagcctccttaagtagctggaactacatgcatgtaccaccacatccagttaattaaaaaagttttgtagacgcagggtctcactgtgttgcccaggctggtctggaactcctgggttcaagtgatttcccaacttggcctcccaaagtgctgggattacaggcatgagcccccgtgcccagccttccagattaacttttgaattaaaaacaatcccatttaggtacttgacctctgtgcccgcttgggactctttgaagtgtacttttctttcttttctgctctaaagccttttaaaataaattacaaacacacacacaccaattccattgggattttgattggtattgctttctgtaataagttacctgtcagttttcatcaacactttaacatctttcagccttgatggtaatttcttctttcttccttttttttttttgaaacagtctcactgtcacccaggctggagtgcagtggcgtgatctcagctcactgcagccttgacctcccaggttcaagcaatcttcctgcttcagcctcctgagtagctgggactacaggtgtgcaccatgcctgactaatttttgtattttttgcagagatggggttttgccaggttgcccaggctggtctcgaattcctgaactcaaggaatctgcccaccttagcctcccaaagtgctgtattacagacatgagccaccatgcccagcctgggaattccatctttctatatccgacctctctcttttttcatgttgaatttttgaaattttctttttytytttttttttttttttaatatttagctctatactatctattctgtgttttggagtcctgattattgtaggttgactctccttcacctattctccaattacttaagattctattgcatttgtataaccatactcgggtatttcacaagtttattttcatttttggttgagttatctgtaagatcatatctgctttgtatggcttcaggygatattcatcattgttcagtttccattttcttatttatttattggtattttttatttactyctatttatttatttatttwtttattttttatttttttttgtagagattgggttttgccatgttgcccaggctggtcttgaactcctggactcaagcagtctgcccaccttgacctcccaaagtgctgagattacaggcatgagccaccgagccccacctcagtttccattttcattagaactgaattcatttttatcttgagcctttcttatttaattataaatgtatttttgaaatctgagtttcatctgttatttaaatactaattatttttcaatcattccttaattatttttgaaatttaaaaattaatgaattttcatttcaggctttcttgctttattttcctttccaaaatgcttttatttgcagattttgtttgttcataaattaatttttctataatgttgatgaactaagatttgctggcattgaaaatttttattataggttattgtattggcatytaatgagatttgaaagaaggaagttcctagtcctattaacccctcttccattttccagaagttctgtgttatattcctagaaccactttatacaatgcttgacccatcaccatatgcaaatagctgattaaaagttatttgacaatgacatttttcttcccttttagggacttcactgtgactttgcttgcctgatgttccaatacttagtaaataagccttcagaagaaagggtcagggagatcattgttgatgctgtcaaaattgagcaggtaaaccgggaagtttgtgtaattagcacatctctctttctctgatgtttgtaccactattatattgactcataagaaattctgtaggtcaataaaaataccagcaattttattctggtcagcctgacaataccaatacatgatatattacaattattatgtcagtttacaatttgctttagtaagtcagtctttattatatattaaggttttatgtatactaaaacctgtttcagggctatttttctgtcttattgatctctgtcaaattttatgccatgatcagctaattatagtagcttttttttttacatttttagtgactggagaacagtgatgattttttatttgttttgtatttttaataacgtagcaaggtacctagcttgaagcatacacaaatttttatagaatgaataagtaagttaatgaaaagtaacaattaagttagggtatgtacggatttcttactagaaagagctagatgcgctacttaggatgtgtttttatcattctgaaattgcttttgttttggtaacactgcgtagtttaacaggcgtagtttgtatattgaaagaggaaaaaggcataacaggtactttggtatctttaatcattttgagaactaaatccaagtggttaatatatttttatttttcctctattaacgctttaccactatatagtctttcagtatggttggagctattttatctcccaacccccaaatctgtttgtttcttttttctcattttctttgttaattgagtttttctttctttcccagctcccttccatagtcatgttcttcatgatgatcatctttgaatctttttccagatattttagaacaaagtatcttttttttctattgagaaagcatacgaatccgagtcttatatctgctacttcaagaaatccagtaatttggtagttcgtttccatttattttggctcttcgaaaacatgaaaaaatgtgaatagttaataccccaaatgtttttaaatatacggacatcatttgccacattgaaagaatttatcctaatatactttccttggacaaaatcagtcttagaaataaaacgaaagtcctctttctatttggaaaatacatatttatagttttgtttgtactttattctgtttttgttttcatcccaggagtttttaacagaagccttgccagttggcctcattggaatgaattgcattttgatgaaacagtacattgagtttgtagctgacagattacttgtggaacttggattctcaaaggtaatgtgtttaaaaatgtgttactactagttaaaatattataggaaagcaaggaccctaaagtataatttactgaaagcatttgtaacatactattctattttttaaatgtcaatgacagagacttgttttgtatraacaaggttttgcaaaatcctttgaaatttaaaattaataactgaagtaggaggctggtaaaatattagaactaataagctcaataaattattttgcaataattgtagctgtatatttaataggattattttcaaggagttaggtttaatatgcatatatatattcaccctcatataaatcgccatgtgtctatattgtggtttgggagttaatacttttaaatagggaatagttattaggaagacattaactgtcacaatataactctttgaacagagttattcaagttatttttgtcatttatcagagataatgtacctgaatttcatcagtgcggttttcccattacttaagacatggagcctgcagccacactatctgggtttgaatcctggttccaccactttctagctgtgtgacctttggcaggttgcttaactatctcagtttcctcatctataaattagagatagtaataatatttactacaaaggattgttgatgagttgatacacttaaagcacttaaaataatattagacacataataaactcacactagatggtcactttgtacttaagtgaaacacagaaattcactatgtactataccatggtaattagaaatacagattttgatttcttgtcatgaaaatgtaagttcaaattatctttaatgagaatccttatgaaatctatgatgctgtggtaatcattacctatcttgctaatgttgtattagcagatatagcagaattatattctgataaccacccaggtacttaatgaaaaagtcaagtggggcgtaggtttttttggtaagataaactacattttaacattttagttgcaagatcctctctgtgtttactaattaatgagaaatcaagattataactatattaatataatctcttaaacttataaactatgtatattaaaagaaattgtgtttgttcataacttttaccaatatttttgttattagaaaatgaatttgcttatttaagccttacagtgaattcgctattctttaacccattaccatatcctcacatccacacgttcatgttctgctgcttattagaaaactgctgacccttgggtctaattttccttttgggaacttgctaactgtaggtatgtaaaacatgccacctcctgcaggagaaggtctaaacacaatgtaaaactttgtttttccacaggcttcaaaatatctgagtaaattctaaaaagcagaaattatagaggccttagatttttaatgcaatgaaagtagaaactgatttaaaaattgccaaaaagcttaatctacttagagattaaaaatatatccgttaggccaggtgcggtggctcacacctctaatcccagaactctgggaggctgaggtggaagaatcacttgagtctaggagtttgagaccagcctaggcaacatggcgaaatcctacaaaaaattagccaggcctggtggcatgcctgtagtcccagttacttgggaagctgagctgggaggatcacttgagcctgggaggcagaggttgcagtgagctgagattgtgccacggcactccagcctgagcaacagagtgagaccctttctctctcgctctctctctctctctctctgcatatacatgtatctcctttaaaatgagatttaaaatgaaaataaaaattaattgaaaatataaagtaaatgacaatatgattactatgtatcaaaacttgtaggagctgggccttgtggctgactcctataatcccagcacttcggaggccaaggcaggaggattgctcgaccccaggagttccacactagtttcagcaatatagcaagaccctatctctacaaataaaaataataataaggctgggcacagtggctcatgcctgtaatcccaaaattttgggaagctgaggcaggtggatcacctgaggtcaggagttcaagaccagcctggccaacatggtgaaaccctgtctctactaaaaatacaacaattagctgggcatggtggtgggtgcctgtaatcctagctactcgggaggctgaggcgagagaatcgcttgaacccaggaggcagaggttgcagtgagccgagattgtgccattgcactccagcctgggcaaaaagaccgaaactctgtgtcaaaaaaaaaacccaccaaaaacaagccacttaatttagtttgtttttttggtcttggttactttgtccatgccatgaatgacttagatctaattttttgaaaagtcttcagttctaacatctagtgagtctatggctattggttcagtgccctttcactgtatcttgctgtatattacagctccaatattccctcactttttacacacaatttctgatggagaatttcatagaatttcactcagccacacccagcatatgagtttttggaaaaaagatacataaatatttaaagctttatttaaagattaagtcacatagcatgcaattcacccatttaaaatgtacaattcaatagtttttagtgtagtcacagagttgtacaaccatcataacaacctattttagaacatttttatcaccccataaagaaactgtatccctattagcagtcagtcactcctctttcctccccttacccaccttgccttaggcaaccactaatctaatttttgtgtctgtagatttgcctattctgcgtctgtagatttgcctattctgcatattctatttcatacaaatggaatcatataatatgtggccttttgtggttctcttctttccttagtgtgttttcatggtgcattcatgttgtagcatgtatcagtgctttattcctttatatgaccaaataaataatattccactgtatggatataccaaattttatttatccattcgatggacatttaagttgtttcctcttttgatctattgtgaataatgctactatgaacgttcatttacacatttttgtgtggacatgttttcatatctcttaagtatacwcctaggagtgaaattgctggatcatatggtaactccatgtttaatcattagaagaactaccagactgttttctaaagcagctgcacaattttatattcccaccctgtatgagggttctaatttctccacatccgcaccaacacttattacctgttttttaaaaaattatagccatccgagtaggtgggaagtggtatctcattgtgatcttgatttgcatgtctctaatggataaggatgctgagcatcttttcattttgtatatcttctttaaagaagtatcagtttgtctatttagacactctgcccatatttaaaattgggttacttgaatatatgtttatctgtagtgttcatattttttgctgggatactcctaaattgagaaatcctcttttgttactccttgtgaatcactgaaatatcccacagtttccatcaagctgtatctccaagtctgcttcttgaattcttttttttttgaaatggagtcttactctgttgcccaggctacagtgcaatggcatgatcttggctcactgcaacctctgcctctcaggttcaagcaattctcctgcctcagcctcttgagtagcttggattacaggcatctgctaccacgcccagctaatttttgtacttttagtagagacagggtttcaccatgtcagtcaggctggtctcaaactcctgacttcaggtgatcccacctacctcggcctcccaaagtgctgagattacaggcatgagccaccatgctcggccttgtttcttgaattctgaagcagtaaaaaagcttcttgttagcatagtccccctttttgtttggagacatctagtcactatggataacatttattctgtcttccctgatcwtgttcccttaatgacaatttgttgattatctgttctcttataaactaagaaacatacttagaaccacagtggattgttgctaatttaacattttatagtatcatgtatgtctgactaatagtaatatctatgaaaaatgctcatggtgtattggatatctcaagctgtgagaacattttctattggttagtattaaatatttcaattcctgaaatagttgtgtttttttttctatttattagaataccagagatgctagtacagtttcttgaggagattagtggttgatcttgggtcatcttaaaatttgtcagccttgagtacctccagggtcttaggggaatgatatgatcttgtagctgactagataggttttgagaaacctgacctctgttttggtcatctttgctcttattgtggatgtaatttgatctcttcagaatgtctaataatatttctttcctttttaggtttttcaggcagaaaatccttttgattttatggaaaacatttctttagaaggaaaaacaaatttctttgagaaacgagtttcagagtatcagcgttttgcagttatggcagaaaccacagataacgtcttcaccttggatgcagatttttaaaaaacctctygttttaaaactctataaacttgtcattggtaaatagtagtctattttcctctgcttaaaaaaaattttaagtatatcctttaaaggactgggggtttgctcaaaaggaaatccaaaacctattctaaacaatttgcatttatataattttcctgtttaacaacaagagtgtgacctaaatgcttttgtcttgtcactgaaataaaagatggcattatgtggttaagagcatggggcgaggggtcagacatgagtctaaggttctgcccttactccagtgtgtgacccttggcaagtcagttaatcttggtaaacctcggtgtacttatctttaaaatgggagtaatagtaggtcctaaattcatagagtggatattaggattaggatgcaaaaataaatgcttaaccaacactactactgttagcaccactactaattatcattcattgataatattaattgcaatgatgttgtaataaaatactctcatttccttaaaataattgtgattctaggtcctaggatctagaattagatctttgtatttttaatgcttaggggaagaatataagtatctccttaaaaagaacataattctcattcacgcaagaataagttctttgaattccttagtatgtagtgaagaaaatttagttgttagttgctttgggaagcctacttatggagtggaaaccaggaggttatcatggtagttgaccttataagaaaaatgattcttcttcagaaattaaaaacataactattgccagatttagctctggaatgtttagaatcaggctagaatagcattttccaaagaatattctaagagctattagctcctctagatatttttttgggggaaaaaggggattctgtggtcagatgagtttgggaaatgctgaacacttcattcttctttagcaagtacagtcagtacatcaaagactgagcagttcagtggtacataaatttatctcgccctgcrtattcccaacatacttaacacagatgttttttacctgttaacatctcacccagctagtgttcctcagaacaaagattggaaaaagctggccgagaaccatttatacatagaggaagggcttatggactgagaaagggagaacatggtagggattattgaatcatttcaaatttataccagcctgaatagtgtaccagcaattgacttaggctgtgtttctttatggttttaaaactcttgagctgttataagagatagttcttttaatgtgactatgcaacatgatagccaatggtgagggaaaaggaggtttctctagaagagtctgatgaaaggccgggaaccaaggtttttgagaagtctgcccctatttatttttagtaagtatcaagaggtagcctgagcctagttagagttagacctgtctttggatgaagaagtcttaatactgaaatactgaatttttaatacattattatttggtattctgtataccccttcaagcagttgtttcccattcccaacaaactgtactttatacaattctggatgctaaaacttagagattttctctttgcataaattttggctccattctttccataacaatctaatcaaaactgggagttctcaagtgaatgcaaaaggagcaggccataactttatttgttagatacactgtcagaaacttgagatcttttggcctatgataataccattaatttttgcattgcttcagtttgccaagtgtttttacatcatctcatttgatctcaaaacagcttgacagagcaactgttattgaaatattacagatggaaagaatgaggctcagggaagttaaatgacttggccaagatctgctcatcgtcactgtctgtacagtatttttttttagaggttgtaatgtctcagatttagtcctttaccatctatgttgatttgcttttgtctatttcctcattaattgaatatactttaaatatatatattaaagtatcaaaatatagagagacatttgaactgtattcaggtaatatgtttaaagatatttatatattgccatacaaaaacttaacatttaaaactgataatatctgtaatgacatcagaatgaaagaaaaaaaattgtacagtgtatattcctttgttttgaatccaaatctttttcataggtaatgacagatgccttaatgtgaagcttatttataatagcaataaacctaactggatttggatgaagaagtcttaatactgacatactggatttttaatgcactggtttgttatttggtattctatctctttttccaggcctccaggttgcacatttatttattatgttcaatactttggttcttagttcttaaagaatcaagaagttgtgtaatcttttaaaaatattatcttgcagataaagaaaaaaattaagagtgtgtttacaactgttttctcttttttacagtacatgtatttaaatcattgctataataaagttaagttcattaggaatataaaaacttgcagttctatgatagattgcatttattaaaaatgtttcattgtatcacatagaaatatggccaggaaggacttgagaagacagtttgatccattgcttttagacaggactgggttttgctgtccaattatatacaataatagttyttcttacaactaagctggccccagccttgtcttgatattaatacatgaaatttttataattgtctcattgtctcatttagaaacatccatatttttctgctttttctattgccattttttatttgtgcatgaattgattattgagaaaatgtagcagtttgcatatttaaaaattaatcattttgcattttacatttaaatatgctaacatcactgtcatagaattcccaaatttcatttgtagatactgaactaagggctaatgtcaggagctgatttttaatgataaagctgcagatgggctaaataaaagccaaattaatcctacaatcaggtattatgtttttaaaccaagttgagtgaattggtagtggacttgggaaatcttccccagcagaatctggatgaatggcacagaattgaaatctctttgtttcccaccatttccctttaagtgctctgctcctttgtaaaaagttaaagatttgaaagagaatctcatattcccgaggcattaggaagaaaggatttaatcccttcaatttggggcttaatcttgtttaaaaaaatgtaagtgaagatggaaggctggagagaatgattgctttttgtacagttaaataaggtcacaatattcttacatactttgttttacaactgtgttttcattttttcaaatgtctggccatttagcaaagttatttactatttactgtgtacatagaaagctttattatgtgtggtgtatctaaattttttttgctgaaatacattatggtcaatcaagccaagcctgcatgtacagaatttgtttttttttcaaataaattagttgttttcttatttttttggcttagtatgttgaaataaactatggtatcttcatcattttgtacatttcctttttgaggaaggtttctttataagtgcaagggctaccctaataaaggaatgtatatacttactatttgtgtctgcagataaatacatacttgtttgttcaactatcgccccaaccatagtttttacattaaatgagactcccagttctctcacctatctttctcccaatccataagcctctcttcatgtctttgtttccagctgagattccacaaacatcatattactagcagtagcactcataccagtaccctcaactctgtcccttatctgctttttaccatacatagaaaaatttagaaaaatccccaagtctgttttgaatgaaacaacttagtttttccagtatttgcaccccagcagccaaatgctgctagagaagaagtcatacaacaaggcaattggattctctacgtattcatgattaccctatctcagcactatctggtaatcctactacaatttcctggtaaacttgacctccactgtgcacaattgctttttcacacctcctctctctacctctacccccgtttcccaaagaggtgaccatatattttactctgtggactttgcacacatagagatattctcagagttagtagaaaaatttgacgatataagagccccaaatctagaacctaagaagttaacagtagatatgaattcctatgtgtgatttctgctgtggagtcattacaatcggagtgattgaaaatatctgggactaacagccatttaattctggggactgctgctctcattcccaaccatgcggttctcccagggctgccaatacgctagtatgcactgaatgtgtctgggcgcaggcttaagcatgtgatccagactgggccaggtccttacctagggttttcctaattgaaactgaagaaagagaagcacttttattctaaagacaagctagagagagtcctagttctaaactcctctgaggtccaactgtattctttgcatagtttcattttcaaggtaacaaatgccactttcggcttaaggtaggtcaaattaggtttcttgattttcaaccaaagggattctagttaaaacagaaattgatccctggaagaaaaaaaaagtacatggaaataatcggtatttatgtgagtatcgggctcagcaagaaacagttggcaattcaagttagggtaattcaaaagaagtttggcaacaggacaatttagaaagttatggacaggaaaccataggaaatagtgtagtacatggggctaccaattaattacagggctgttaccacccctgcttaactcctcccttaagcttgagggagcagttaaaccagagggagagaattatgaataagatgtgatcttcatttagagcgagacagcaagcctaaggcaacttcgctgagaaggagccagaaaataaatactctcaccttgttcctcttgcctcctatctccttcagtggctccccattagccaaaaccaactaggagcaagagggcaagggagcttgatgccgtccttacagatcagcctccaggcgtagggtggaaaatggatctggacgacatatagaagatgtgtcacaaagagtgttggaaattattggtactttcctcaaagaattacaagaaagagatgagctcaggaaagaattagtgagtttgtaagaaaaaccaaaaggaaatcagactcaaaaaattaagtaccttgcaggctgaaaaagcaggctgattgtaaacccccaaaataagagttgggattgagaaaaattcttttttttttttgagacagagtctcactccgttgccaggctggagtgcagtggcgcgatctcggctcactgcaacctccacctcccggattcaagcaattctcctgcctcagcctcccgagtagctgggactacaggcgttcgccaccatgcccagtgaatttttgtatttttagtacagatggggtttcaccatgttggtcaggatggtctctatctcttgacctcatgatccgcccaactcggcctcctaaagtgctgggataacaggcgtgagccaccgtgcccaactgagaaaaaatcttgagataagaattcatcaagacaatcttggcaaaggtaagaagaggggtgtgagaaggtaatgtaagcctcctgagaaggtgggatgatggaaagcacaggtggagggcttgacctcagacacttcctctattgtagcaggagggaagctagggaaggtggatggatggtgatggggtatgtctgtagtttagtgaagagacattgtaagcttgttgtttgttgacttaatttctctgtgaaagagatgataaggtcacctccttgggaagtgggggtaggggcagcgaggggaggtgtgaagaagcaattgtggaggatggagagcctagtagattcagtttgccttagtgtatggtttttctctagcagcatttgctgctagggtacaaatatgtaaaaactggattgttgcattcacaatgggttttttcctggatttttctatgtatggtaaaatgtatgtatgtatggtaaaatgcaggtgaggaacagagttaaggctattgataggaatgctactactagtaatatgatggactccggaatcttagctggatagagagacgtgaagagaagaggttcatggattgggagaaagtagatgagtgagagaacttgggggtcttgattaagtctaagaactgtggtggggggagtaggtgaacaagtgctctggaaggggaggagattgtggtcagagtgaggtgctagaattggtgattcagaacatagtaagtgtgggagaaggaggctggggtttgttgctggggaagtgggtgggctcattggtgatgagaacctcagggagctgagagtccagggttttgcatcttgggtggatcctgagagccaagtgtttaagtcttcagtgaaagagaggtactgtcaggacaagatgaggagtaggagagggaggtatagctgagttgtgagtcttaaaagagcagggttgtaacaaaataatgtggtgtccatggtctggaggtgtcagtggggatcaaagaggaccccagctcaactttccccacatacctgagaggtccatggggtgtgagaaaataaaagctt

SEQ ID NO: 93211 - DNA, 97794 bp, Homo sapiens
atttcaggtctgatgtttttccacatcattttcaacgtcatttcaatacctgagaatgtctcttcattttcccaagccctacttgtcgttctaggctcagctctaatcccttttcctctggtccttactggaggccagagggtacctcttggaactctttacatcttgggtccagtgtggtagctcatgcctgtaatcccagtgactccactggggaggccaaagcaagaggattgcttgatcccaggagtttgaggttacagcgagctatgattgagccacttcactctagcctgggtgacagagcaagaccctgtctctaaaaagaaaagaaaaaaaagaaacaactttttacatctgtcatagcacttagcactgtacttagcctacacagactaattaataaatatttgttgattaatttatttgaggcacagccatgagttcaatcagtggcaaagacagaacttgtcctgtaggcttagcaagtcgagattggtatctttgctgccaattgcttctggggtttacaattattgaggtaaattttggattcaaattggatccttgactatagatttgccacaccatggaactgtggagaagttgatattttttaaaagtttcacaatagataattaagaacatgaaataaaaatatttattccctactattttattcctccaaatttcagtaaactggaagagtgttcaattcaggaaaaggtttcagagactaatgaaccaaactgctcaaattataatcctacatattctaatatagtctattcttgtgtgatcaatgtatagaaagttgaagaaggctagtttgtttaaaaaataggtcctacagaggagatgctacattataaactgagaagagtactttcatactaatcactatccttttgtggacatcaaatcaacctttttgcccttgcctgagacaacattagactcttaccaagtcttgataaattttgaaaatcacatggttgttcaatgcctccatgtggtagaaaaaaataatttagctctgtcctaccttcctgtgttagcaacattcaggccaataaagtacgatagtgcttagggcccttcaatgggatcagtgctattttattttttttaaaaggcctatggaaaaatgacccaaattgaaggtaaatgccccagatcacattcgtctttatggaatcgacccttgtttttgaactttccttatctttcttacaaggaatggatttttcagccaaaggagaattataaaatgaaacaagtcgattgaaatccagtgagtccatttttcccagaaaggctttatataaattctttataagttgcaaacacaagatttttttttctttggatggaaaaaggaaatcttttctttttcttttttttttttatggagtctcactctgtcaccaaggctggagtgcaatggcatgatctcggctcactgcaacctctgtctcctgggttcaagagattctcctgcctcagcctcccgagtagctgggattacaggcactcatcaccacacccagctaatttttgtatttttagtagagacggggtttcaccatgttggccagggtggtctcaaactcctgacctcaggtgatccgcccacctcagcctcccaaagtgctgggattaccagtgtgagccaccacgcccagcaaaggaaatcctttctattcagcaataaggtaagttaaaaaactatattaaccaacgttaacttgcttgacaattctttggacatgaaattggccaaagagaatctttatgaaatacttgaatttcagtgtaagcaacaagtcaaaaagttaaaccaagtctccctctttcaactgtattatttcacctcctagggatcaactagcaccttgatcttcaagtgtttctacttaaatgtacttgatacactaaagatgacttgaaggagagttgggtcattctgaaaaccaggaataggtattaataaaaactggagcccactttctcaaagtccacaggatgtcacagtgtaatactacttgggcttctgtgactggctggttttctaaaatgtaaattgagcattactatcaaagcattcagtgcatatgtatgcatttgctttacacatgcatagactacaaccgaaaactgctttctccaaaggaaattaggggtgggggaaggggcagaaagatattttcgtggcatactctctggtttctttagaataatatagcatgaaaatgtattatctatttaaaatatatccatataggcaaaataaataaataatgaggactattctcaggatgagggtggggttggggaacttcaatagcagtcattagttcaagcaaccatgttacaaattcagtgattcccttagcttgcttccatgttcccactttcccagctgtcttgattgttaatatattctcgaaaatattatcagagactactatatttattttatttatttacttattttgagacagggtctcactcccaccacccaggttggagtacagtggcacaatcacagctcactgcagcctcaacctctggggctcaggtgattctcccacctcaacctcccaagtatctgggaccacaggcatgtgccaccaggcctggctaatttttgcattttttgtagagacagtcttgccatgttgcccaggctggtcttgaactcctgggctcaaggagtctgcctgccttggcctcccaaagtgctggaattacaggcgtgagccactgcacccggcccttttatatttaatacatttttctgcaatgtaattgaggctcttctcccactccaatattgccagaactgacaagatcatctgtggatagcatgggtcataacaacaattttgccaccaacttactgcatgaccttggataagacatactggcctttttttttttttttttttttttttttttgagacagagtcttgctctgtccccaggctgaagtgcagtggcgcgatctcggctcactgcaacctccaatcaagactcgctggttcaagagattctcttgcctcagcctcccgagtagctgggattccaggcacatgtcaccaagcctagataatttttgtatttttagtagagacggggtttcaccatcttggccaggatggtctcaatctcctgacctcgtgttccacctgctttggcctctcaaagtgctgggattacaggcatgagccaccacgcccggccaacataccggccaacataactttctttgctttgatttctttatctgtaacatgaagagtgtgaactagaagatatcttaggccccttctaggcataaaatactatgattccttgagtatatgtttctcctggaaggtttcttatattttcatcaattctaagttataaaaaccccatgtcctcttttctgccctggtgacgaaaaacaaaaacataaaagcaacaaataaccccaaacccatgaactaagaaaattccactagagtggaattattaataatttactttgcgtaacagctaataaatcaccttacttacagatacatatttgaccttgccagtcagtagagcacaggtatttctgccctttatggatgagggaactgaggctcagggaggtcaatttagctttttaggccttgtagttaataagaaggagagatagaaagttgtgtatgaattttttttcccctaagacagctgcatacaggtcttaaaaataattcgacataaagattagtcttttgagaggactggattcttttctaaacattttgaagtttttattccctgtcatcaggtcattccaaaacgataaagcactaacttaagctagctggaattagagattagggggaacagtacacaaaagagggcaagaaaccttccagacaggtggttgggaaatcacttttccttataggaggagctgttagatttcatgatttctttcacaaggaatcagtccaacccaagcatcagtaacacaacacaaaatatcatgttctgttacaaaagaattcttattatagctggtaggcaatttatgcaaaccaatattaaagaaaaaattcacctactgtcctgatcacttcagcaaatcaaaccttttattttcctgtgatctctgctagttcttgtctttataacacatgatttttttactggttgtattcataatgtagacatatatttttaagtatcagaaatccaaattttcataggaggaaatttcaattttaataactatttttagattattttcctcatcctgagtttatttcatcttcttattgttttcttctgaatttacatcttttcatcagaacaaaaagaatacaatcagtttttcagaagtttaaaaaattttttcaaatatatagcaaagaatgtcatcatttttatatactctaccaggactcctgaaaccaaacacttaagaaaggttatgtctggaaattttttcaaaatctatatgcatttcagtggtggagaaatagttctgtctggaagcaggaggctgaaattatgaccctgaagatttcttccagcttttgaacttcttattctatgacaactcctggtagatacaggtttcctggtagggattgagcaagaagcatgcacaattactttatgagtcttgataaagctggaatttcaggttgatggttagaaggagttcggctgggtcgtgagaatgcttgttttcctggttactggatatgccatgggctgtatatcttgtgttgtcctgtggtaactgaagccactgttgctgtggaaaatgatggcagtttgaatgagataatttagagtgacctatggaaatctgaggctgtctccttaatgtacaagaccttgtatgtgtggcactgttgtatttgaatggcacacatctctttagttcccttcaactgaaatgacaaaaggtgagaaactgaatcgtaatttgatggcttaatattaaaaaaaaattggcaaaaatgctaaataaggaacaattcagaagaattgctgatcatttcaaaaatattatttgcatagcatttataggtagctaaagaaagagaaaaatggcttaatattttaaaaataatttggtcaatttagcgatctggggattctgcgatccccagaactttgcatccaatttccaaaaaccaaaccttacatctaatgtaaaatgacacaaaaaattctaaatccagtctaattcagtagtatatagcttattcccagtgatgtctcacattcgcaagcccgttacacgttggttttacctgtcaccaaaacctttgtatcactcttataaaaaaccacatcactttctataaaaagtgagtggaagaatctaatattgtaaaactgcacgtgcctcgcgtgacctgagcagaaaattcctagtttgggattttctcacaggcatacctaaactgacctctgctcctagcaggtaaattgctagaaggagaagcaagtgtcagtccaaagaaaacccttgttgtgtgattttttttttctctttaatcgctttttaggtggagtacccgctgcattctctaaagtctttgccaccaccagattaccaacgttttcaccaatttgccacctccctactcctctcctttccaaaagccctcattggaaagaactttctctcgtgacccccctattccatctagttccaatcactcccagcgccccccatctccatcggcttcccctctcccgcccagaatccaggttcccaaaccacttaagagaaaattcacaaccctcgcccccttcccgggcgtccggaggaggcgctggggtgggggtgtctgtgggggacagggtttcctggggtctcctgggtcttcctcgcgcacccccaggaggtgttgcagggggaggggagcgcgggtgggtgggaccgggccgggtgggggaggggtgagggcgaggaggaggaggaggaggaggcggcggcggaggagtggtgtgtgtgcgagcgtgtgtggctgggggaagccattgcctgtttaatagttgctgttgctgcacttccgcttctctcccagcgagagagagacacgagtggccaggcccagccgcagccgcagcagcagccgccgcggcggcacggaggagccagacacaaagagaggtacggggatccccccagcggcccgccgccccccggccgcgccgccgggcctcggggacacccctcgccgcctcccccgactcgcgccgccggggccgccgggccgcagggcacggggccggcgcggggggggagcggagaggggctggggagccccaggggtccggggcccgcccgcgggggatgggcagggaccccgggccgcgtggggtgcgggggccgcccgcattgaggacgggggtcattgtggctcgaactgtcagcgctgccccaagagccccccactggccaccgaggggcccgggagcgggggtgggagggagttgggggagccccgttttccccaggggcgggggttcgcggggattaacccctccggggcggaagggctcattgttatgtcttcgctgcggaggccgacccccccattccccgccgcagcccctatccccctacaggagtggcgatcgggcgtgtgctccggacccccgcccggccgcatagctgtgagcagggcggccagaggcaggcaggccgggaggggcgtcggggcgcggcgcgggggggcctcgggcctcgtcgcccctgccccccgccggcctctcccttcccccacccgggcacccgctccccgcctccgtccccctgtttcggcttcctctcttactccttcccgcccctcctctcttcccgacctcgccaaactccgctcgtggccccacagtctcacccgggccaccggcccctcacgacccccggaaagcggacaaaaacagccccgaggccggccggccgccgggaccttccctccctgccccgccgtggcgccccgcgccccccgccctgccctccttcgcctcccgggctactccctccctgcccagcggagagccccggggggcgagggaggggcctctctcctagctccagaccgttttcccacagcgttccccacttggggccaaaaataaacaagccgcgtccgatttgcaaaagccttaatgggcctgcagactttgaaaagcgagtggagggcggtgggcggccgcgtgcgcccctggtcaatgccctcctgacagcacccgagttccttatttacactggctgcatggtttgtgtgtttctgttttgtttctctccccctgcaggggctgtttgcggggtggggtggggggttcgctatgtcggatgacgattcgagggccagcaccagctcctcctcatcttcgtcttccaaccagcaaaccgagaaagamacaaacacccccaagaagaaggagagtaaagtcagcatgagcaaaaactccaaactcctctccaccagcgccaagaggtactgtgctcttttttttttccacaggcttcctatttccgaactgcctcttgctgcatttggtctgcctcccaatgaggatagcttaaacgctcctcatggtttatgtgttcttaaaaatgaaagaagggccttggaagccctaattattttctctattgctgcttctgtttttaaatcattgctcacatgcagctgttgcggcttgcctctcgcatttcttgctgaagtttgtaagattcctcgttacttttattagtgacccccaaatctgatttcagatttcttgtcctactaatggttaatctgtgaccttccccaaggccatgatcccatttcttaattactaataccagcccagagaactgcatcaaaatgaattctgtgaccattttaccttctcctcacctgttgcatggatgatcttttctaaatagagctttcttcacaaattgcataaggaataagaaactcatattagcaggtacaaaatttagtaggtgaagacagatgttttctggtggaatttaaagagatttttctgagagttgaggcaaatgaatgaatcagtaagtgactataaaatggttattctaggttatttttgtggttctctttaaaaacttcagtttaccaatttcagggagacttgtctttttttcatgctatttgctgtcctcatgctgtgaaaatgttactttgccttattttttcaatttaagtggtctcccttttactttattcttttcctcttaaggccctgaaggtagctactttttatccctgccatcctaagcggtcaccctttttctttattcttttcctcttaagcctctggaggtagctactttttacccctgccatccttcagtaatatcctctgatcgccatgaccctcaaaatcatctttagtggattcctaggagctctgagacaccctttcataaatccttctgctctcagagttaggcagttgttaaaaaggtggcaaaccaggaagatagtaagaactccaaatgatgggatagggatacccttcttaaaaatttttaaaataaagtagaacatgagactttagatctctccactgagtagtgagcctggaagtcagggtttgagagtttgttctgtcattctccctgacttgtaatttgaaaacttggcagtgttttggtgacctaaccatgggctgatgaaggagtgacttttaaaaaatagtgtggaggtcttaagtggcaaggtgcctctgcaagattgttctcatttttataggtttggtttgattgtacagcttctcaggaggcctgactgaccctcactgattagccctgtgcggttttcctggaacctgacatctactctgcccacttgggacgggcccttccttaatactgcgccccacctcaatcctctaggctctctgatcctcattcacgttttggcctcacgtgctcaagccaggatacttgcttttggtaatttgcatttttatattttgctagatatccctggtgtacatgaatatatttgggggtaaagacacaggtatcaaatagaaaatactctgcttttgttgtgagtgaattacagagagggggatttttttcactagacatactttgtttattttaaacaagttaagaatttatttggaagttctggaaaagagatgataggtgtagaaaaatgaaaggtgggaagctacaaatagtaattttacctataaattaacatcagggcttttgttttgtttttgcaatgaatttagctccttgataatcttgctgaaagagtagctattagtgttaaagcagacctaaagttaatagaaaaaggtaaaaaaatggagagggacagtgtatccaggaaagagaatggggaaaattgatgttagtgggaccctatagaggctgttctgtgaagtatattgatttggaaggtaggtgttgcccatagaattggaaggggcacattcaccaggagtaggagtgaaaaagaagcctgaattggcagactaacaggctgctaactgcatgttggaaagtggtttctaaaccgtgggtagaggaaagcccccattgcaagtggtctgaacaagaatgactctctggaaataggtatgagttactcctgcaaatctcttgccagttttttggaaatgcaaatgctgtctgtcaagatgaagttgataaagctttttggtattaacgcttcttaggtattaaagaaacaactacctttttttgtgactattttatagtgggagttgggttggcaaggaggactgaagtcaatatgtatttttatatgcgttgtgctccggggaggaaatttttgcctacgtgtgtaggtcttaaaatacagttatttgaaaagattcaggtaaagaatcaggaaaccaattttccaaactttgagtctaatgtacagtcatgagtcaaacagcgggagtatgaatgtctcagaaatgaaacgctttttgatagtagaatttagcaggacacaaatacgtgtcaattgagattgtgaacaaacccctttctaaagttgacagatacgtagggacaggaaatgtcctccagtaggaaggtttatagaacctcccccagtcgtcgtccttaaaacctgttcctcattacatatagctcgtccgtcctcctacccgcagaaaacctttggaaaggaaaacgtatcctttgtgaattagattgctctgtgtgtgtgtttaaaatttttttaactacagtgctgcctcggtgagatttttaagttgtaacatagccccattgggctttatatgataggaggaggaaaggttataaaattaggcaccgtttagaaggtggaagaagcttagaggccctaaactgtcgtattaattgatgctctaagtgcctaggtaagcaaaagacaaaggccagggcttggtgtgaactgcctggtggcttcggcctatgagtgggggatggggccctttgtgaagtcgagggttggtgcggagggagaaaactgcaggtctccagtctatccccagtgtgagctagagagcggaccatgaaggaagtgggcagaccccgggaagttagaggacgcccggggaaaagcaggtccggggaggtgggccgagagtcccggccagcgtgcggggcggaggcagggtccggtgcacctgtgcggccgcgggccggccacttggggtctgtggtgcccgagtggcgggcgggggtgttcgcgccctgctttcgcgcgcggtctcgggccaggttctgggcgccgggagaggagagctggggcggcgcggagcagcccccgtgcgggcaccctgttcccctcccccgcccgcaacttcaccggcgcggcgcgagccgtcgggggcgcgcgcggggtgggggcggcgtggccgggcggtggcagcccaccgctggggagcgacctgcggtctgggcctcccgggcaccccgccacggctggcaggtcactcgggcccgaggggcctcgtggggagcggccatgttggcttcgtcactgaggactccgggcgggtcgggtgttgagcgaggcctcggaccttcggcctgtcgggggcgccctgccggggtgggcatgggggcatctgaggggtgaaaggggcaagggaggctggaggctggcgtccttcccacgcaccgatggctgtgatctctccgtgctggggagaggtgcaggggagggactgaggaaaccggtcggcaagtgagaaactttaaaattaggtcctacatggaaaacaccgaggaatagaactgccctggtgtgcgaggcaaggttggaagccaaactttgcagatgagaacaggagattccaggctgcctcacttcctccgtgaaaagtttttttcctaaactagggacctgaagttcttgatgtgtagttcctctttgcccagtagaatccagtgatcgcgcttaggtttatctgcagacctgcacgctacaggtgggaggcttccgcgccttaatgcttcttgtgtttgtctttcccatttctcccactccagaattcagaaggagctggcggacatcactttagaccctccacctaattgcaggtgagttgcttttcggattttttccatttttaaaattcttctaacctttgtcttgggtttttctttttattatatactttttctttgattctttggctaatgcttgttatggcactarcatcacgtaacagctgaaatttattaacctgagtataatgttttgatgagcctctgacaagctcastactgttgagaagaagtaatggatttatttggagtggatttttacatatatgaaacaaaactaaagtaaatttaaaggtgtctccttgcctaatcatgggtctttgayatgccattaaagatgatgtaaaacctttcagatgcgaaggacattttggtttggaaaactgctttgctacagtaatctcttattcaatctctgctaagctaagagaacattagagttaaacactggatcttcaaacttactccatagcatatagattttttattagacttttggcagagcaattcaggaaacaatttctggctttgataaaggttttcttttaaattgtagagttaaactttcatggggtgtttttttcacttgctttattcagactgtatacatatgtgtgtttcagtttcaaaacaaattgaaaccagctttctaagggtttgttgatcacagctttatttagagaagccattttgctactgttgagtcaaggtggaagacttgatgactttactagatcaacaatgaagtgagggtaacttacaactatgtattagaatagaaccatttatttaagggaggtcctgtaactcccatactttaaaaattaagtataacatttaacctagttctcaagatcggcgttggaaagggatgtgagatttcagaaatactctaaacttattggtaggagtagaagttactgacaaagtattcagcggctatacacaatttttaagatgagtgtgtgggaataggttgaaaagctaaatgaagtattttgtttagtaacagtgaactttggaaactaattagtggattaaatacaaaactattgccgttttggttacattcattcttaatgttgattaggtgtgggatgctcttccgtgaaactttgtcctgttttgtaaggaaagtcattttgagtttgaaatgctcttaaactatagtttataattggaacacttaatcattctggggaattctttcctggctaataatctctcaagatggttgagaagtggaaaaaccataagacttaggcctaactcattattttgatggtggtggttcacgtggaagcctgtagcttcccttggttgtttgtgtggaatccatgtacattccccaaggtggttctgtgctgtctagttattgctcctgcttggtattgtgtgtctcctatgtgtgtgttattaataacattgattaaaacatataatggctttcttgtgaataagcacagtcaaatctaaaattgtaaaccatttgaagattttcatgggattaagcatttaaaaaaaaaaaacagtgtaagtacacttcagtttcacatcgttttaactgagtttatgtgtgaaagatttatgctcctgaggcatgtggaacttttttatctttgggaaaccctcccaattaccccttcaaggtgaaacgtttgggaattacctgtgrtcaggggatgcaccaaactgggtggctgttgggtgattggtgttacggagtcaaagctcaaaatactaaattttaagaaaaatctctgatttgagagaaaatacgaggcatcttcattttgcaagagaatgtatattacattgtcttttaacaataaagatgactttattttctgaagatattttccagtggggccgtttgagtaatgtgaattaaaatttttacttttggttggctaatggtgctgtcttaatgttatatagtagtcccaatattcagctctcttaaaagagttcggttttacgttttgtgctgttaccttttggaatttaattatttagtattttaatgtactttattggagataaagatggattatttatttatttatttatttattttctttttgagacggagtcttgctctgtagcccaggctggagtgcagtggcatgatttcggctcattgcaacctccacctcccgggtcctggttcaagcaattctcctgcctcctgagtagctgggattataggcacgtgccaccatgcccagctaatttttgtattttgggtagagatggggtttcaccatgttggccaggcaggtcttgaactcctgaccttgtgatctgcccgccttggcctcccaaagtgctggggttacgggcgtgagccactgcacctggccttggggatactttttgaagtcagcgtccaatgaaaatctatgaattaagtgatatattaagtgcgtacatgtttaaaattaccctcagcatgaaagcatgagatttgaatgagttaaataattggttttcaattagtctgtcttatatttttaccctttgccatacttcctttcttcagtcagcattcagtgtgtagttttaaacacgttattaaaatatggcacttggcacatagtaacttctcagtaaatacaaaaattagccgggcatggtgatgcactccagcctgggcgacagagtgagaccctgtctcaaaaaaaaaagttgattattgcaaatcagtagaattgctcctcttgaaggaaggtgcactgtttgtgttcactaattttggcacttggcaaaaatatttgaagttactgagcatcaaaacttatgtgaaatgcaattgctcaatatgttataatgtatgaaaacataaaattaaattcttaatgttgtatattatgttgggtggatattttttagaacacagtacagattgtgttcaatgacctggtccaaagtcattttaagtaagtattttcaaactgctttatgttgccatagaaatcaaattcttaattttagtatctgtgatttgtgtgtgtgtgtatatatatgcatacacacacacacaaaatagtttcccaactcactcttcattttggttaggcttttattcccatatcatttagctctattcttttagggaaaaaaatatgttaactttgtaatgattccctaaagcgtgccagatcttagattgtaaaattatgccttttagatagctgatgaactctgggccaccagagtcagttttgcagctgttatttatagcccagggctcaaactttgctaaattgactagttataactagcctgtagacacgaatatctgtagacagtatgtctatacagactaaatggcatattttgcctaagtcctttaaacttcagattttatttaatggatatatttgtttcatgagtaaatgtctcagtgacttaacctagaaattcagatggggtgctattttaggataaaatgtctgaaaagtcattaaacacttcaagcatgggtgagaataataaaaatacatttctttctttctcactttttttttgagacagggtctcattttgtcacccaggctggagtgcagtggtgctcactgcagccttgacctcctgggcttaagctgtcctcctgcttcaggcccccaagtagcaggaactacaggcgttcgacactacactcggttaattttttgtatttttttgtagagaccaggttttacctattggccaggctgatcttaaactcctggcctcaagccgtccacccactttgcccttccagagtgctgggattacaggcgtgagccatggtgcctggccctgatactagtttttctgtatgtgacagaatttccatttagccttcttttgatagcttttttttccctaacactgcctatattttaaatagttttaagccattatattatacaagaatgcatgtttttgaaaaattcaaatacagaagtttgtggagtaaaaggcaaaagatagtcctgatgacctcttctgatcctgctccttgcacacagatgctccaagttagcactttgtatacttccacgtagtttctgtgaatttacattgtgtttttctggcattccaatacctcctcgaattggtggtaatggtaatgagatgtcagttcagaagtcccaggctgctcatcatggttcacaatggaaagagatccttttcttgcaacagtggagtgttacatacctcgtccaggttcagcatgttttaaatggttgtttgggtataagaaataggttcagcagaagtcatcctttataaaaccctgtatcttatgtgctaaaaagtattcttccttttagcatctttcatttatctgatgttactaaatgcrttaaggatagaagtgtgacttaaacatctgaatgatgtttagtttcaccattgcagtgtgtatacctttatgcatgtaaaggcagtgttgaaaaattgtgacaaccaggagactggggtttcagcacgatcaaaacagcacccatactagggtcaggctgttgggaattagatcatcactggggcctttcctattagagaggaaagaaaccctatctggagatgaattgcctttcaaatgagcaggaagtcttgtggcggttgtgtttaccaaaagactatatctggattgtaaaactgtactattgttattcctcagaaagctaaacagaattaccgtatgacccagtaattttactgctatctatgtaccctgaataattaaaaacagaggctcaaacagataacctgtatgtcagtattcatagcattattcatagtagccaaaaagtggaaaaaacccaagtgtctgtcaacagatgagtggataaacaaaatttggttaatctataaactggaatattcatctataaaaaggaatgaagttgtgatgcatggatacaacatggttgaaccttaatgttatactaagtgggctgggcgcagtggcttacgcttgtaatcccagcactttrggaggctgaggcaggcggatcacgaggtcaggagatcgacaccatcgtggcgaacacagtgaaaccccrtctctactaaaaatacaaaaaaattagccgggcatggtggcgggcacctgtagtcccagctactcaggaggctgaggcaggagaatggtgtgaacccaggaggcggagcttgctgtgagcagagatygcaccactgcactccagcctgggcaacaaagcgaggctccatctcaaaaaaaaaggttatactaagtgaaataaactagaaccaaaaagacaaatagcgtatgattccacttacatgaaatacctagaataggcaaactcataaggacagacagtagattagaggttttcagggactgaggggaggggagaatggggagttatttcttaatgaatacagtttctttttgaggtggtgaaagttttggaaataatggtgatggttgcgcaatattgtgaatgtaattaatgccactaaattgtacacttaaaatggttaaaatggcaaatttcatgttatatatattttatcacaataaacagttataccactgttaaaatattaatcagtattttgagaaaaatgcttatagcttagaaggcaatactcacagtttttggggattcttgttaaattcctgtcacaaactttgagggcctgttataaatgaaaaggcacaagctgggcatggtggctcacgcctgtaatcccagcactttgggaggccaaggcgggtagatcacctgaggtcagcagtttgasaccagactggccaactaaaaatacaaaaattagccgggcgtggtgacgcgcgcccgtaatcccagctacttgggaggctgaggcaggagaattgcttgaaccctggaggcagaggttgcagtgagccaagattacgccactgcactccagcctggttgacagagtgagactctgtctcaaaaaaaaaaaaaaaaagaaagaaaagaaaaggcactgccttcaaggagttcataatctagtcaagatgttaagacatgcacacacatattttgaatggtacttggaaatataaatattatttggaaaataataaaatgcagatatcaygttataaagtttcagaggagtgagagattactttgacttgggtttgagggattgtggctggagtacttagtgatctgggaaggcttcatggaagaggtgagaagtggggtggggaagaataagggatattcgtgatggaacagtgtaagccaagacagcagagggaagacagaaaaagggcactattgggcagaagtgagtaaaagctgtgtctagagaggaagaaacattagtgggagaataaatagtaatagataaagcttgtgttcttcagtgtcaggctaagtctttaaattttattatgtagrtgctggagaatcattaaaaaccttttgagtaggggctgtcattcagatagagttggctatctggatagagacagagtaaggattgagtggagcttggtaggaaccaggagacttggagattgctacagtagttaaggtggaaggtcaagagggtctggggtgtaagtggtggccttcaaagtggagaggaaagagaggtagaagacagtagaatccatagaacttagccactgatttcgatatggaggacttgaaaaggagtcgggttcttctgggtgttggggaagttggtggtgcattaacagaaataaataaggcaggaggatgaactggcttgagggaaaaaggttttgttacttgcttcgttgatcacatgcaatgcttagcatgttgctgccacttagtaggtcctcagtaaatatttgcagtttgactatatatttgagtttattattaaatcagtcattgaactcccagatctacatggcctacttttagattagattagacaaattaaatagattataaacttcctaaaagggaaggacaatgatttctgtctttgattctgaccctacatgttcttcccaactgctttagtttgacgattttcacagctacaggagaagttaaaagaatgatacagcaagcgcccacccttcaccgtgattcctcagcaaaattacaccatgtttgctctgtctctctcttatctctatatgataattttgtggagtcatttgaaagtgagcattttgatgcttccgtgtgtttagctttgcacacattgaatctgaggtggcctgacggtggagctgaggctggaactggttttggtagtccacattagatttgaaagtttgggtgatgttaaagtgcacaagattgctgagattggaggaggaaagaattgtgctctgaaggatgtcttcagatggaggatgggaaatgaagaggacttggagaaaggagtaggaggaaagccacaaggttgcaaaagtccctagagggagatcaaggaaattttctcttggggctctaaagtrtaagaacttaggtgtatgttttgtaggctgagaggaagaagcaaatatagagagaaaaagagtaaaaattgctagagagtccgggcacggtggcttacgcctgtagtcccagcactttgggaggaagaggcaggcggatcatgaggtcaggagattgagaccatcctggctaacatggtgaaaccccatctctattaaaaatccaaaaaattagccaggcgtggtggcacgcgcctgtagtcccagctactcaggaggctgaggcaggagaatcgcttgaacccgggagacaggggttgcagtgaaccaagattgcgccactgcactccagcctgggtgacagagcgagacgccatctcaaaataaataaataaataaataaataaattgctagagaggcagatgtaatgttttataacataattgtagagaaactgatggccctagagaacttaggccctaagtgggagaatgtatgtttagaaaggctggtagcctggaattttctagacgattagaagcatttttggtgcttgagtagcactctaggtatttgtatagaactgaaaagaagcagcatctttctggtgttatttggtttgtgttctttcccagcagactttaagttcctcgagagtagggattattatgtctttatatccctacagtgtccgagaaagggtaggtaaacaatacatatttgttaaaacacaaaaacctaatttggtcggatggtttaatagaacatcttcattaccctcttcagaaaatagtggaaattgctggggaaattgctgtcacattttacagctgtccattgctggcagtctttctgagttggcacccaagcagttttagcaattttgaccttcctgcaatcacagagaagctctggacgtcagtgtggcaaaaaagatgtgatctctgctgcaggctcgattgagaaaagatgtattggagaaaatataacacctttgaattgcttgttttgacttcatgtaaggtttatcatctatgtaatgtggcatagactcttagtctacagagttacaaatggtaaccttattataaagttaccttatgttaacaagtgagcaagggtctaggggtgctaaatacagtgggttcctagagatggtcccccaagtcctaaagctattccagatagttggttatgttagagttgctggcacccgcctgagacatctgacacatcccatgtcaccagtgaagtgaaactgggtttcataataagcccattcttattcagcctcttttatgcagccatgctctaaagtgaaacaaaagacctagtaactggtgtcagaatatgyttctaatcctctgggaaacctcctcctttataggctaaaagctcatcaaagtccctgcttgagaaccgtaatccaggaactttgctgtatgctaatggctcttttcttgaaacatatacacagtgattatggattgctttgtagagtccatgccacattacatagatgatcaacctttggaaggccaagttgatgtcccatcccactcaggaaatcttacaaagccaaaggttttcacatacagaacatatttaagttgtcactgggttttgctacagtgacagcaaaccaytggggcagtgtrttgttcactaatacttttaacagagtagttaaaaactgaattctgtctgctctccaaagtacatgctgacccaaatatgacaaagtgaatgcaaagccctcttatatagcattcaaaggcagatttgccacaggtgccacatctgacttgtctgtagtgatctgagtcattattaaattttaaatagtaatacaacggagtagtcttagtagagtctactagcattgaaatgatgatcattatccatactgccagtacattggccatttgtatttattaaaattgatcgatggaaaattggtgtgggatggacctctagtaaattctacagaaaaaggcattgaggcacatttccaaacagatgagagtaaatagagtaacttgggatgatcttacttggagaaaagttytagatgtgatgcagctcaaaaagtcagcattattatgaagcaatgttgtacatgtgacagcagcatgagtagatcagatcgtaatcatttaaaacattagagtgtctgctgtgtgctaggcattgttctgtaggtgactaaaacagacctggcctctggcttgtgaaacctgaattttagtagacagtgcaaacagcagctaagcaaaaggattagtacaagttgtaatggctagtaggaaagaaattgacagagtgcagtgatggagaataattggggagggtgtgagggttacctagagaagccttacaaagacatttggtcaaagacctaaaagataggaaaggaaatggccttgtgaaaagtaccagaagacatctgggacagagggaaggtaaaaacaggccctgaggcggggacaagtcaggtgatgctgattatgtaaaccgtrctaagtagagagtttggatttttctcaataatgctttaaaagtcttttcccaccctccctgctgcatggaaaatagctgggaggaagatgctagtggaagaagggagaccagaaaggagggtattgctctgtttcaagctagctggtgcaggtggctaggattaaggtagtggcagtggagatatggtagaacactgggacctgttgttggattgcatgtgagagatgagggacaggaacaaaaatgactccaagtttctgtgtttttttgcaattggctagatgatagtgatgttttactgataggtagactcctaggcctagaatagggccgtagggcgcgtgtgtggtgggtggcaggggagatgagggcagggtggaaatgactcctttttggacttgatagatttgaaatctgttcccatgaggcatccaaatgaaggtgtcaaaaataagttagacataggtaattggagctctgagatacatacacatttgtaaaggagaccttaccaaacagaggctcttgggtgtcttgggaatgcctttctctctcctagaaaggaaaggcatcatgagaagagtgcccaggatgaagactcaggcatctggcatttagaagtgtacactaggaaaagccagcaaaggagacagaaggaaaatcaagagagtgtggtattagaaagcagtgagtggaaagttttgaggtagagtgatcaagtgggaaatggtgctgtgcagtagaaaaagatgaagaccagcaagtamccactagattttacctcaggtttgttggtgaccttcacgtgtcaaacctggtttagaggagagacaatggaaaaggaggaatgattttcaagaatgaaaatgtgtttgtattactcttcctagttaaaatatttcattgtatttatccagaaaagtgatctggtgttatctactttctacactttagggcagaatttcttaacacagtatatataattttgtggggaggatggggaaagggcccaccattttcagtggattctcaaaggagttttttttttctgatctcccctctttcctcaccaaaaaaagttaacttctactttacgagattcaagtcctttgtgatctttaggttaacgttgtaccatgcatgttacaagtaaatagtgtcaggttcatgtattacatcttgatgaatctctttttcaagacttggtttgaaattactggataaattggaaaatcagtaaattgctgctgccatccttaaaaatattttacatgctttgatttgcatcgaccttttgtattctgttcaagctggagaatgcactagaatgagttggatatatgtatttacttttaacacagcataagttactcatcatatttaatgtttttcatcccctcccccatccccccacccccaacccccgccaccgcccttccagagacggagccttgctctgtcgcccaggctggagtgcagtggtgccttcttggctcactgttacctgtgcctcccgggttctagcgattctcctgtctcagtctcctgagtagctggggttacaggcatgtgccaccacgcccagctaatttttgtatttttagtggagatggggtttcaccatgttggccaggctagtcgaaaactcctgaccttgtgatccacctgccttggcctcccaaagtgctgggattacaggcatgagcctctgcgcccatcctgtttttcatccttttaatatgggctgttatgttaatgctttacattggatatacttagaactcttaaagcaatcatataagcattgtctttttaattgtccactgatcatgtcttaataatttgtttcagattatgccagatactcttggtcctgcttaccttgataattgagggtagaattaagaaagttttaggattaggaatcattcttctaattcagagagtaattagttggaatcacaaaagcattaggtgctgaactgccagagacaagcaacaaataatatgtggaaccacaactgttttggctacgtargaattttgctccacaagtaatttaaattgttcctactaccacttacaacctttcctcctctatgggggtacatctcaatttttaagttaatatattagaattggtgttataaaaatttatttcttagcagactttgctacaacacatttatcctaaataaaaggagattgttgactttgcagagaaaaagaccctaaaagaaaacatttgttttattacaagcacccaggaggattttttataaacatgaamgataactttcctctaacctaagtaaatatttcagaaccaacgtatgttaagtgattatagtaatgtgtgtgcagagactggcagtaaagttagcagcgtcatatactacttgctagtatatcacactgctttggcctttttctgagtaaccctctctctggaagtcttcagaatgcctaacttcatccttcagggagactggtagcccccgaaaagacatttattttttgtagcttggtattctgagatgttctcacatccaaagtaaacactgtcaagtgatttggaccagtcctaaagtaaatcatatattgaggacacagttcttgttaaaactgaaatttgaagttgttgccattttctgcattcacactactggattctttgtagatgcggggatttctacttctacattttactgtaactatttacatttacctgtattgggaggaaattctatattgtagcaagttaaaacacatgattttggtaaaaaagtaaaaactgttaagatcttggagcccagacttatttgttatggagatttggagctaggagggacccgatgctcccttctctgtctctgtgtcctgtttattgtgaggtgtatattgataatgaatttgtgaagaaaggcattctttgatgacttagcagagaaaaaagtgatagtaattttatccattctgtctccagatgactggtactatgttttactttctcctcttttctccagagccactcttaaaatctttctgcagttaatggtttgttatagtccaattttcattgctttccaagatttgaactttctatctgaatgtaagtccccctccaaaagcagtcatctttcagttctgtagctcctctgatactcttcaagcccctcaaggagcattaggtttgaggatggtaacatttactcgttgtcctttgacctgaagatgcgtagaaagaaatgctatgttggatctcagtatacctaataacagtcttgcaggctgaatttgcattttcctttctggttgaaatcttgtcagtttactcatgcatttctgactttctcccattctggtgtgcttcctccccttcctgctcccttaagaaaaaaaaaatggttagccagttcggtgaagttttctcagaaatttcttgtggacagtgctaacttaagccggaaaacagtttgtgacacttgacttttcaaggaggagataagattttgtgtacccagactgtatatatcaattattatggggctaaactttgaaagtatgactagttccccaacaagtatatacgaaaccttgtaggattagtaattatatttcttgaattaattttaaaaatatgtaacatactacacacacatcatttgcaccatgagaattgtccatactaataagagatttttgtttgttccagttaaatcttactcctagttttgcaagtgtattcaggcctgcatggttgtcagtgactcaggtggggtgggcagggcagtctccaacctgccccacctgtgtttctctgcctgtttacttgtgaccttggctgagcagtacaaatcattgacaacactggcagtgctttggtctgtgcctgccctggcttattccattttttggccctttgattgaagatgcagttacaaccagtggctcctgactgtatttagtcattcgttctgatatttatcggccatttattgttgtgccaggtactgaagatacagcagcaaaaaagacactgtctctgtgctcatggagattttattcatatagagggaggtacaataaaagaaacaaatgtacaaaagtaatttcagaaaacagtaccaagaaattaaaatagagtaaaatggcttggtgagtgactgcgcaggttgggacattggttggtgccacattggggaaatgaccctgaatgatgacaaggacccaaccatgagaagggcattttaggctgaaggacagcagatagaaaggtgctgagtggggtaggccagtgtggctggacatagtgaatgagggtgagagtggtaggaaatgaggtaggcaggggtcagattttatttgaatttcagtagaaagccgtgggagagctttaaatggaggagtgaaatacgaggtatttggagaatacctcacgtaaaatttcctactcatgaaaagagagaaggcaggtgcagtggggcatgcctatattccccgctgttaggagactgaggctggaggatcactcaaggctgggagtttgaagctgtggtgtgtactatgattgcacctgtgagtggccactgtgctccagcctgggcaacatagtgagatcctcatttaaaaaatagtattctgttcagtgttttgaaaaaattgtattaaaaaatagaggttatgcagatactctgtaaaacttttttggcattatatgcagttttactgacctttatgtaacagttctattatatctagatayctgtgtatctaacaaatttagacattttgcaaaaactgaagacatgttaccaaaaattggtgcctcaaccagtgaaaggaagtatagcattactcagctggtcttgacgtaaaggttggatgaagtgtgaatgtttgtaatgcatacataatatttaaagctaacagaaacaacttcttagttgtctttgtagtgtgcttgccttggttcctggctgttcacctgaagtgaagacagcctgagtctggcagtagggaagcatcaagagtttggcttcctcctccttcagagcaacaacagcaaatgacacagcagggaaactaggagagttgggcagcttggaaacagggaacctcagcagtctgggaggcagcttgccagaactcctcccagccctcacttggttatctgtgatatctaaaagatttatctctacagtgtgaagccccaaatctgtgatatgactatggagggagaatgctttccaattttcttgatttggtagatacttttgtggagttgtcattttttcatagttttttgttatgatagctgaaatatttgttctgaaggggaggtctaaacacatgtaataaggctaatgaagagattggagtagcagtgtaatcattcctacacgtgtattttaaactttaggtactaaatccctttttgatatatatgctataaaaatgacttataaaatgaaatgtaattctagcatatcttaaactgttgccaggaggtttttgggttgcactgataagaaattacatgatttcttgcagaagggtcatttgtcttgctaaaggaccagtttctcatgactcctccctctccccactaataaacagctaagaaaagggcccttaggacattttttttcacttatccattataaaaagttattcacaattcttaaagggacaaaatttcaatgcagacataacatggctatttgctcaaagggaaaaaccaccaaataataaaaaaaatcaaaatacaaaaaaaaaatcctgtattttatattttgctttggggtgaattttggtaattctaaaatgatatgaatgcatgaatatatccagtattctgggtgttcattcactttatacagaataatgaaggaacagtagaaagcctgatttatgatattctggacagctttttagatttactatacaaattttagcttagtttctttttgcttcacactgtgtgcggtggagattttaaaaataggataaagctttaataataacagctaactttattaagtmtgtcaatatgattgttattctcattttataaatgaggaaagagaaccttaaaatgcttaagtaccttgcccaaggtcactaggctcttaagtggagaagctggtatttaggccctggccttcaaagcctaaccattatactctactgcctcttatagtggctttatgaattatagaccttcttttgagttgttgatgttaaattttactcatatgcagagctgtatttaaatttaaaaagaggcttattttataacatagccactaatatttttcattggaattgccrtctacctctacttgttctccagtgtagatttaattcttatattcttttgtttaaaaatctaaggtcctaactgcccttagaattaagtgcccaaaatcttatgtagtattcagatcccctacaacctgatcccagcttttatatttccatcttatttcctctctctgtaacttgctgttttcagtatgccccctaggatgttctctctcccagcttctttsctttttatttttcaaagctctgataaaaatgattcactccacacagctctcatctgtgtcccagggcactttaaatacatacctctttaaaacatttatcacattgagttacggtcatttgtgtttgtctctctgtcaagaccgagtttttaaaaaatatgattatttttatttcttgtacctaacaccagaagakgcctaaaaagtatgaatgattactgaaacaaattaaaatacagcatttagtagtagttgtataaatgttaccagttacttcatttagatgttaccatcaatcacagaaacatgtaggctgaagcaatgaaatcataaatacagtgttttaatcttccattgtgtaaaaagatcaatttctatattgtatgtaaatgtaatataacattttaaatataggtttaatttttgagaagatacacagtatacttagtgattaaaaagttaggtatttaaatctatgagaaaatgggatcattatttggatatttaccagtgctaatcgaagcagttgctggtaaaggcgttggagttgatgcatatagatagaagttacttttgcaataaaacattagagtcaccatcagaacagaagacttgaaaaattttatttgactcaaattacaaactgagcatttatgggtgtctgtgtgtgcatagcactgaattagatcatctggagatacaaaagtgtgatagatgctttcaatataaaataaacgttacatagctactgaacaagacattatataaaggttcgttaatgacctaagatgtaaatttgtttataatttttatcatagttcaatttcatctaaaccttatgtgatttcagtgttttcctcagatttgtctcacactctagtctggtgatttccaggcttgtgcctgtcccagcacacctaaggaagagggaaaatgtccatcaataagtaacaggggtttactttcagtggacagggtggatggaaggagagatkagcaaatttggggtgaaaaataaaagccctccagtggttctgacaagctgtagctagaggggggtggcagttgcagaaggggcagtttctccgtcttgtattttttatttttttytttgattcttgaaaataagttcttatttttgataagatggaggattattattattattattttgagacagggcctcaaaaaaaaaaaaaaaaaagagagggcctcgctttgttgcctaggctggaatgcaatggtgtgatcatagctcactgcagccttgaactcctggggtcaagcgatcctcccacctcagcctcctaagtagctgggacaacaggtgcactccacaaagtccagcttttttttttttttaatagagacaggatctcactatgttgcccaggctggtctggaactcctaagctcagatgatcctcctgcctcagcctcccaaagtgctgggatwacaggtgtgaatcaccacacccagacccagctgttttctaaatttttttggagaggtggggtcttgctgtgttgcctgggctagtctcaaactcctggtctcaagcagtccttctgcctcaacctcccaaagcacggggtttaccagtagcctgagcccccatacctgcccctctcctggaaaagtgctgaagtgggaaagtttacagatttagggagtccaaggaaaaggttgaggtcgagctaataagagaaggagaaaggaaagaggaactgagaaaggaaaggggtctagaagagcggttagaaatggggactttggttttcccctcaggcttagctcactactttctataaataagagatgtctgaaagagaagcagataaaaggagaaagccttcagcaaatttgtgagttgataagcatggattgattggctctgttggcctgggttcttgaggagtttgctgctatttcrgaatttctgtagagaaaccctggcattgtcaggatatgggtatgccacatgtttcccttcctcccccttccctccactccttcttattacctagctagctacacctggaattttggttctagaataatttaaaagatactttgtcaagaaaatatctttggaaaaatcatgcatatattatttttccttttttctttttaactacttcctggttctttaggctcctctaattcttacatgcatgtgcttgatctctgggccatgcttgcttctagttaagtagcctttcaggatggtgtttaatttattctgagccctttataatatmccctgacaagagcatggagtggatagagggagtcttagtcaatatgtattataaatagatttagggttcacaaaggtcagcagccttcatctcttgccctacccccatcacacacaaaaataaaaatcacaaataataaaggattttaagagttataccagtcgggagtgggttcatttttttgtttttktttttgtttgtttttggcaagctgaagtcatctgttggatccaaaaatgcataaaaatcttcaggcttatagaaccaacagcatcaaaggaagagcagtgtgactcaatattggggtgggggcaggtttggkgttttggttgtgtagaagctccttatgagagaacagtgtgatgcttggagctrtggagaatccagccactgctttttctctcttccttaccttattactcttcttgattcacctggatgtggaaactgtccctgtttaagagtggccttgtcaatgctctctgtgtatcatgtgtacagtagggaatgtgtcaagccagatgagtggtctcattgaaacatcagcaaatcagtatatcgtagaatttagatcccccttggaggtggtggtgatagctaacttctgttgcggtcttaactgtgggtcaagttttgttctaaggactttgaacattagaaactcatttaaaacttaaaccattcctgttggtggtcatgtaatcccattttacagattatgaaatcaacattaaggttatgtgcagcttagtaagtggagaagccagaagaacccacgtgatctggcttcagggccgatactcaaccactgtactttggagagaattagtcattctgataccacttttgttattagctaagactctttatgttgcaggtaacagcagtctaattaattcatttaaataaaaagataatattatagggatatttgagtgtgtgtctgataacccaggaactgaaatgttctggatatcagaaacaacagaaaccaggaattctctccaactctcatctatgctctcactccaagtgcgctttattttttctcacatcgcagattgctcctggctgcccacagcctgcctgaagaacatgaccacaggcacccagagagaaacttacttttggccagttgtaaaactcttgggcgagggaccagttagtctaacttgattgagttttggatcagtcagctattttggtaattaaagtgaaagggtccagatgacactaatattgggagctagtttgacaaaatatttaacaaaatgaatactttttttttttttttttcgagacatggtcccactctgttgcccaggctggagtgcagtggtgtgatcacagctcactgcagccttgatgtcccaggctcaggtgatcccctcccaccttagcctcctaagtagctaggactacaggcgcgtgctaccacacccagctaagttttgtatttcttttttttttttctgtgagacagagtctcactctgttgcccaggctggaatgcagtggtgcgatctcagctcagtgcaacctctgccttccaggttcaagccattctcctgcctcagcctcccaaatgctggaattacaggtgcccgccactatgcctggataatttttgtattttttgtagaggcagggtttcaccatgttggccagactggtcttgaatgcctgactgagctcaggtgattsgcctgcctccgcctccgcctcccaaagtgctgaggttacagacatgagctaccatgcccagccaaatacttttttctaaaggaagaaaacttagtcatttatttagctttaataattggctttttgagtttgttcaatactttaagctctgtgagcatatggatcatgycagccatctagcacagggtttagaaaacagtaactgctcaaacttttgctgtgaatgaatgaaggagcaaatgaatgattttcctgaaagggaaataaaaacagaattcagtttctgatcattgtccagggaatggcttggacacaaatagttgacctgttggaagagaatatacatttttaataaaggagaagggactgtgtttttcctggagggaggagacctgtaaagaaaaatatagaggtgtggggggctgggcgcagtggctcacgcctgtaatcccagcactttgggaggccgaggtgggcagatcacctgagctcrrgagtttgagaccagcctggtcaccatggcaaaaccccatctctactaaaagtacaaaaattagccaggcgtggtggtgggcacctgtaatcccagctactcaggaggctgaggcaggagaatcgcttgaacccgggaggtggaggttgcagtcagccgagagagaatcgcttgaactcagtgggtagaggttgcagtgagctgagagagaatcgcttgaagccgggaggcgaaggttacagtgagccaagatcttgccactgcgctccagcctggacaacagagcgagactttgtctmaaaaaaagaaaaatacagggatgtggtgactcacacctgtaatctcagcactttggttagctaaggcgggtggattgcttgagcccaggagtttgagaccagtctgagcaacatggtgaaacccccatctctacaaaacaaattttaaaaaataatccaggtgtggtggtgtgcctgtcatcccatgtacttgggaggctgaggcaggaagattgcttgagcccaggagattgatgctgcagtgagctgtgtttgtgccattgtactccagcctgggcgacaaagtgagaccctgtctcaaaaagtgggagaaaaagaaaaatataaagtattcaagttaattttaactatataacaccataccttttggtcaatttttcaatttttgtcccttttctcccatttttcctcagtctccatatatttgtctcttagcacttccttttattttccataacgtacctctcagtagagtataaaatggagatattttttatttttaaaatatgagttttgtgttgcttgttcctaaccttaaaaaatgattggtatatggtatgtgcctttcttgacagtgaactatttgatagtcatatatttaaaattaagaatttaatagaccttcccactagggaagcatttgtttcctaggcacctttggaaggtgctacattaatgaattwgttttattattttagataaattgtttttccctatttttagaatattaatagagtcaggttggaagatacaaataaacactgattcagaacgccacatgagagtctgaaagccatgtcatagcagtagttaaacagagtattaaatgcagatgaacaagatgtcggaaagcaatggtaatgttagcaaagctagagagaagataatttcktatattttacagcaaatgttgttgtctrtgtaaagaaaattataggcatgactgtgaagaaatgaggtttatttaagatgccaaaagtggctgggcgtgatggcttatgcctgtaatcccatcgctttgggaggccaaggcagaaggatttcttggggctagaagttcaagacaaacctgagcaacacagcgagaccctatctctacagaaaatttaggaaattagctgggcatggtggcatgtgcctgtagtcccagctactcgagaggctgaggtgggaggatcacttgagcccgacaggttgacgctgcagtcagccgtgtttgtaccactgcactccagccctgtctcaaaaaaaaataaaaataaaaagatgccagaagttttgtatcagaaaatttcaacagtgcaaaaaagccttatggtaaaaaataaataaaaagaaataaaataaaacttcaagaggttaactcttggtccattatttaaaacattttttgaagtgtctttggacaaggccttttacagctcatttgtgatagtcatacagttttctttgctgtaataaaagcttggttttgagtctcaccattgagttcaaatcttaactctgcctcttgatggcactataatcttgggcagatcatttaacctctagcagctttattttctcatctataaatcagagctaataacccccatcaaattctccttcagaggacaaatgtttgtcaccatttagggtgatttttctaaaatatgtctaattgttctacttgcccacttaaaattcccccatctttctcacataacctctgtagcatgtcccattactctgtagcttttctgtgtttgcttctaaccttccttcctcctgtgctttttccaagttcttttccctgaacagcactgctagctgctcctggcagctttttatttaaaaaatgaaaaaaaggccaggtgccatggttcaagcctgtaatcttagtgctttggggagctgagatgggaggatttcttgaccccaggagtttgaggctgcagtgggctgtgattgcatcactgcactccttcctggatgacagagcgagaccccgtctctaaaaataaaaaaggaaaaaaaaacttacactgctctttttaatactaggaaagctctttgagattagaaattggctgatgttttttcttacagttttgttttataaattttttaacttaaaatattaatgtaatgaaagaaatcactttggaggaaatttaaaactaaaatgaattcatactgaattatgttttaagacttgtggtattccctgtaatgcataaaaagcaatgtgaggaatcactgctcaaattgataatgtttaaaatggagaataagagcatagaaaaaaaaatacgggactaattgtacaatattttaacatttttaggttttacatattgagttaacctgatcacctacttgaagcagtctagcattaactgttaaatgtttaatgaagtagttctcaaccttggctgctatctcagttacatgtaatgttttaaaaaaatgcaggccaggttgggtggctcatgcttgtaatctcagcactttgggaggttgaggcaggaggaktgcttgagcccaggagtttaagagcagcctgggcagtatagcaagatcctgtctacaaaaaatttaaaaattagctagatgtgctggtgcgcacctgtggtcctagctactcaggaggctgaggtgggaagatcacttgagcccaggaggtcgaggctaagtgagctaggatcatgccagtacactccagcctgagccacagaacaagacctgcctcaaaacaaaaaccagaacaaaaaacagtcacaccagggccccatcctattggaatcatctctaggggaggttcccacacctgcattaaaacaaaactcagaagccaagggtaagaaccaaggaagtaatgtatacttttaaatgtatacttttaaagtaatgtatacgttttaaaatttgcatacagtgtacctctggtaatttccaggcttttatgacatataatcatcaattattcaaaataaaaagtgaatcaattttagaaactcccctcctcccccctttttttagacattagaagttaaatctcacggtttacctgtatcaatttgcagattattgtttgaaaaattctggtgaattgagactgcattaaatttctctggataatctacataaataatcctcaaaataaaaggttcatttcaacacgtaatagctttatatttaaaggcattaggaaagggggaggcagggagggaaagttagcatctgtttcctgtgagttttaagctatttctaataacttcttttcagctgctgcttttatgatctagtttatggcacagataagatatatatttcagaaaaaatgttttgagcttttgctgttgatgttaagattacgatttttctgttaaataggacatttggaacaagaactgtttaggatatagatgaaatacattgaaacagcaagaagttaaagcattttaaaaagccttgtgaataaatctttacaagagagtttttataactaaagttaataggaatatctaaaatgaatatccagctagtaaaattagccatccattcatgaatttaggaaataactgatttagaatgctatataaaaaaagagtttctcttttcacttagtcctcacaagttttcacctataatgtatttactcattaaacatcagatgtcttccacatgccatgtgctgtactggggaagacataaacaggagagactaggtccagactctgttggagcccttagtctaggggagtaagggattttaagtaagcaatagaagagatgtgtgtgttcctctgaaaactgcaaggtatttcagtgaggcagctcttttgttctttttccaaaagagtgacattggcttttcttggaagttttagagctgaaagggaacttagatctagttcagttcctcattttacaaatgaacacactcagatctagggaagtgaggtgactttcctaaaatggctcagctgaggactggtatggttgggatagaacatgggtcttctgattcttaaccattgtacactctctaccgtgtccctcaggggcatgtgaaagtaaatgacatatgacagacagaatcatgcccaggaatctattcattctgcacactatgattgatctagtttatgttctctttgtgctagatggtggcatcactcatgatgaagaagataaagctcttgttaagtagtttatggtctatcatgaaaagatgggcaatttgggaaatctgtggcttgttaacttgtttggcatattgagtaacatggcaggttctggagccagactgagttaaaatcctagctctcacataatagctatgtaatttggggaaggaacataaatctctactctgtttccttatctgtaagatagggataataatgcctacctcatagagtttttaggatttagaaatgtatataaagcacttggaacagtgcctggctcacagtaagcactaacactaacaaaaaagttatactattattttcacctcagttatacaggtgaggaagttgaaacataaaaaagttaagtaacttgcctgtgatcataaagctagaaagtttgggagccagaattaaaatacaggagtctcagtgctctgtttagatttaggacctgagccagggagtgtgttccaaacccagcactaatacttgagaagctctcaaaactgtaagtatccccaggatactggtgtctcaaaaagatagtaatgtgttaactgtaagctatttagtgatacatttgctttcttctgcagagaggagggactgaattttgggactgttgcctgcaccatcccagtccaacttgctatgtgtttttatttttagycattggctgattccaatttgaaattcagaggatttgtgatatattatgtgatatgttttaaaaattactagctccttgctgcattttataaagcgttggagatagtttttctttggttggctgattggttttggtgttttgttttttagaggactagcctacacctggtttgagtaagaaagttttgtttgagaagcagcgtttttaccaccttcaatcttttgaggaacttttggcatgtggaaaattaaatactacaaactttcaatagaaggtagacaggtaatatggagaactgagaattagaaatcttgaccatgctgttgggaatttcccttttctttctgcttgtccactaatctgcattgcttattaaaacaggttgatacttttaaggctctgcaaagaagttcttttcattggttagtatctaataagtgatagctggtacaggactttaaaaatatataataggggtttattttctttatttttattatttattttatttttttttgagacaaggtcttgttctgttgcccaggctatagtgcagtggcacaattacagcctactgcagtctcagcctcccgggctcaagtaatcctcctacctcagcctcctaagtagctgggactataaacgtgagccaccacacctggttaatttttgaacttcttggtagaaaatgtttcgccatgttgcccaagctagtcttgaacttctgggctcaagtgatcctccctcctaggccttccaaagtgctgggattacaggcatgaaccaccatgcctggactagcggtttcttttaaacagcatataattgggacttgcttgtttttccaatctgacaatctttgcttttaaattggaatggttagaccattaacatttaatgttattgttgacatgattggatttatttatttatttttattttttgagatggagtcttaccctgtcacccaggccggagtgcagtggcctgatctcagctcactgcaacctccgccctgcagggttcaggagatttctcctgcctcagcctcctaagtagctgggattacaggcatgcaccagcactcctggctaaattttgtatttttagtagaaatggagtttcaccatgttggccaggctgttcgcaaactcctgagctgaagggatctgcctgcctcggcctcccagagtgccgggattacaggtgtgagccactaccgtgccaggcctgatataattagatttaaattaattttcaatttatcctatttgtatttccttttttcatgcttgcttttgggttgagtttttttttttttaatgatactatattaattaatttctcttctgtattaccagctataactttttttgtttgttttttagtggttgctttagaatacatctttatagaatacatctttagcttatcacagactacgttcacgtgataattataccccttcacccacagcgacccctcaacaatccctctcccagcattagtgctgttattgtcatatattttattctgcatgttataaaccccaaaatatattgttactatttttgctttaaacattatcttttaagagatttaaaaaataatttagccgggtgcggtggctcatgcctgtaatcccagcactttgggaggctgaggcgggtggatcacgaggtcaggagatcgagaccatcctggctaacacggtgaaaccctgtctctactaaaaatacaaaaaaattagccgggcatggtgacatgcgcatgtagtctcagctacttgggaggctgaggtaggagaatcacttgaacccaagaggcagaggttgcagtgagccaagatcactccactgtactccagccttggcaacagagagagagtctgtctcaaaaaaagaaaataataataataataataataatttaaaattttatattttccacacatttattaccatttctggtgttctttttttctttgtatagtttcagatattcactcactgtcatctccttctgcctgagagacttcctttaacatttcttgcagtcaggtctgctggtgacaaattctttgttttattatgtctgaaaaaaatctttgtctttttttttggaaatgttcctgttggatataggattttaggctgacagttttgttttttacttaaagatgctatgtaactgtcttctgacttgcattgtttccagtgagaactctgtaatccttagtttgtttctccatataatgtgtcatctttttgtctggctacttttaagaattactctttatcactggttttacacagttagattatgatataccttttgatgtagtttttttattttttgtatttcttgtgcttggtgtttgttcagtttcttggctctatgagcttatagtttcatcatatttggaaagaaagtttgttttctgtgtttcatttgaataatttttatggctgacttcaagtttcttatttttcctttgcatagtctaacatgctgttaatttcagtatatgtttaatctcagttgttgtatttcttcatatctggaagtttgatttggatctttttataatttctatgagtccacttaccatggtcaggtatttatcattttaaatttatgattacagttataacaagcgtttactgtctttttgtccactaatttcattatctgggtcatttctggatcagtttctattgattggttttttaccttatattttcaagcccctgcacatgcgtgataattttttgttggataccaaacattgtgaattttgcctttttgagtgctgcctttttgtattcttaaaaatattcttgagctttgtcgtaaggtgcagttaagttggaacttagtctgatccttttgaggcctgcttttaagcttttaaggcctccttttgaagcctgcttttgagagtgaccagaacagctattaaggctaatttttaccattcactgaggcatcaccattctgagtattctgctggatggcccataagttaccagggtctttttctttctgactaatggcaatgcaaactattctcagccctgtgcgagctctggggagtgttctctctgttctctggtgattctttccctggcattgcgtagtgtcctctcatgcatgtgctaattcatgcttaggtaaatacttgacgggaccctctacagatctccggagttctgtctctgtgcagctctggtacttgtgaactctgaccacttaggttattccttcctgcaccacaggcgattgtaggtctcaatatatttagttttcctttctcagagatcactgccttgcactacctgatgtccagtgtatggaaactgctgttttatatattttgtcagtttttttgttgtttaagtggtasggcagatttagtatctgatataccatcttggttagaagctgaagtgactttacagcccatgatactttttgtaaataaagattagtcgttagaaaacaatactttcatgctgtttcagcttttatacatctataatgatattatttacttttagagatgcgggtgaactgtttgaaaagattgaaaagatataaagagttattggattctttacatcatgagcgaggaaaaaaattaagctcgtcttaaatggctatgtttcaattttatctgctataaatgggtaagagttagattttatttaaaattcatcttggcatttagagactgatactgtttctggccatatcagctgaactgtgtyattagaatttttaattgttttagggttttttttttaagaatagatgattgatttttttctgtctctctactcttcttactcagaattagatgtgctttgagcacgtattaattctaatacgattaaaggtcaagccataccacaagaatatttatattatatgtgttgattagagttggacttgtaatggccgcattgttagagattgcatttctactttccatgaattctgttggatttgcagataaaatgttttctgtctaatagggagaaaatataaatatcatgcattcatctctcatactttttcatgtatcatgccattcacagttctaggattctggagccacatttgtagccaccattaaccaaaacaaaaacaatcccacatgactattacctttgaattcagtattgtactgtattattctgacacagaaatttgaaatccaatgggttggtgagtgaaaaagtcacatgcagctgacagtcacagtttttatatgactctcctagatctttttgttttgtggacgtatgtttgggggtagatggtttagagttctattaggagagagatgaaggtattctaggtgagtgttgagtggctgactgctgttagagggcaaaatgggataatcttttacaaaaaacttgaggtacatgatttagtactttgattatcctagtgattgttacactgaatcagaaaatgcatttaccttaaaacctttattgtaactaggtgaaagtaaatgtggtgtaacttttggtttgactataatgggcagtggaatctcagatgttaggatcaggtaagaagaaagattgaactatgtcatgacccagtaagtgaaggggtgtgtgtgtgtgtgtgtgtgtgtgtgtgtgtgtgtgtgtgtgtgtgtgtggtgttgttgttgttggcgacagggtctcaattcgtcgcctaggctgggatgcagtggtgcagtcacgactcactgcagcctcaacctcatgggctcaggcagtcctcccacctcgcctcctgagtagctgggatgacaggcacatgccacgattcccagctaatttttctatttttttgtggagacggagtcgtgccatgttgcccggcctgttgttcgtttttctttgaagaatatacctttttattttattatcatttgctataaatatcactaaactttgtcatcctaagtgagataataaggcaagatatttcaaggcctccttttgttatgtaagctgaattcatagcttgaggaaataagtcggagtctcatacctctgtgtcaacactgaacagcattttttgtgacgtaaaatctcattatcacaaattacaagtgcgctattcggtttttaaaaattttaattttggtttttgaagtcacacataagtttttatactttttgagggaataaagatttctaattgtacaacagtaaatggaataaacaataataactttgagtcttctggaatagatgttcaaaagatcaaattttccatatctctgtaatctaactataacctctgagggcaagggcttgttttatttgaataaagaaccctatagtagcatgattatggtagttatggtataactttataccataaaatatcccatgtgctattatactgtggcatagcatatatactatatatgttacagttacatataaaaatatatattatagtagtatatagtatgattatttggcttaaagctttttttttttttagcaggagcatagttcaaggacaatttttttcagattaaaatggactttctttgggaagccatctgtccccccagactaagttttgttgagagtagtgacagggacagaggcaagaccattaggttaccataatacctggacttagtttgtataatcgaggttaatgccagtcttgttgactgcaggacatacagttcctaacatattgcttagcatataatatgtgttaaatatttgttgacattcggaactgtgcacaatgttttatgagtcaggaccattgagttgcacaactgtggcacaccattcacataatgataatatagattttctcagttctgagtttgcttgctgcataaatgtcttaagtctttggcacctactgctgttagaatatagtggcatttgaacacacaattaagtatttagcttatgttacacataatcaactttcaataaatgagatctataataatttgcctactccactctcaccttccacagtcatttctcccctgcttcctattggttgttttgttttgaaccagcacccttccaactcccccagagcatcccacatcattagcttcacaagcatcttccataccagtgtcatctttaacaactgtgtggcagtttggacaattgacaatccaaatgaccctcagatgtattctagctattcttgactgccttctggagtcagtattttcagccaaacagtgaaaattaacaacaaactgtgtctaaaacttaaaacttaattcttctttcacccaaatgcttttcctgtgtttttatatttttatctctttaatgtatttttttctggttgcccgagttacagatattgccatctttatcctgcagttgtactgacttaacgatatcttcttgatatttcttccaccatgtgtaattttttatgctcttagggctcctttaatgaaggcaactcatatgtaaaatgggagtatgtaaaaataatttgtgggagagccatgtgggtggggtttgtgagtagtctctaaggcgcaggctacagctagctagcctagtgtttgtgagccctccccttcccccagtaaaggttgattcctttttctcctctttcctgcttgtttattttattctattttatcctcattttctacttctgccccaaaagcacccattctaatgcctttcactatattgtttgtgttcttgtaaaatgtatttagtgtttgtatttttaacttacataaatgatgcctaattctttcttacatttttctaagcacaatgttttaagctctctccctgttgctatgcaagcatctaattcattgcgttgaacagccacatagtattccaaggggtatactcattttatcttayagaagaccagatcgtttccagctctccatccccactaacagtgaacattctggtccgtaatcttttttggacctctgtaagaattaagcagaactgcaaggggatcatagggcttacttaaatttgatttgacttaagttgtaccagattgttccccagaatggctgtactcatctccatgcccaccagtagcagagcatgagaattcctgtgtcctcttaggtgcgttctgattttctaatttttgccaatcatactctacacttacatatggagaatatgttcatgaacatgtaggtcagtcttaggtgttatgcgtgggagatgggttgttgctctcccagatatgaagacgtgctccaataatactacactgtatttattaccgtagccctgtggtaaggtaaacagaccaatgaagctgacttggagcacccagagatggacatgtgtatatgtaggattttaatatataatatataatttatggcagcaccaaacactgaggacaagatgggattgttcatagatggtatagggaaattgactcaccacaaggaggtaaataaaaccggattcctacttaataccatatatgaaggtagactaggtagattaaaagctcacatgtgaaattttaaaactatacaatgaagaaagaaaatgcgacccacaggccaggaaggatttcctaagtgtagcttcaaaatcacaaatcttgacaataaactaaagcaaattttatgtgaaattaaaattttcttcttaatggacaggatattttcttctttttacctcaagatctgtgtgtctggcagaatgcattgcacactcttcaggagtggggaggctgaattggctatgcacatatatactctcttgatagaaggaagaaagcctctgtttaccaagttgcccccattttatttagcaatgaaattgtaagccacatgacaattccctttttctaagcatatgtaggagtagagtgtagatcagtgttttctgaatatattgtctgtatcagaattacttgaggcagttgttaaaaatggaaattcctcttttgtccatctccccactgttttggtttctctctctctctctctctctctctgtgtgtgtgtgtgtgtgtgtgtgtgtgtgtgtgtgtgtgtatgtgtgtgtatgtatatatataatttttctttttaaacaaaacctctctagggtggagtttggcaaagttatttagcagaagtccaagtagtaaatattctaggcgtcataggccatttgatctctgttagaaccgttcaactctacccatagtacaaaagcagccatatacaattcataaatgaaaaaatgtggttgtgttccaatacagctttattacggacaccgatttcaatttaataattcaatataaaatttattaatagttttcacgtgtcataaaatactagttttctktagatttttttaatcacttaaaaatgtgaaaacctttcttaactagtagaccaaacagaaacaggttgagggcctgatttggcccatgtgagtcatagtttgccaactcttgctccttaggcaactaaggttttcaaaccagtgccctagcttatctgatagttaactgtcattctctgtattatttggggaaaattcttacatcagtaacatgaattttcagtacctgtragagaaagtagttcttaatggtcaggaagggataattaaataaatgtcttacataaatctagtttaaggtaaatgtaatgttgaaacatttggttttttaaattccttttaagcctattcaagagtgggtaatagagctgggtgcagtggcccattcctgtagtcctagctacttgggaggcttgaggtaggaggattgcttgaggctaggagtttgagttcagcctgggcaacatggcaaggccacagtctcttaaaaaaaagaatggggccaggtgcagtggcttgcacctgtaatcccagcactttgggaggccgaggtgggcagatcacctgaggtcaggagtttgaaaccagctggccaacatggtgaaaccccatctttactaaaaatacaaaatttatccgggtatggtggcgcatgcctgtggtcccagctactcgggaggctgaggcccggcaatcacttgaacccagggggcggaggctgcagtgagctgagatcgtgccactgcactgcagcctgggcgacagagcgagactccatctcatcaaaaaaaaaaaaaaaaaaaaaagggaatgggtaatagagatggaaaatggaatgtttaagctgtatttaataagtcttggagtataccatttgagatggaattgttaaagatgggacatagagaaacagtctttttaactgcctatagtaaaaatagctaggtgtttagctacttttttttttctttttaaatcgatttatcaagatgaataaatagctgctatcttgaaatattctaagggcaggggccaggtaggctgtgcgaggtcaatatgttaatcatgttattacacgttttaagaagataagctaattcttgaaactcaccaaagaggaattcattgtacaaaagaatatagtttatccctaaatttgatggaatggtctttgattgatgttataagaagaatagacttattttccctttggttcatcagtagggcgatcatataattactaataattacatcagggcagtaggcataaaccaagattgtcttgggcaaaccaggacatgtagtgatcttatacaccagtcacatatagtacttttaatataaagggtagataagtcttttaacttcctagatgaaaagaagacatccattaatgtcatgacatcagtagtacgtagtgaaaagagcattttcaaagaaaaaaggtgataaacattagtatgataactatgactgaaatgaagcttatttttacacccttaagggtagaaataccctgtggtattaatagttttaaaaatatatttcatatctgtgtgtgtacatgtactttaaattttttttttttttttttttttttgagacagagtctcgctctgtcacccaggctggagtgcagtggtgcgatctcagctcactgcaagctccgtctcccaggttcatgccattctcttgcctcagcctcccgagtagctgggactacaggtgcccaccaccacactcggctaattttttctaatttttattagagacggggtttcaccgtgttagccaggatggtctcgatcttctgacctcgtgatccacccacctcggcctcccaaagtgctgggattacaggcmtgagccaccatgctcagccttaaaattgttatttggaaataatgcacgtgatagacaactcaaaacagtagaaagggatatatagaaaaagtaagttttcccatttccagccccaaaggcaatagctgttatcagtttcttgtgcatcctgtgtgaattactttagatatacttaatctataataatagattatacacccctttcccctacctccttttttaaataaacacaaatggtaacttgctgtaaacactgttctgtaccttggttttttaacttcagatatcttggactttccccagtgttttcacaataaacctgtgcagtaatttccttatttacaaatgaagaaagtcaggctcagagtttaaagtaacttgctttaaggaaaaacgtatattaaatatctaggctgggcgtaatagctgatgcctgtaatcacagcactttgggaggccaaggcggatggatcacttgaggtcaggagtttgagaccagcctggccaacatgatgaaaccttgtctctcttaaaaatacaaaaattagctgggtgtggtggccacatgcttgtaattccaccttcttgggatgctgaggcaggagaatcacctgaactcggaagatggaggttgcagtgagctgagatcgtgcccctgcactccagcctgcgtagcagagtgagactctgtctcaaaaaaaaaaaacaaaaaacaaaaaactttagctaagcaggtacttagtaaatgttagtttccatcacgttctcttacccaaatatgtccttatgcttaataagcttggaggaagatwatcacaattttagaaaaaaaaatacaatatacttaaatgcccacataatgtgatataatcagtaactaccctgacagttcagatatgggagaaatcaagtggtttggttggggaaaacttcatagaagaatatagagagattaggaaagaatttaaacagaaggccaaaagggagggcatctaagaaaggaagagggaatagcattagcaagaaagtcctaactggaatcraagggggagaggtgttggtaagccaagggggcctaataagcagtgaagaccatgagttcatgtggtctttagtgagtggcttctttcacttagtacagtgttctcaaggttcatccatgttgtgtcatgtatcagtacttgatttctttttatggctgaataatacatatttcattgtagggatataccatgtttatccatatggtggacatttggttgtttccaccttcagctgttaaaataatgttgccatgaacattcatgtgcaagtttttgcatggctatattttattttatttttttaggaacctgggagtggttttgctgggtcagatgttaatgattatgtttaacattttgaggagctgcaaaactgttttcctaagtgcattgttttacattcccatctagccagttcccatcttgctattatccatggtttttattgtagttagcctagtgagtgtgaagtgttgtttcattgtgtctttgattttctttctttttaaaaaaatttttaaatttctttttgaattttactttaagttttgggatacatgtgcagaatgtgcaggtttgttacataggtatacatgtgccatggtgatttgctgcacctatcaacctgtcatctaggttttaagcccctcatacattaggtgtttgttctaatgctctccctccccttacccctcaccctctgacaggccctagtgtgtgatgtttccctccctgtgtccatgtgttttcattgctcatctcccacttatttgtgagaacatgcagtgtttggttttctgttcctgtgttaatttgcagaggatgatggtttccagcttcatccatgttgctgcaaataacatgaactgattcttttttatggctgcatagtattccatggtgtatatgtgccacgttttctttatccagtctatcattgatgggaatttgggttggttccaagcctttggtattgtaaatagtgctgcaataaacgtatgtgtgcagtgtctttatagtagaattatttataatcctttggatatatacccagtaatggaattgctgggtcaaatggtatttctggctctagatccttgaggaattgccacactgtctccaacaatggtgtgtctttgattttcatttttaaaaaatgacattcagaattgtatttttctaatagcaatgatgttgaacatctttttcatgtgattattgggtatcttcattggatcaaaattgacatattctcattggaaaaatgtcttttagatattttgcctgttttattaataaaattcaggctttttaatggctgaattttaaaagttcttatttatctatctaatatatcaatctattaagacaaggtttcactatattgcccaggctggtattgaactcctggcctcaagtgattctcctgcctcagcctcccaaagtgctgggattacacgtgtgagccactgtgcctggccattaaaaattatttttattccagataaaagtactttattagatacatgatttacaagtgttttctaccctgtctgtgggttgtctttttattttcttgatggtattgcttgcagtacaaaagtttgtggtttcaatgaagtccagtttacctatttttcttttgttgcatgtgttttggaattgtatttaagaaaccattatctactcctctttttattattattattatttttttttgagatagggtcttgttcagtcaccagagcagtggtgcaatcctagctcactgcagcctcaaactcctgagctcaggtgatggtcctgcctcagccaagtagctgggactacatgcatgcaccactgcatccggcacacctgattgttttttttttttttttttttgagatagggtctctttctgtcacccatgccagagctgtggcatgatcatggctgtctgcagcctcaggctcaagcagtcctcccacctcagcctctccagtagcagggactacagatgtgcgccaccacacccagctttttttttttttttttttttttaagagacagggttttgccgtgttgcccgttgcccagattggtcttgaattcctgggcccaagcagtttacctgcctcagcctcccaaagtgctgggattacaggcatgagccaccatgcccagcctattcctatattttcttctaagagtttcatacttttagtttttcgatttggatcagtaatccattttgagttaatttttgtgtgtggtgtgaagaagggttcagtttcatttttttgtttgtggctattcttttgttcccaacaccatttgataaaaaagactattctgtctccattgagctgatttggcactcttktcaaaaatcaatttacctgtaaatgtaagagtttatttctgggctcttaattaggttccattgatctttgtatctatccttttgctggtactacgatgtcttaatttttgtggcttcatagtaagttttgaaattgagaaggaagtcctctagcttcgttctttttaaagattgtttggctattctatgttccttgcatttccatatgaattttaggatccgcttgtcaatttctgtttttcattttgtttttttttaaacagtccagctggggtttttacagggtttatgttgaatctgtacaccagtttgagaagtattcccatattaattttaggctgggtacagtggctcatgcctactatattcccagcactttgagagaccaaggtggaaagatcacttgaggccaggagtttgagatgagcctgattaacaaagtgagaccctcttctctataaagaataaaataagccagccatggtggtgcacatctgtagtgccagctagtcaagaggctgaggtgggaagatcagttgagcccaggagttcgaggctgcagtgattgcaccactgcacttcagcctgggtgacagagaccctgtctctaaaaaataaaaaaaaaattaaaattcagatctgtacagtttggatgtttgtcccctccaaatcctgtgttgaaatgtgatccccagcattggaggtggggcctggtgggaggtgtttgggtcacagggacagacccttcatgtatggcttggtgctgctctcacggtaatgagtgagttttcacttgctttgttcatgcaagatctcattgtttaaacaatgtctgggacctccccactctctcatgctccctttcctgtcatgtcacatgcctgctctcccttcatcttctgccatgagtggaagcttcctgaggcctcaccagaagcagatgctggcactatgcttcttgtacaacctggagaaccatgagctaaataaaccttttttctttataaattacctagccttagatactcctttatagcaacacaaaatggactaacacatgattcatgaacattaaatgtcttttcagttatttatatttcccttaatttatttcaatgatggtttttagtctgcagtgtacatattttatgcttatgttaaatttattcttatgtattttactcagatactattgtaaatttgaatttttaaaaattacattttctgattactcacgggtagtatatagcgatggttggtttttgtgtattaattttgtatcctacagctttgttcagcttgtttattggtcctaagagctttttagtggatttgagttttctctctacaagatcatgtcatctgcaaatacagatcgtgttacttcttttccaatctgaatactttttatttctcttttttctttttttgagacagggtctcactttgtcatccagactggagtgcagtggtgcaatctcaactcagtgcagccatgaccttctgggctcaagcgatcctcccacctcagcctccccagtagctgggacttacaggcacgtgccactgcacccagcacacccagctaggtttttgtatttttgtagagcaggggtctcaccatgttgcccaggctggtcacgaactcctgggttcaagtgatcctcccaccttggcgtcccagagtgctaggattatgggcatgagccaccatgcccagccttattttgttttgtttttttttttgttttgagatggagtttcactcttgttacccaggctggaatgcaatggcatgatctcggctcaccacaacttacgcctcctgagttcaagtgattctcctgcctcagcctcccaagtagctgggattacaggcatgcggcaccacacccagctaattttattttttgttggtcaggctggtctcgaactcccaacctcaggtgatctgcccaccttggcctcccagagtgctgggattacaggcgtgagccaccgcgcccagctgccttatttctttttcttgctgtaattcacctggctacaacttccagtaaaatattgaatagaagtagtaagggtatcaagttcttttgctctgaaaaaaatgaaaaataaaataagtagtagtgagggtggacatgtttgtcttgttcctcatcttagtcctcagaaatcattttcttgtcaccattaagtatggtgttggctgtgggtttatcattagtgtctgtttaagagccaagcattttaattttgatgaagcccagtttgtcagttttttcttgtgtgattcatgcttttgtctcctcagaaatctgcctacccaaagattacaaagatttttcttctgttgtttttttttaatataagttttatggttttagctgttaaatttaggtctcttcatttctgttcacaattcagtctttaaatgcatataggagagttggaggggagaggagacacttgtccctcttaacttgtttcttggtaatgagtgaattggtgaaaataactacatgtacacctgtagtcttgctttgtacaggttttgcatttggtagtctgccagtgctcaaaaattcctggtggtggtttttcagggataccacccagtgaccatctgtggtggtcatatgttatttgttcacccaacatccccctggggtaccaacactcctcattttataataattcgttttatccacatggttcaagtgggtctttttttaccctccagtggtgataggctgacccaagcccaggcccatcagaatgctttatcwtggtcaggcatggtggctcatgcctgtaatcccagcactttgggagaccgaggtgcatggatcacctgaggtcaggagtttgagaccagtctggccaacatggcgaaaccccacgtctactaaaaatagaaaaattaaccgattgtggtagtgyatgcctatagtcccagctactcgggaggctgaggcaggagaatcgcttgaacctgagaggcagaggttgcagtgagccaaaattgtgcctgggcaacagagagagactcagtctcaaaaaaaaaaaaaaaaaaaagctttatgcatctacccacagtgattggttcagagagggtatttaacttaatctgaactgatgagagatataccaaagtatttgggagggatgtttttaaagcttacctcttttcctgagatatattatcttttccaagctatcctatgtggagagccagtctcaaaatgaagtcaacccaaaattgaggggttagtgagaaactcttaatgacactgtctgtcccttcgggtccatccttggcctgaagccttctcatggcctttttgatgatgtgggccagtttatcttttggcccaggctcttttgagtcaggtatctatacttgtaacagaaaaagccctaactaataagctattagtcttcttgaataaatttttaatatgtaggagttacaaatacattaggctctgtcttattaatggacagtaaaaggacaataacttttgtgtgtgctcttggaagtagcagctccttgtggctttaaagaaattctgttaaatacgtaggattatgatactgttttgtggaaggctgaatttaagtcctaaggttacatgagaattcactgagaagcatatctttaaatgtctgcttttaatgaagatatagattaattattcacttgacaaacttgttggtattttatgggagaattcagtgcatatagaggcttcaaaaggcagattgtccactgacaggttaggattctcaagtgtaattttttattactttagagccgtaattattttgtgagagacagtatctttgaattaaaatgagaaatgtttttcaacttagagattcaactcatttcagggatgtgtttaatccaaaaatagagagttcattatgtagtggtgaaattaaaacatttattaaaagcagtctttgggtttaagtaggtagatctcaaaagtgtctttttccttcttattggttaactaagggacacaaatacacaaccttctctaggaaacacttctaccattcttactagtttatgttttaatttttcaattttattaaattagtacatcttgatacgttaattttcatattgtttcatttcattataataccttcattagttatatgggattttactatgttaattttaacctttaaagtgaaaagactaactgttgattattggaaagcaaaaatatagctttagatttttgtgacagccgttattaatacatagttaagcagtcattatttctttggaagagttagcacttgttccttaaaaataattgtatgcatagaaatagtgctttaggccgggcgcggtggctcacacctgtaatcccagcactttgggaggccgaggtgggcggatcacgaggtcaggagatcgagaccatcctggctaacatgatgaaaccccgtctctactaaaaatacaaaaaaattagctgggcgtggtggtgggcgcctgtagtcccagctactcaggaggctgaggcaggagaatggcgtgaacccgggaggcggagcttgcagtgagccaagatcatgccactgcactccagcctgggcgacagagtaagactccgtctcaaaaaaataaaaataaaaaataaaaaaaagaagtagtgctttagggcttaaaggcacttacatagcttatttccttcaaggttcagttccgtgaggtgtggtatgtggaatagcattagctgtgttttccagatgaggaaactgaggactgaactggaatttgcatgctgttcagattttttaagttccctgtgtggtttttcttttcttttctttttttgagacagagtctcgctctgtagcccagagtgcagtggcatgatctcggctcactgcaacctccacctcctgggttcaagcaattctcctgcctcagcctcccgagtaactgggattacaggcaggtaccaccatgccttgctaattttttttgtatttttagtagagacagggtttcaccatattggccaggctggtctcaaactcctgaccttgtgatccacccaccttggcctcccaaaatgctgggattacaggcatgagcccagctgtggtttcttatatcatactgttaagtgtacttttaaagctttaaaaagcagtgttaaccctttcttaaaacagatttcagggaagacagacgtttaaaacattagccttctctccccatctggagtatggtttggaagtcattgctttgtagtaaggcattattttcctggtacattgccaaggaccaacaactgttaaatcaacaaactaagattttcttctagatttgtatcggattgtgactttgctttctccctttcaccacccattaatgcttagtaaagccactatggacctcacgtatctaaacccttccctgaaatgcatctctcttttcataccactccaatgggaactcctgttgatttgtttctgggccctgacagattagcaggaaaagaaagcgctttagaaaagtgagaggggagttcagaggttagaggggaatcagaaaattaatgtcatgattatcaagaatgtttccagaaggcagggctcatcagtccttgacaaaaaggctgatgaaaaaaatggagttgagtgcagccgatcacctcaataatcctagcagtttggcaagctgaggcaggaggatcacttaagtcccggattttgaggttgtagtgcgctgtgatcacaacactgcactcggcctgggtgacagagctaggctgtctcttaaaaaaaaaaaaaaaaaaagagagagaatgagaaatgccatttaattttgagcctggcaggtctttggtgacttttgagactagtttactgtggaatgttgaggtaaagtaggactgaatcacatgtagagggatctgtgtgtatttaggagaagcatcaggaaattggcactgaagggcaggagaaagctggcccagcagcctggaggggtagaggtgttcaggagtatgttttagagtctggtggttttttttttctttctgcataggaaagtttgaactttttgtaaccaagtgttctattcactgttaaagtaaaagaggaattaggtaaagaccacatgtttatcttagaaagaagcacacatttttgtgaaatgaaagaagagaggagtgaaaatagaaattttcatgtgggaagaattgaagttgaggtagcaaggaataccaagacaactgagaagtccttataaagaacacattcagtacttttaagatgttattttccaaaacatacacttttgggttgcctgtcagactggagatgtatgcctgtcgagtcacgttacactgaatttatttaggaaatagtctgacatacagaagtttcacttctcctgccacttgtgaaggatttgtctcattggtgtggtgtcagcctggtgagataggacttgcttgtggtttggaagctgtctgtgggcaactccaagagctgttgtgctctgcctctttatgaaccttctgtgcttatggaaatggttcccagcgtgtgctcctcaggaatgagtctgagtgacagaggtgccagtaggctatgagatggtagcaatgaccttagctagtcttttttgtttgttttgttttgagacagagtctcgctccgttgcccaggctggagtgcagtggtgcgatctcggctcactgcaacctctgtcacccaggttcaacctctgtcacccaggttcatgccaccgtgcctggctaatttttgtatttttattggagatggggtttcaccatattggcctggctgaccttagctagtctttcttaagaggctgggagcctgaggacagttgagaggtactgagctagttaaacctcaggcgctttccctgcgaaggctctatggcagataccacttggggctatagaagctgttacctacagtgtaaattctggatttcaatgcagagggcagacatagggctactaattttattttgttttgcaaggacattgaaaaaaagtcattgtttactgtcgtcagcattttataaaagggaggatactttttaatcacaaaatatgaagaagtttattatttgttttttgagatggagtctcgctctgtcatccaggctggagtgcaatggcatgatctcggctcactgcaacctctgcctcctgggttcaagcaattctcctgcctcagcctcccgagtagctgggattacaggcatgcaccaccacgcccagctgatttttgtattttttgtagagacaggatttcgccatgttggtcaggctggtcttgaactcctgacctcagatgatccacccaccttggcctcccaaagtgctaggattacaggagtgacccactgcgcccggccaggaactttatgacaatggaagacaaacctttatattgagtaaattaaaatttatgaaaaaaatgtaatgctttctcttattcttaccactcgtgtgtaagaacaactgacctgcagcactgaagctattcatttttgagaaacttgtcctaaatacttgtcctccctcctccccactttctcacaagtaaaagaaagggagcttgaaagctggcatgctatctgcttacatgtgagggagaggagggttgcccataggaaatttttatattgggcccatttctaagccaccctcacttgagctcgtctttaacaatttacctcatatcaaatacctcgtattttaatcatttattgttggacagtcccccaccccccaatttggctggtagttttatgagaaaaggcattaattatttaccatttttgtgtatcttactagaattttgccatattcattaaatggaactgattgctagtctaaacttactaccagttacctcactaaacactcctggccaaacaatatctagtgccagctctagttcagcctgcctttgcctgaggccagatccttctgctctgcccgtggaagctggttgagaggaagtgatgtttaatccttgacctacttttcatcttcccagagagtaatgtgcctgcagctgttctttcactctcttgttaaattcttgctttcttttactccttaagggaggtatgaggcatggaaattttcctccatctccaacactgctacctcctcacttcacctgagcacatgccccatgactctccatattacctgctcccacccttgtgactttgatatccatgtggatgacccatatctatctgcttaccagtgtctgcttaccaggttcttcatccagaaacattagcccaaatgaagcttcactcacctgagcaacagttggccatgccatagcaaatggagtggcctttgtaatacagagatttgagtccagtctttgccagttagcagctgaatggccttaaggttaattacttaaagtctctgggcctcagtttcctctaatgcaaaacagagatattctctccaaaatggtgttgaagaacttgctgtggctttgccttacccagttcattgagggtaaactgtcttccctggtttttaaagcccttaatgatttggcctcaacctgcccatccagcaggcaaaattctttggtacctagcatagtattgaacaaatactaagtatgaatatgtatttttattggtttattatattattataaagcatataaggatttatttcgtactctcattgtttcatgcctaacagtcccgactgctggagccactgaaattttcatttactttgttttgaagaagcagttcagaaccacgtcctgtgtgcaggttttgcacacagcagatgtgtaaggatgtcttgaaataagggatggttcttctgacattgctgaaggagaaaatcattttgctctaccagactgaaattcagagctcagccctttgctgccagcttgctctcacagctgtctgtccttggtttctgggtgctttcaccttggctagatgaagatgaacgttctgacccgctcaggtttctgtagggttgagactctgctgccactactgctcctttgatgctggtgactgcacctcactaaattagctgttcggctagacaaatctttagcgctctggttttacctttttagcaatgttttagctggtatgcttccttgtggctttgtggggctcattgttaatggaagcgcacattaacaaaacactaaaatggccaaacatcaacaatgactttagttaacaaaattctgagagaggtacaattagtagtcagaaatggactgtattaaagtggctatcctatgagtttatcttgatactatcttacctcatgcttacgtggtgttgaatgtgccttgtatctaaagctgtgggtcctggctcttaacaacaagcacaacccaaccaaggtatcaagtgaactgactaaaagtattcattttgcttaaatgtgtttctttcccatacacttacctctttatttgctataagccataaacatcgaaatggtgttttttaaagaatatgaagccttattttttaacttcttgaaataaaactaggtagtacctaaaatagcatgtacactatatttaaactattgcatataatagtaaatgaattcattagggatgtaactaatggtgaacattctttgaactaaaatgaaggtacatgatttgattgtttttcgaaatgttaatatataaacagacaaggagatatatatatgtaaagtcacattttatttatttagtaagtgatgactgcaccaaatgctacacagccatgcttggagtgatgcttgggatgtctatttaacaataccgcagggagactgcacaggccagaaaaagacagtttgcattcccttctgctccttaaaggtagaatgtagacatcttatttgtatatgtgttgatgccttcggaggatctgtggtttattgataactctttagtattgttactatgaagtagttatgatttccccagagacaattttgtttccattgccagtgctcttgtccaggttgttagacctcctatagcctctttaattaggctctctgcttcacttattgaaggctctaagtagcttcttgtttctgaattgtttgatgttttcagtgtttggagttacctatttctgaagacagtgactagttttctgttacctcactcctgatacggaagggagacagggaagtgctgggaggagaagggtgggtccctggcgagggctccacccccgggcctgtgcccacagacctaggtgaagacaggcactccagccttcacgtccaaatgttgcatttcccaagaccactttgacccgccacgcccccattctgtgcctataaaaaccccaagaccctagcaggaagacacacaagctggatgccgagagaaacacattggcgaaggaatacacaggtggatggacgtcgagaggaatgcactggtgtaggagcacactgggatgccagcaggccatcgactggtggaatgacacaaagtttggctggggcagttggagaagagttgggccaccaagcggccagactccaggggaaaaccatttcccttctggctgccccatctgctgagagctgcttccactcaataaaacctcgcactcattctccaagcccacatgtgatcctattcttctggtatgccaaagccaggatacagaaagccctctgtccttgccataaggcaggggtctaattgagctggttaacagaagccgcctatggacggctaaactaaaagagcatcctgtaacatatgcccactggggcttcagctgtaaacatttacccctagacactgccgtggggtcggcgcctcacagcccgcctgtctgtatgctcccctagaggtttgagcagcgggacactgaagaattgagccacacccccatcacacaccygcaagtgggacaagggaacctttcccatttcactgctgtgacagtgcaaagctattaaaatctgaattgcttagcaggcatgtaaggtcctctctgctctggtctcatttaatctttcaggttctatcttcaccttcatttctgcaggagaaacacatctctgtaccaaaagttcttcggtttggtcaccctttcccctgaaaaaaacgtattaagctctgtaagcataacttagataccattacactgtgaaaccttctcagttttccatagaatacatttctgtgttctgtctgttcctttgaaaacatttttttagtttgtattgtactatatgtggtgcagtgtgcaatgaactatatgtccctggcatatagttatccctgaattatgtggtgaatctataatattaagctaatatgttatgcttgatttctggggaccaagtagatgatcatttggaaaaatataccaccattgtgcatggcagaggaacttcatttggtaaagaattgtgtcacatggttataggttgtaagatactatctttttcctttccgtcttatmtttcttattatttattttttgagacagagtcttgctctgtcacccaggttggcatgtagtggtgccatcacggcttactgcagcctcaaactcctgggctcaggcatttctcccacctcagccttccaagtagctggggctacaggcatgcaccaccacactcagctaatttttaaattttttgtagagacrgggtttccctgtgttgcctaggctggtcttgaacttgygacctcargcaatcctcccaccttggcctcccaatagttttcatttttattgaaattatacactaacatagtttaaaggctttaatatttctttgtttgttaaaaaaaaaaaaaaactattcccagcattttgctctctagtggcaactacttgtacctccttgagccgagtactttgttgtttatatcctgtttttaggtatatactcatattactttatatttcagtttttaccaataactcttgattcatgacaatggatgatgacaacttagttctttcctacctagtcacactcttcctttatcctgttttgcttagatcaatgttgataaaatattcactgtttatattatgtgagcattattcacatgtggttacttttccttccttgcttgactacctccctccccaagttattctctcaccttttcccctctccctttctccctctgtgcccttccctacccactacatatatatacttgtcacaaattcaaccccagatgccttcacaattatctaaaagtcctcaaaagacattcagatgcataggttttatataaattttattttactttttatttttttgagacggagtttcgctcttgttgcgcaggctggagtgcagtggcgcgatctcaactcaccgcaacctccgccttctgggttcaagtgattctgctgcctcagcctcccaagtagctgagattacaggcatgcgccaccacgcctggctaattttctatttttagtagagatggggtttctccatgttggtcaggctggtctcaaactcccgatctcaggtcatccacccacctcagcctcccaaagtgctgggattacaggcgtgaaccaccgcgcccagcctgaattttatcttttttgaagaaatctctccccagagccatctgacctcttctggttttaacaggctacctgctaactctgtttatagctgtcataccggattctcgtgtcactgtcttttggggaattctctttactattctacatagaagttttgtttcctttatctttttcttgtttatgcccttattttgcagagtacatccctcagtaacttcctgaaaaaggattcttgggagataattttttagagacctcaagtatctgaaaagatctctattcttccctagcacttgattgatagtttgtctggtgtggaatttgtattggaaatcattttgaagacattgcttcagtgccagcttactcccactattgcttttgaaatctgaagcccgctgatttggggtttcttacacattacttttttttttctccctggaaacttgatgtgccaccttgtgtaggtcagttttcctccaatgtactgtgccttttcaatgtggaaactcatggcctggtaagttttaagttattttggacctcctctctgtttaccctttctggatcactctcactattcaaatctttgtccttcctatggtcctttaattgttgtatcttttctctcctatttgcagcctttcttctactttcttgggagatttcaactttatcttttattgagtttttgaaatcttttgtttgcttgcttttgtttttaattttcaaaagctactttttctcctctgaatgttattttgttttggctttattcttttttcataagtgcaatgtattctgtctctctggatattaataagtttattttgaaattctccctataatttctgttttctgtagttggctatcttctagtttgttttgatttttgatttttatgttagaaaagaaccatgttcctcagttatctgttccttagttagaaaggtctttcctctgagtcgctcatattccccagaagagactgcctggagggcgaaggccggcctgtgttctgggagctgagtggagaaagaaaactggggtcttactgtcctgcatgcataagctctttttcagtacagcacctctgccctcatccatgttaatgaccactggtgcagagaccctctgtttcarcttcttctgaaaataaatttcagactgtcaggatttctctttctgtgtaacaaattactgcaaatttagcagcccaaaacaatacacacatttagtatctcacagttactgtgggtcaggaatccaggcatagcttagctgagccctctgctcagggtctctcttggctgtagtcaaggagtcagctggcctgtgtcctcatctgtagctcttacaaggtcacatagttgttgacagaattcagttccttgcagctatgggactgaggcccaggcaactcctagaggccgctcatagttctctagcccttttcttaggtagtttatgtcataggagcttgcttcttcaaggctagcaggagactcttcagtcagttaagacttagtcctttttttgagatggagtttcactctgtcactcacctaggccggagtgcagtggtgcaatctcggctcactgcagcctcaacttcctagggctcaggtgatcctcccgccttagcctcccgagtaactgcgatgacaggtgcatgccaccatgcccggctgtgttttgtatttttttagagatgaggtctcacaatgttgcccatgctggtccctaactcctgggctcaagcagtctgcctgcctcggacttccaaagtgctggctcacacctgtgagcacttggctggaataggacatgtttgtaagtcagcacccttctctgtttggggataatgctttggacttcttggtattaaatgactgtttgaatcattttagaaaccaactgataccaacatgaagtagcatatgactctgccgtctgttaacttacaagccagtttcgtgcctgaccagtggccaccagtatttgcttaccagtcattctaggcttgttacgtttaggtagctgtgaaatgtcccacatcagccctccatctgtgggcctctttagctgctgctgctgctgcagcatctagccttttgaaagctattgtctactgctcagctagaagggtgtgtgtagacagcaggaccaaggattcgcctgggtgaaagagttggcaatgagaaagcaaccagaccctcccctccaagcccagccctgtatttgacatgcagggcataacctcactcattcagtctctcagccctatgcaaatataaacagccttcctcttgtctctccaggccagccggggccaagaaagaagccagtgattcccccaagtgcagtaaatagctctcctcacctcctgaccctgttatttcctggtagttctgagttgtggatcctgcagtggagagggagggaacaaagaagytgcagaggcctcagcttcacagagcattgagcagtgggtgatattgtatcctcaggcaggggttgacctcacatttcagtgcaggtcattctaatgactgctggacctcccagtgccactgtgaactagaatggaatagagtgaagtggatctgaattcctggactgtgggaccaacctaacttctgagctggagaaagtaggtctcatgttctatacctgcttttttttagctctagggggaaaaaagaattgtgcatctttcttgttctctttgcagcttaggggcataacgtttggactgtaattgaactgatgcttgtttccccaaaatgtctttggttttcattaaggtgggggattctctgcatttttggagttgtcacwttatcgaaattcctctccacactaagtactgtgtgtggtatgcttttattttcacctaattgatttctgcaaataaagtgatttaatttttggtattaagaaatttaaataacaccttttggcagatcacaagattttcttgttcttatttaatcctggcttccatccaaatgtgaaagagaaatgaaataataaggtaggaaaggcagaccagtaattgtgattaaacaacttttgtgttgagtccaaagacaggtaactttattttaagcttcatgggtgtagtaaaaatatatcaccttaagaaaacctggattgccattagccagaactgacttccaggctttctgactttgtacaaacaaatcacttaatcctgaatccttctcctcatcttttttttttttctctttgtttgtttttaaatgtatttctttattttgtattactttcttcttgtcttttttatattttatgtattttattttcctcatctttaaaatggataaatgttacctttcctgattcaaagattctaggcaaagatcaaaagaagtcaaagtttgtgaaggaactttgaaaattatatatttctctgcaattgtgttagggtacttttctttctttgatttatgttggttcttggagtgatactttagatgtacaaatagtaggtcagaacaaacctgtatgtaataaattctggagaattgagttcaaactttggttttgcttatatttggataaattatcatcaactttgttgaggtgtaatttatacacaattaaattcacccatttcaaatcttccatgtgttttgactgtttagataaattgacaaataattatcttagataacagttggtatttctacattaaagaagggagaaagagcaccctcttttggcaaaagtttctcctgtgtgggctctccggtccccctgtctcatttcaaaatcagatttgcatcctgctgttggagtacacttgagccctttcatttatactggtgcaggttttgtagtctcttagagattcagtatgtcagtcccatgtctgagagcaaaggagaaggaagagggtaggaaagagcacctgaattgaatagagaggagggagcagagaaggcagaacagtgagatagtatccatttagtctgagtatttccaaattttccaataaaatgtcagtggaagcttttatcataaggccaaaatctgtccttcaatgtgaccacagagccacaggagacccaaaccccttgtagtcactgatgattttcattgggctatagatgggaatggcagcagtcataaatatttcctatgaatgagtgttctagatattttttacccaaagatgtagcatatcagtgggtcactattgaaaacatgtttggaatgaagcaggaaaataagtcaaaagatctcccctcagttcctaagcaactttgttgtaaaaataactgtgaaaactgggcttaaatgaaacayacattcgaatgcctggagtaagaattattgatagcccagacttagtatcccccccacctttccaagtccttaaagcattggctttctactcagaaacgctgcttaccctagggtgaccatagttacttttattttttatttttatttatttatttatttttagatggagtctccctctgttgcttaggctggagtgcagtgacacgatctcrctcactgcaacccccacctcctgggttcaagctattctcctgcctcagcctcctgagtagctgggactacaggcgcccactaacacacccggctaatttttgaatttttattagagatggggtttcaccatattggccaggctggtctcgatctcctgaccttgtgatccgcctgcctcagcctcccaaagtgctgggattatagccatgagtcaccatgcctggccacttttactttctcttattactttactttctacattaataggtagattagattccatctcttctacctttattttgtccttcagaatagaaattgggaagtaaacacagtgttgttttttttttttaatctcaataattggaatctgtttgaaggagaaaatcccctgcatctcatcctgcaagtataaccactattaagttcgggtatatttatatcttacaaaaatgtttgttttgcatactgttgtggaacttgtttctttcaatccttctggatttctttccttgcttagtatgtatacctcattcttatttaagagctgtacagtatactgtcatatggttgtactccaatgaacctatctcctgtcagtaagttagctcattccaaatttttttcatcatatataagtaagagtctccaaaatatccttatactatagtcacatgcacgtgtccagttatttccttagggtaagttccaagaagcagaatttctatatcaaagtgtttactggaaatttttgccattctgataggtaaaagtaccagagtgtttaacttgtatttctttgagtctaagtaagattgtgcatctgtttatttgccatatgtttattttccacttttgagaactgcctgtgtactttatccattattattatttaaattagtcaagatattagcccttaatcatgaactgaaaataccccctccaacctttttataaactttatggtatccttttttttttttaaggattttcaatttttatgtagtcagatctgttggtcttttcctgtgtgtgtgtgtgtgtgtgtgtgtgtgttaacttcagtgatgtctcagttttggtcattcctgcactcctgcctgccccctcaccccaaggtgacttgtgagatgagagttcaaatacaagtagtttatttccaggtacaaagaacaaagggaagctaaggaagaaaagatagtcaataaaagatgtctcatctgggcttagtggctcatgcctataatcccagcactttgggaggctgaggcagtcggagattgcttgagctcaggggttcgagaccagcccaggcaatatagtgagaccctgtgtcaaaaaaaaaaaaaaaaagatgtcttattaagccaamccccacagggaaaattgcctgtgtggaaactgggaaattgggcagaacacttgcctcagaatgatcccgcccaaattatcagttattcattgagggctgctcttggggggagtgttccagttatttattgctacataacaaaatattctaaacaaaaaccactattttttattatgattataatctttcatagatatagagtttggggctgggctcagctggttggttcctactgaagctttctaatgcagttacaggggctaggactggagtcatgtgaagccttcctcacttttacatgtctggttttccacctgggctgggaaggcctacagctgagggctgtaacaccttgggcttcttggctaattctcattcttgatgtggtctcttcacacggtctctgcagtactaggcttcttatgtgatgtttagagtttccaaggcacatagaaagggagagacagacagctgcaggatgagatggggggccggggggaccatagctccttttttaaaaaaaggagccagttgtgaagtcacacttatatcactttagacttaaatatcaccagcccatattcagagggaggggaattagactctgcctctttgagcagtttcaaacaatctgtggacggtgttgtaaaactgccacagggagttaatttacctctatttctgcctattgctatgggcagagcagctttaagcacagaggcgcagataggggtagctagaacttggccacagcacaccagaatcctaagggatgtgttggtgaggcactgacagcttctgctatagtttatcagtgagctcaggagttcaagtggcttctcttatttccaaaactataaaactgttcacttatattttcttcaagttcctatttaaaattctttttttattttatttttattttattttattgatcattcttgggtgtttctcgcagaggggtatttggcagggtcataggacaatagtggagggaaggtcagcagataaacaagtgaacaaaggtctctggttttcctaggcagaggaccctgcgggccttccgcagtgtttgtgtccctgggtacttgagattagggagtggtgatgattcttaacgagcatgctgccttcaagcatctgtttaacaaagcacatcttgcaccgcccttaatccatttaaccctgagtggacacagcacatgtttcagagggcacagggttgggggtaaggtcacagatcaacaggatcccaaggcagaagaatttttcttagtacagaacaaaatgaaaagtgtcccatgtctacctctttctacacagacacggcaaccatccgatttctcaatcttttccccgcctttcccctctttctattccacaaaaccgccattgtcatcatggcccgttctcaatgagctgttgggtacacctcccagacggggtggtggccgggcagaggggctcctcacttcccagtaggggcggccgggcagaggcgcccctcacctcccggactgggtggctggccgggcggggggtgaccccccccacctccctcccggacagggcggctggccgggcagaggagctcctcacttctcagtaggggcggcagggcagaggcgcccctcacctcccggacggggtggctggccgggcggggggctgacccccccacacctccctcccggacagggcggctggccgggcagaggagctcctcacttctcagtaggggcggcagggcagaggcgcccctcacctcccggacggggcggctggcctggcgggggctgacccccacctccctctcggacggggtggctgccgggcggagacactcctcacttcccagacggggtggctgccgggcagagaggctcctcacttctcagacggggcggttgccaggcggagggtctcctcgcttctcagatggggcggccgggcagagacactcctcacctcccagacggggtcgcggccgggtagaggtgctcctcacatcccagacggggcggcggggcacaggcgctccccacatctcagatgatgggcggccgggcagagacactcctcacttcctagatgggatggcggccgggaagaggcgctcctcacttcctagatgggatggcggcggggcagagacgctcctcactttccagactgggcagccaggcagaggggctcctcacgtcccagacgatgggcggccaggcagagacgctcctcacttcccagacagggtggcggccgggcagaggctgcaatctcggcactttgggaggccaaggcaggcgggtgggaggtggaggttgtagccagccgagatcacgccactgcgctccagcctgggcaccattgagcactgagtgaaccagactccgtctgcaatcccggcacctcgggaggccgaggctgacaaatcactcgctgttaggagctggagaccagcccggccaacacagcgaaaccccgtctccaccaaaaaaatacgaaaaccagtcaggcgtggcggcgcgcgcctgcaatcacaggcactcggcaggctgaggcaggagaatcaggcagggaggttgcagtgagccgagatggcagcagtacagtccagcttcggctcggcatcagagggagaccgtggaaagaggggagggggagggggagagggagagggagaggcctatttaaaattcttagtttaacttttgttttttaatgtctgggagtaagaatcaagcacttattttaatggttaaccaattacaccaaaatactttaaaaataatctgcccagtggttctcaaactctttggtttcaggaccccattacactcttaaaatttatttcaggccccagcagcttttgattatatggttaacagttatggatttttaccatattcacaattaaaacaattatttaaaacatctatgattgattttaaaataacaaaaaacatattaatataaataacattttaaatgaaaactgtttttcaaaattaaacagcctaggctgggcgcagtggctcgtgcctgtaattccagcactttgggaggccaaggcaggtggatcatgaggtcaggagatcgagaccatcctggctaacatggtgacaccccgtctctactaaaaatacaaaaattagtcgggcgtggtggcgcatgcctgtagtcccagctactcaggaggctgaggcaggagaattgcttgaacctgggaggcagaggttgcagtgagcctagatcacgccactgcactccagcctgggcaacagagcgagactccatctcaaaaaaaaaaaaattaacctagaagactggtactatttcacatatttgcagatgactttaatgtctgacttcttagcagacaggtagattttcatacctgcttctgcattcaggctgtggccctctcacacctggtgtagattcaggaaaatctcacagtacaaatgtgagaaaatgggagtaaaaatggtaagtcatgttttagatttatgaaaatagttttgactttatggggctcccttgaaagggtcttgggagaactgcctagtttttccctgatgatgtaaatgctaccttcagctgaaggcatctttatccttcaaattcacatgagctctgtactgagggaaggtacagggagccggacctaggatgagagaccccatggccctgggagggtgcaggtggaggttgaggttgaagcagcagcaaaattgtcagaattaggcagtcgggcgcggtggctcacgcctgtaatcccagcactttggggaggctgaggcaggcagatcatgagatcaggagttcgagaccagcctgaccaacatggtgacaccccgtctctactaaaaatacaaaaattaggcaggcatggtggcgtgtgcctgtaatcccagctactcgggaggctgaggcaggagaatcacttgaacccgggaggcggaggttgcagtgagccaagatggcaccactgcactccagcctgggcgacagagcgagactccgtctcaagaaaaaaaaataagagaccggcaggagagtttcaggctgattgaccagtgcagggaggtgttctgattccttcataaatagggtaaccatataacatgcaagttggaacacttttgaaagcaaaagtgggcaacaaaaaactgaaaattattattaccagataaaggttttgccaaacaataaaataatagattcatatcacacagtgagcaaaaaatcactgtgcaagactgttcacacaactctgctttgtagcaagttattgaagtctgtttcttgaactctgtacttgtgtcacttcccatgcttcccactgacctagcagccccctgactgccccacctggagtttgagattggcagcagttgcagtgtggaagctgcataaggagctgagtgtaatgggagacctttagctaaaattaatttcgtaatcaaagatgtgtgccagaatcttttcttagaattgagtaaaacctgataagctcctttaagagaatcttggtatccttttaaaactttctttgtgacactcttgcttttggggatcagcactaaatgtgtggagggtagaggtgttaacaatacgttctcccctcaaaaagtctgaacaagatgctctgcttttcccccagctgactctcacttatgcacaatatagttaatcatcccaatagaagagtcagttgtgccctgtgaactgaagaaccaggactaataacccgttggtatttactcattcaaatagcagttttgtgtatggtagcataagcattgcaactgaagaatctggactccaccataaggcagattccagacacccaagctctggattctttagtgggaatagaggagtcatcaccacacacacacagcattggattctgtcctgactcgttttttctaacttcttgggcgaaagggcagattagaattgttccaactcaggcttgtataattcctgcagaaaagacctattgttggatccacctttatcctgacttacctacatgtttaatcttatagaggaaaatggctttcaagacacaagggatactgatcttactttaattctaatcactgccgtacccccaacccctgcttctttcaggcacttggcattgaactagttttgtcattttacttgcttgccacctacccccacgactaccctgacaggccagaagggaaagtgcggttccttagctcactgtactaataastcctcattcagccatccctagttaagagtgaccccctaatgtccacattttttaggtctgctcttcttttgtcatccctaccagagtaacttaaccctttacttacaagttacttggaagtagttttcttttaaaaacagtgtcatctaatttttttcaatattggaatgtaaatttccagatgtgctggactgtccctagagcagcagcatatacagtaagacctacgattgaatgactaactgggcaagattgagcttttgtgatgttttaattattttacctaatatggaaacactgttgtataatcccaaacagtagtacatatttgatcatctaattaaatattggtaactgttagtgtgccaagtcctgtagtatgtgtgggaaattactaccccctagagacttaaattcggatgtacaaaagattgtatccaaatgactatagcagtctgtgtaaatacccagacaaatctattctcttcctggtttggaacaaattttaaaaatgaactctatagcttccataggccacaaatcatccttgtgcgtcacaaaaagttatgtcaaaaattccttcggaagtttatctactttatgctagaggaagacagtaggcaccatttcctcagtgttgttgttacaagacttttggagggctttgttagaaggccattaaatggccacactgttggagatcttaagtgcctgggatagtctccttcccatagttaggaagatataccccctatttagccccaccgtgttccagtataacttccttgatacagtggataccactaatgtgaattttttttgagacggagtctcgctctgtcgcccaggctggagygcagtggcgtgatctcatctcactgcagcctccgcctcccaggttcaagcgattctcctgcctcacccttctgagtagctgggattacaggcgctcgccaccacgcccagctaatttttgtgtttttagtagagacggggtttcactgtgttggccaggatggtctctatctctagacctcgtgatctgcccgctttggcctcccaaagtgctgggattacaggcgtgagccactgtgcccagccaaatatgtgaattcttgtgtgtgggtactagtttttctggggagccctttaggttggctctaggtctgcaagttctttccaagggatagttaacctgaatggtacattcctcacagaaccagaactcttcctttcctcttcccctcaccttaggtgaggaagccttctaacttagttattaggactatggcagtggtcgccctgctttttaatagcacttacaaaatcgtgtcactaccctgttagtttctttagtaaagttttctcatttttcaagttccttctgccactcgcttttaggttacaaaaggttactgttttatgaaggggtgctgagggtaagaatgtaccaagtagatctcatggagaaggcagctttcacccagtatctctggtagattgctaccttcatagcttatcttctctatgaatttcttagcaatagaagagtaaatcaggagtggatttttagtagtgtgtttgtcatagggaatgtagatgtaattggatttttttttcatataagcattttgtaaattcagttttgggttttttgttttttgtttcttgtttttgttttttgtcttaatagagctaggcattaccagggttgatgcatatttattactgcaaagagttgtagacaagggaggagggagctaaataatattaatggtaatttaaatctagaaaatcagaactgtggctcactactgtaatgtcagtgctttcagaggccaagcagaagtatcgcttgagcccaggagttcaagaccagtctgggtaacctagcaagaccctgtctctaaaaaaaatttaaaaattagccaggtgtggtgatgcacgcctgtaatcctagcaactcaggaggctgagatggaaggatcacttgagccagctgtgattgagccactgcactccagcttgagcaacagagtgagacactgtctcaaagaaagaaacagttggtattcattgctcttaataatcctctgtagctggcttctcaaactttaatgtgcataagaatcatttgttaacatgcacattgatwgggtctgaggtggagtctgatgtctgcatttctaacaaactcccaggggatggatgccgatgttgcttgtccagaggcggcactttgaatatcagtctacagaacattcagggtatatgcaaattaacttttaataataacaacagcaaccatatatattgatccttttttggtgtaccaggcacagaaaaataaaataagactgggcactggagtctaacagctgggattcagattgaagctcttccctttactagcttaaccctgagcaaattttctctaaggcagggtttctcagccttggcactgttgacattgtaggctgagatcattctttgtgggggctgtctggtgcattgtaggatgtttagcaacatccctggcctctatccaccagatgccattagcacctccctcccgtttgtggcattcagaatgactgcaagcattgccaaacgtcagggggtggggtrggaggcaaaattacttccagttgagaaccactgctctaagactactgttgaaatatgggtgtttgggggggtttgtgatatgaatgatgtactttatgtaagtgacatagaagcttatcatgaagcttccacagacaaaaggagaataggcatgcagtagctaataagcagtccgtgccacatctggctttctgaggatgatgataaagcttattccaagtgccagttctttatttttacgaaacattagtcattgtactatgagataatatcaggaattacttgagatttttaaataggtagaactgagtttctaattcagttgatcccaagcctctgcccttttttgaaatacgctggcactgttgctaccctgcccctgcctctgccccttccttcattcttacttctgctgctgtccgcatgtctctttttcccccctactctttaaagttttatttcactaacttgaggtcaaatgtcacaactgtgttctggtcaatttactatccttgcttggcttccccaaatggtagtaccagaagatttgtggggtagggagaagagaccactttaagacgcactacatttactcatcttccacaaggcaacagagttgggcatctgattattcaacaaaacaaagcttcagtagcacccaggagggcagacaggcaaaccaggctgtagacacactgcatttgtcaaaatcagaccagagaaaacctactccccacagattaaaaggtagcgatagtcatcatttctttttctgttgccacaacgtttttcttcttttaattattatcatgtagttgtctcaagtccttcctttagtccagggttccccaaagcctgggccacagaccccgtactggtccctggcccattaggaaccacgcacataacagatgagcagtgggtgggcaggccggccagctgagygaagctccatctgtatttacagccactgcccatggcttgcattactgcctgagctccgcctcctgtcagctcagatcagcaatggcattaggttctcataggcacaygcaaaccctattgtgaactgctcatgtgagggatctaggttgcgtgctccttatgagaatctaatgcctgatgatctgctactgtcacccatcacccccacatgggactgtctagttgcaggaaaacaagctcgggggctccccactgattstacattatggtgagttgtataattatttcattctatatcacaatgtaatactaatagaaatagagtgcacaataaatacaatgcacttgaatcatcccaaaccatcccaccccccatctgtggaaaaattgtcttccacaaaagcagcccctggtgcagaaaaggttgtggactgctgctttagtccatctcctatgattgcacaggtaagctgcaaatgccaaggacttgatgagctcagttcaccccttgccaacaatgtatcagttcctgagagaatgagttcctgaagtcttgctgttagcaactataagtagagggactgcttggttttctatatcctagttattttatgaagttaagttttagtttcttccatccttccacatctagagtccacaacaaatacaatgccatctgtgcatctggcatatgacttccacagtggccttactttgtcctaaacacctacatcccagaagtgaaaagggactgttttagaatttgccaagattaccttaattttctccgtgttaaatcttttggtaggtacagtatttacaaattcatgagctgcagcctgtataagacagttgtcttgctagcacagtacaaacccaggaaaacagtgtggaaagactgaaatgaaggccgactggacaggatagaagtgtggtctgatagtccatttcccaatttcccactgcaaataaatgtcccaaattgaaatgctttcttcttgctttagaacttctcttcgtaggtgatycagctataagactaaccatccttcccttctcttcactcagcgtctgtcctagcatctggggaggtgctctgatacctgtccgtgggcaccagggaggcctgggccgcggcggaggacagggcaccaggtgggtgctgtgtgccgggctgctctaacagtgctcgcccagcagtccgcaagtctgtttctagcacgcttatcttcctatcttcccagcctctcatcctttcactttttttctagggtatgacagcagataactaagccttctaaaattatgcctagaataatatctgaactatggtttatgtgtttgtaggcaagggtcctgtctcccaataaaaaatgtaaaaattcatttgatagaaagatacttttaaaaaattgattctggccaggcacagtggctcacgcctgtgaatctcagcactttgggaggcccaggtgggaggatcacttgagcccaagaatttgagaccagcctatgcaacctggtgagagcctgtctctatgaaaaatgtaaaaattaggctgggcgcagtggctcacgcctgtaatcccagcactttgggaggctgaggcgggcggatcacctgaggtcaggatttcgagaccagcctggccaacatggtgaaaccccatctctactaaaaatacaaaaattagctgggtgtggtggcggatgcctgtaatcccagctactcaggaggctgaggcaggagaattgcttgaacctgggaggcagaggttgcagtgagccaagatggcaccactgcactctagcctggatgacacaagcgaagctctgtcttaaaaataataataatggataaaattttttaaaaattagctgggcatggtggcatgtgcctttagtcccagctactagggaggctgaggtgggagaatcacttgagcccaggaagtcaaggctactgtgagctgagatcacattgtgctccagcctgggtgacacagcragactgtgactcgaaaaatatcctaaatttcactttgcttcaggatgttctttaaaagaaatcaataatgtcatttgaaaattgaaatgcagatttggtttctgaccattgaaatggaagagcagcagagtagtctgtaataagtctgtactgagaatgggaatggggaaagactcacaaaaacatgattttaaaacaaaaagaaaacatgaatgttactttgtggagttaccctggaagattttaagtcagtccagggaacacaacagattctagtaagactgtgctaatgacagtctttgacagttggtttgttaatacctcaaatgatttgtagtacagtttatactgtgcagatgctgtttaagactgtatatgtgtaaagcaaaagttactaccagttgatagttttttactttgtatacttatcaatataatattgaggcataagatatgtagccacgctgtccagtggtcattagggggaaaatgtctccaggattgtaggaaaagctgtcagaagtgagtccttgttaattgcgtttattcaatggagagtttcctatcagttaacagacacagcttcctgtatgacagaagtgtcgtggctcatggccatccccgctcctattgtttacatacctgtgtgaagtcagaatcctttatagaaagaagaaaatattgtgttaaagtagaaattactcatttttcttaaaatctgtatcagagtaatatttattttgattagaagaaaaaactatgttatctttttctttttgccttgtatgtatttgcttatattttgaaaagtgcttttagttacaaataaaccttaaacctctgtgtagaaaaatgtgaaaggtataggcatggtctcttcacttcctcagttacatcctctcatgcagaggttctaatcacagttaaatttcaatgtcttcaaacacggataagtgggtttttttaaaaaggcacagtcttatacttatttctgtaaccccaatcatactttggttggctggttttaaaaaatcatgttacacaaaactgagatgacccagtttagagaatcccaattaaaataagtgctcaggtgaagacagggtagacttaatgcaaaattatgaaatgtacttttctgctcccattgtgtccggaattggtgggttcttggtctcactgacttcaagaatgaagccgcggaccctcacggtgagtgttaacagttcttaaagatggtgtatccggagtttgttccttctgatgttcggacgtgttcagagtttcttccttctggtgggttcgtggtctcgctggcttcaggagtgaagctgcagaccttcgtggtgagtgttacagcttttaaggcagcacgtctggagctgttcgttcctcccgtccggagttgtttattccttctggtgggttcgtggttttgctggcctcaggagtgaagctgcagaccttcgcggtgagtgttacagctcacaaaggcagtgcggacccaaagagtgagcagcagcaagatttattgcaaggagtgaaagaacaaagcttccacagtgtcaaagggggcctgagcaggttgccactgctggctctggcagcctgctttttattcctttatctggccccacccacatgttactgattggtgcattttacagagagctgattggttttacagagagctgattggtctgctttgacagggtgctgattggtgcgtttacaatctctgagctagacacaaaagttctccaagtccccactagattagctccacacagagcactgattggtgcatttacaaacctttagctagacacagaatgctgattggtacatttacaatcctccagctagacgtaaaagttctccaagtccccacttaactcaggagcccagttggctttgcctagtggatcctgtgccggggctgcgggcggagctgcccgccagtcccgcactgtgcgcccacactcctcaacccttgggcaggcgatgggaccgggagccgcggagcagggggtggtccccatcggggaggctcargccacgtgggagcccactgcaggggtggaggggaggctcgggcctggcaggctgcacgtctcaagccctgccccacggggaggcagctgaggcctggcgagaatttgagcctgttgctggcaggctggcactgctgggggaccaggcgcaccctctgcagctgctggctggggtgctaagcccctcactgcctggggccagtggcgccggccggctgctccgagtgcggggctgccaagtccacgcccacccggaactctcgctgttccatgagcactgcgcgcagccccagttcccacccgcgcctctccctccacacctccctgcaaacagagggagccagctccagcctcagccagcacagagaggggctcccacagtgcagcagggggctgaagggctcctcaagcgcggccagagtgggcaccaaggctgaggaggcaccaagagcgagcgagggctgccagcatgctgtcacctctccccatcttttctttagtatcaatttcaaccctccttttcccaattcaggattttccatactctaatcatttggattaataatttaaattacataccattctatggtacacttcaaccagtatttaaaattaaagttgtatttcttgttgtggaaccaaaagtatcttctggaggagacaggagattattaaagggtgtacttaggtgacctgagggcaaacctggtcagtcattttatcgagaaataggtgggatgcttgaacagcctcaagtaaagctgagtcttactccctattcttctgacactggccttcttatagagttgttaatattgtcctccacccctggggatgggactgcctgcccactttgtagaccagcagatcctaacttttccaatgagaacttaggaaacaaataaaattgtacgcccctgcatcagaatttttctgttttattctctgattaagaaagtacacatgataaaaagctacctgaattcatccaatagcagctttaagtgactatctaaaacttgatattcagggctgagcatggtggctcacacctgtaatcccagcactttggcaggctgaggcrgtcggatcacaaggtcaggagtttgagaccggtctagccaatatggtgaaaccccagctctactaaaaatacaaaaattagctgggcatggcggcgcacacctgtagtcccagctgctccagaggctgaggcaggagaatcgcttgaacccacgagggggaggttgcagtgagctgagatcatgccactgcactccaacctgggtgacagatctcaaaaaaaaaaaaaaaaaaagtttgatattcaggtaacaatgcttggtcttttccagtggattctcaagaccattcacagtaattcctgagggcccacaggttagggatccctcactactgcattttcttcagggtcaactacatttgatattatttcacttagcatttaattattttcatgttatattgcacctttattctccagttttgaagtttaatacaagtgtaatacgttttttgtcattatgtagttgtacttgatttcttttctgttttgtctacttttttctgaactttcaaaaaaattaacacctaaattgcaaacagattacagagagatagcaatcttaattggatttctggttatatcacaggtgataagctatcacaggtgacaaactgtaaaatgttcaaacttatgctcctaactggttgtcccactagtaacctgtagcagtggttcccaaatgcaaactacctgcttaaaggtcattgttgtgggtggggcacttaaatatatggattcttgggtcccctctagatattctcaatcatcgggcctggggtggggtctagaaatctttagtctttaaagttccatcgattattttgatgcacagtgaaatttgggaatcaccaattttctgtacaatccataaatctgcatgtagtgacatactggtaaacctttattttttttgtatactaaaggaccagcagaattgggcccatgccaacatgtcacctctagggcctagactgccctcacttttgtttttttctaggttggtttcttagcactaccaagttgaacatgaacagtacgactcctgcctctaggaggcagcttggaatattgtcagtactggattttagagagcctggcttctgtgaatgaactcttggccttggttcctcatctgtaaaaagattttagagtagccttttgcctttaagtgtttaccataaactagataaaagagcattcccctttatctgcaacccctgtatyrgtgttattttcatatatagtccacttttcattaactgcactccaggtgtcatagctgtatcagccagtgtctctagactttcttcagtttgctataacaaagtaccatgaattggatggcttataaacaacagaagtttatttctcacagttctggaggctagaaatatgagatcaaggtgctggcagcttcaggtctggtgaggatgcgtttcttggtttccagacaactgtcttcttgctgtatcctcatatggtagagaaaagttagagagcttttgaggttctctttaagaacactaatccttttcatgaggatttctaccccctaacccagtaccttcaaaggctccacctcctaataccgtcacattgaggattaggatttcaacataaaagtttcgaggggatgcaaacatgtaggcaggtaggcaaacttatgatgaccaagaaccggttctaacctcaggaaatgaagcaataatggtaatatcatttcactggagaagtttctgcctgtttccagagggagagggctgattaagagctctccctacattccaccttgtgaaaattgccatcagatatcgtgtaaaactatgaagtcatcttttttaaacacaaagtatgacttcatggtgtagacaatgtttaaaaaatctctggccgggtgcgatggctcacacctataatcccagcactctgggaggccgaggcgggcggatcacctgaggtcgggagttcaagaccagcctgaccaacatggtgaaaccccatctatactaaaaatacaaaattagccaggcataatggcgcatgcctgtagtcccagttactcaggaggctgaggcaagagaatcgcttgaacccgggaggcggaggttgcattgagccgagatcgtgccattgcactccagcctgggcaacaagagcaaaactccgccttaaaaaacaaacaaaaaaaacmaaacaaacaaaaaaactctctctgtatctaaaacaaactttttggtggcttacacttataatcccagcactctgggaggctgaggtaggaggattgcttgagcccaggagttcaagaccagcctgggcaacatagagagacccccatctacacaaattaaatagaaaacattagccaggtatggtggtgcatgcctgtagtctcggctactcaggtggctaaggtgggaggatcacttgagcctagaagtcaaggctacagtgacccgagatcatgccactcactgcattccagcctgggtagcagatcaagactctgtttcaaaaataaaaaataaaacaagtttttaatagtttttggtaatacccatcacaaagagatattaaagaattaataataatggtgatcactgccgtttaatgagagatacccatgggtgtgttgctctacagtttccttctttctctcacttaattctgaaaacattcctgtgaggtggacagtgtccgagctctttctgcctcttggccagtttgggccctgttcttcccattacccgctattcggttgcccatattttctccctccttttttgccatgtcatgttttcttccccaacttgtattctcctctgcttttcctttgtaataagctcattcccctaacctgttgcatctctcacaccaaatttcagaccaaaagaaaaacctgtgatgggtttggggaaagtataggcccatgggtaggctttttattccctccctcttcatctcttctgtctcttaaatgaaggcatcagactttgtaaccagttagcagagggcatcttgaaggagtttgtcttgttcagcatcaaaacccctgacatttaaccctctgcctagtacatgggcattcagtaagtgagtgaataaatccaattcacatcgtacatttatttaaaagagtagttttgctgggtgcggtggcactctagaagccaacacaatgctttagaatggtattgtggccaaattatggtgtacccaagtgtatgtaacagtgatttatgataacagctaacagggttggaggaatgtctcaagtattagtatttagagaacccaattatagaatacacattgaaatgaaaattgaataacctgtaactggatacttaccattctcctcccacctaacatggacatactttttacattataaaccatctattagattcttttaaaggtgagattatggagatagaagagcaaggaagagccagttagtgggtcagaaaatgaaacttctgtgcttaaaatggtcataagtgatgtagctgtgagcaaaaactgctcgcatttgtcactaatttcgcttctaggtgctgagatgtgtttcccattttaagtattgtttacactttcctacgtgtccaggagagttttgagaattgaggaaagtttcctgcttattcgtagctaggtaggcttagaatggttttaacattcttttatcatccagtttgcttgaccaatggctatgggtttgttgcagttctgcatccgtttctgtacttgttttgtaaagagaatccacacagtaaacaaaagagaggagagaggtaatctttccatctcttttaatacactgtaaaaattgggatagtgccaccatctgcttatttgttgacgtattattcacagtgctggtcccaaaggcgataacatctatgaatggagatcaaccattctagggcctccaggatccgtgtatgagggtggtgtattctttctcgatatcacttttacaccagaatatcccttcaagcctccaaaggtaagaaatctccctgtatgctcaaatttactaattcccacaagagagcaactgttgaggtttttctaaatttaatttttaatcacagaaactagatttatcttatgtcctaatagatctgagtattttaacatatacaaaacacttctttaggttgattttgccttatctggcagagaccattctaggattaagtgctttgttttgatggtgcttaaaattgtgctatttatagtaatattgtcagcaacctagaattaatcccctgttttccagcccatagagaaatgtttttgaacctttctcgaggttaaaaatggtgtcaagccaggtgcagtggtgtgcacctgtagtccagctacttgggaggattgtttgagcccaagagtttgagtccagtctgggcaacaaagcaagaccccaaaaaaaggcagggcaggtcagggggccaaacaactagagaatcagaatctcttcccaaagctttggattctgttgtgctccctgtcatgttttggtcttgttcctttacctccaggcctcagttttctttctaggacaggtgaggattgcccaagtcacccatctcctgtactcaatctatgattctcattcagtcagaaagaaaaccccgtcttggggattaggtagactgccagataaaagtacaactgcagcaacaagaagtaatcgaaagtcacttttttaaaaaattggtaaaattacaggtaatttttactttgtgttttggtatatttcacaaataaaaattaagagacccaaataacaccagcttatgtgacttgtgttctgctgtggtccttgcccattactggctctgcatccatggacactcgattatataatagtaaattctgtgatgtaggtagacaggatgtctataggacctgatgtaacggtcagaaaaaagcagaaatagacttctcttcaaattttgttcagccttttgggtgtagtcattgtttgctaagtatgttgtttaattatctttatgtacccmttatgttgcacttcagtttttaagaggtatttatgattctcagtattttaaagcttactttgaggcagtgtagtactaccagctaacacaagaggtcagcaaacaattagctattcaaacttggaaatgttaatatttaaaagatttaaaattgctaaagatgaaattaggaagtactgaacttaccgtcagtggacataacattttaaatgaaattgacacagtccctgagatggtatcaatgaacactttctaatcaaatttattgtctatcttcttgacagctttaattaaaactgcttttagtcaccttcttaagggtcattcagttgaatatttagtaacaagtttgtttgctgtttaaatattgtctgtcacttgttttttttaggttacatttcggacaagaatctatcattgtaatattaacagtcaaggtgttatttgcttggacatattgaaagataattggagtccagcactaaccatttctaaagtcctcctttctatctgctcacttcttacagactgtaatcctggtaaggttcataattctttaccttgttttattcttccttacctgaaaaatacttgtttccaaaagctttcaaaggacaaaactaatttttctgcacaagtttgtgaatacaaaaactaatcggcttttcaaaagaaagttttaatcaagttcagtctactagttgagacacacaacttcattaatcagtatattctagcaacaaggtattttaaactgaagactgacgtaagtttgccttgggcttttagtttcaattattcttcctcctttttttttcctgttgcttaatttcccatagagttcttataaaacaaatcagacacttctaaatgtcgagtcatctgcctggcaagcctcacctgtgcctctggggttcagtgagcatgtgtcccatagctggtcactgagatggcactcaattttgaaaatggtagttgttaaatacttagtgactattgaattgtgacttttttgggacttcatttcatttaaaaaatatttttctgtagtcacagctactagggtggctgaggtgtcaggattgtttgaacccagaaggtcaaagctgcagtgagccatgagcatgtcactgcactgcattccagcctgggtggcaaagcgagaccctgtctcaaaaaatatatatatatacacatatgtatatatatacacacccacagacaaatatattttctaggtaaaccaaatataaatttattaaagatcctaagattcagagaaatactatacttaattggaggtccaggttttgcctggcaacctggctctttaaccagcgtaaaggttaatagtgttgcactgcaacagccccgaagacttcacagtattcacaatgccgttaactggtgacattgagctaagggtcacatgaacacagctggatgttcattgcagtctgaagccttgaccgttccagtctctactgaactcagcctaacacataagagtaaagaaactccaattgagtgttgtttgttgggagaaaaatggaatgaactaagataaagacagaccagtacactaaagcctaagcattccctcttcccccaacgttatgtttttttgaaattttgatggaaaaatatccagcatggtggagtggtgtttcgaagatgggtttgatcacacatactttgtcgtacgtatctacccaagctgtcactattcgctaaagtttaaaatgttcttttcctttctccaaagtaatctacattcttttcttccagccgaccccttggtgggaagtattgccactcagtatatgaccaacagagcagaacatgacagaatggccagacagtggaccaagagatacgctacataaattggggtttcacaattcttacattatttgtctgtcacagaagagagctgcttatgattttgaaggggtcagggagggtgggagttggtaaagagtagggtatttctataacagatattattcagtcttatttcctaagattttgttgtaacttaaggtatcttgctacagtagacagaattggtaatagcaacttttaaaattgtcattagttctgcaatattagctgaaatgtagtacagaaaagaatgtacatttagacatttgggttcagttgcttgtagtctgtaaatttaaaacagcttaatttggtacaggttacacatatggccatttatgtaaagtccctctaagactacatactttttgtttaaaacaaaattggaatttgttttcccttcttggaagggaacattgatatttaacagagtttttagagattgtcatctcatatatataaaatggacacgtggctataaaacmccatataagagatgagtagtgcgttttattttatatgccaatctactttgtttwaaaaaggtctgaatcaggacttgtgaaaacctgtagtgaaataccttaagctgttaactaactgtaaggcgtggaataggagttgctcagtggattggttctatgttgtggactacttaagtctgcatttgttactgtgctaataaacaatattaaaaaccacctaataaacactgctgtgttcatttacttttcttttgccttttggttgccattcgcagattcttctgaaatcgataggtatctgcttctaaaacaagctaaaaataatgcatatttagtaggtattagttagttacctatattaggatctgtactttacacagctgtagatgaggtatcctagaaaaggttaaataatctaccccatttaggcttcaaagacgaaccctactgcatctttttaaaagcattttctgacttgcagatgctgtagtagcaagtacatgagaaatgggttccgtsatggataaattggtmccctgccttagggggcattttggcagtacatgtcctgacccagcagttctgtttctgtatgtctctttcagagaaacttatctggatacacatacattcattacagaatttaaaaagaattggtaactgtttgtactaatatagactaagttgcattagtaggaaacaaagcaaactggaaggtacttatttaaaaatcattatgaaagcatttgtccatctatgtaacatgcatgggtgggaagctagattaatattcaataaccgggggaaaagggtaagggggtgagttagtgtctggtaatttttttttaccaaaaaatgaatttatgatgagaaattttgaagaattatactgtagcagcaatagctgatttgtaagtatcgtcttttatatgtagtagttcttcactagagctcatgaaaaaagtattccatttaagatgttacaaattacttgatgttttaatatgttctttgttgaatagcttattttacatttcagtcaaaatagttatttcacaggtgaaaccactaagtagcttacttcctaccttttaaattaataaagttacagtcagccacattgcttgagtcttgccaaaatctttagagaaacaacacaaactcagacatctaagtcagatcaaattagagcccaatatttttgatacttttattgtatatgactagttttctagaaaactattccagaagatacagtcttccttccagaaaatacagctttactgtccttaagtgcctaatcattttcaagaggaggagcaaacagtttgccctcaagtatctggtctatcaacaggggtctggctaaggaaaaaacggccttagagmgtgatgaacctacttaacactacctggtacctcaactcatgctaaacattctaatttgagcaaagctaaatcatgggtcttagtctgtttagcaaaatctccacaagatgaaatttagcttactaccccaaactgttcaatgttttgggtccaatttagacacaaaaaaatgttttataatcctagacattagattaatgaactttttaaaaacaaagtcatgtttgggcttagaagtttgcataatgttacacagaatgattatgatatcttccgaaacagcttggggttggggggaagttacacataggtgcatttgcataactatccaaactattttactgttttcacaagtacaacataaataacaaaggtgctaatttcaaagacaggtttcaaacaatgagaataagaatatattatttcatatcaggcaataataaccttagcccaaatacttttaacatctaaagtgcattaattgacttccttaggaattttcctaaggaccaaaggtagatacaaatggcctattttaaatagtaatattactccatgttcacagacacttaaaggcaatcactattcaacatacaattgtggaaattactgatttttagttctcagaattagagttccctttgtttttcctcccaggcaaaggaaagcttgatttgctctggggttgagaaagtttactggctaataaagtgaatggttcaatcagagttttccgatctgtaacagtcacctcccacagtcttactttctcactttttgcccactgctgtgccacttcagcrtccacttgtctctgctcagaaaggtcgattttgtttcctaataccacaattgctacctgaaagaaaacggattgaaaagatcatactagtactttgccaacatcagttcctgggcaaaatggagacataaggaaaattgttccacttaacaaacctgcttcattaaactgattctcaagtgtgactggatattaggatttcaccttactccttaatgcatttttgttaaaaatggagatgctcggccgggcgtgctggctcatgcctatattcccagcactttgggaggccgaggctcgtggatctcttgaggtcaggagttcaagaccaccctggccaacacggtgaaaccccatctctactgaaaataaaaaaattagccaggcgtagtggtgtgcgcctgtacttgggaggctgcggcaggagaatcgctggaacccgggaggcagagagggtgcagtaagccgagatggcgccactgcactccagcctgggtgactgtgcaagactccatctcaaaaaaaaaaaaaaaaaaaaaaatgcagatgctctgtagtttgctaactgtaaaaaaaaaaaaattagctcaggtatgaatggaagatggacttgggaaattggcatctaggatacagactggtttcaatgagtctgcatttcagtttggctacacttgatgtatgagagatttgcaacatagtacttcaaaacaagacagctggagctgtgggagttctgtatccatgagaacaggaattgttgtgttcacattattcacaatactaaaaaggtgactgctaagtgtctgttaaatgtatgggccaaaaacaaaaaaagtatgtgccaataggaacattttacacgaatgcttactatacaccagacactgcgcgtgacagaatacagcagtcaaagctcggggaggagaagagaccccaaaccagattttcagatagtgcccgtaaagattacacaagacgatgtgacagtagacaatgggcagcaagaactgtcaaaggcctctctgaggagcagcagtgaactcatcagatcttggaaccactactgtcttccttcctgtctgtacattgagcttgagctccctgtgctccagtaaggccatgccttgctggcaggatgaaagtgggccagagctccagttttctaggggaatcacatactctatctcatctttcaagccctcctgtcattcttcatcacccagggtttcatcttcatgtatctccccctactgtgacctccatctccctctcctcccaactgcagaaactcgttcactttaccccttagaattcagcaagactaacccccactgcatcctccacctctgcgtcctccacctctgctttgaatgttccttcacctttcctagttgccttgcagtcctgcttcctctatcactcccctcctaccactaccacaaggttggggtaagatgtcctccttgtccctcagtgctacctccaatggtgtccttctctaaaacccctgcagaaagctgatgctatcagtctgttgtacctactaatcccaggccggccccccaactgctcctcatcacagagctgactcatggtcaacctgctctcgccgttactctggtcataattcttagtgatttcactggccacgtagatgctgcttccagtaacctggtctcttattctttgacttctccaatggtctcatcatccttacctcagccattcaccactcccgtggtcatatcctagaccttgttttgtttgttttttttaaagagacagggtctctctgtgtcacccaggatggagtgcaatggcttgatcatagctggttgcagccttgatcttctgggctcaagcgatcgtgatcctcctcctcagcctgcccagctatttttttaatttttagagatggggtcttactttattgctggagctggtctcaaactccttgcttcaagcaatcctcctgcctcagctccgcaaagtgctgggattacaggcgtgaactaccacatccagcctagaccttgacattgtaactgctctctatgatctcagttccaggcatcccactctgactcctgccttcccagtcatgcctaatgcccccattgcaagaattccaaacaccacaaggacgtacaacctactggctctactacctttatcattgtccttccaccccactcatgtccttaattcctccctacccagcttagattatttttattcactcccttgcccccattatcccaccatattcacccggcaaaacccctcccttgttaaatttaactattaaccagactctgtgcctacaccatttagctgaatatggctggagaaaaacatacaaccctgctggcccagatcataccactgatctcaaatgaactgatgttctccggcaaatgtattacattttctccatttactctgtaatgagatatcgcatacctttggtgcccttctacaagttccagtatctcctcttccttccccactttcctttcacctgatgaccatattgtttcagtaagatacgcaattagaagagaatttcagccaggcacrgtgactcacacctgtaatcccgtactttgggaggtggaggtgggtggatcatgaggtcaggagattgagaccatcctggctaacacggtgaaaccctatctctactaaaaatacaaaaaaattagccgggcatggtggcgggcgcctgtagtcccagctacttgggaggctgaggcaggagaatggcatgaacccgagaggcagagcttgcagtgagccgagatcatgccactgcactccagcctgggagatggagcaagactccatctcaaaaaaaaaaaaaaaaaaaaacttccacattcttccgccaccacatctaacaacctaccatcttccaagcccatttgctctgccttaaaacccatcctccttcacccggacaagggtgtcactccagcacttagtcccctcatcatcaattttctcccattagcatacaaacacaatcttatctaaataaaacaaacggccgggcatggtggctaatgcctgtaatcccagcactttgggaggcccaggtgggtggatcacctgaggtcagtagtttgagaccagcctgtccaacatggtgaaaccctgtctactaaaaatacaaaaattagccaggtgtggtggtgaacgcctgtaatcccagctactcgggaggctgaggcaggaaaatcgcttgaacctgggaggcggaggttgctgtgggctgagatcatgccactgcactctagcgtgggcaatagcaagactccatctcaaaaaaaacaaggatgatacatctatagccacaggatgaatattatacattagttaccaagaaaaaaaaacgggggtgggtggatgggtgtggtggctcacacctgtaatcccaacagtgtgggaggctgaggaaggaggactgtttgagaccaggagttcaagactagcctgaacaacataacaacacctgtctctacaattaaaaaaaaaaaaaatctgggtactgatatggaaacaactccaagatatgttacatgaaaaacagaaggtacaggatagtatgccacctggtgtgagaaagggaaaaaaggctaggcacacggtggctcacactcataatcccagcactttgggaggccgaggcaggaggatcacttgaagccaggagttgggagaccagcctgggcaacagagcaagaccttgtctttgcaaaaaaataaaaataaaaattaggcaagcatggtgatgtactcctgtagtcccagctactcaggagactgaggcaggaggtcactggagcctgggagttttaggctgcaatcatgccatagctctcaagtctgggcaacagagcaagaccctgtctgaaatagggaaaaaaaaaaaggaggaaaaatatttttaatgtatactcctatttgcttgcatttatataaagaaactctggatgactgccccaaaactaataaaggggtaaaatattttaaaaagcatgcttaatgtacaggatcttggtggttgaggacagctgtgggaaccagactgaacacagtcctttttacatatgattgtcatttttgaaccatgtgcaaacattacttattcaattttttaaaaccaaacatgaaaataaataaatgcaacttaagccatatcatgtcattcctttgccccaaaccagtgctttctgatctcactaaaagtgaaaggcaaagtgcccccatcacctacaacacacctcctagcccactctggcttcactgccgattcctgaacatggcaagcaaattccgacctcagatcctcggta

SEQ ID NO: 93212 - DNA, 221926 bp, Homo sapiens
  misc_feature (1)...(221926): n = A,T,C or G
tatatgaattgtatatagtttctgaaatccatagaattctgaatatgataaattcatctgatcctaggagttttggagcttgtggagttatgcaagtaccagcactgaataggagatgaataaagaattgcagtattcttgactggcaagggtcttttccaatgtattttaatgttaagggtctataattctgaaatttcttgcctgattttttgttgttataaggatagaagaatcccatttttgggcagaggttctgtaattcagggtcagcatgtcaactaacagattgttccacatacacatattttttcctacaggggagttctgattcccaggaacaccctgagggccactgaagctgagacgtttctgagaaattcttttgctttatgtggggtgtggggtaagggtgtcttgactggccttacaaactagcctaaggcatgagtttaaaagtgcacctttaaggcaacagattgtacaagtgtgaaaaacgataccagcaacagtttagtgtgagtgtccacaggatgacctttctactggaaaatgaagaatgatgcaggaagatgaaaatgttttccaaaccccttggctatcagcaaatgtttgccaagaaaacacttctataattctccagaggttctaagtgattagaaagcacacaggcagggatccaactgactctcaccctgggaggttttaccattcttacaatcattaaacaacatttataacgagtctttctatttctattcttttattttacagaaaacatttgcttagaaaaaacaatactaaaatttatatggaactacaaaagacccagaatagctaaagatatcctaagcacaaagaatgaaactggaggaattacattaccttacttcaaatcatactatggagccatagtaaccaaaacagcatggtactggcataaaaacagacacacagactaatggaactgaatagagaacccagaaacaaatccacacatctacagtgaattcattttttacaaaggtgccaagaatatccactggagaaaagacagtctctttaataagtggtgctggaaaaactggatatccatacgcgcaagaatggaactaaacccctatttctcatcatacacaaaaatcaactcaaaataggttaaagactttttttttgatccaatgatagtttttctcacataccatttacagttggttttccattaaaagctattcatatatgtggctcccttcgtaatccttttaaacatagtagccctatggacttaacctgtaagttactattatcctttattttattttattttattttatttacaaaatggattaaagactgaaatctaagatttcaaattataaaaccactaaaagaaaacactgaggaaactctccaggacattggagtgagcaaagatttcttgtggagtttatggatttttttttttttttttggaaactgaattcaattgcgcttatagttctttaatataattgcagcaaccaattggcatgtaattgtgttattccaaacaaatattcatttttaaatggctttttgcatgtttgcttatttactaatcatgctagtttgcataaatgtgcaaatccatgaaaacaaataaaattataaaagttaygtaaacattatcccattactggatatatacccaaaggattataaatcatgctactataaagacacaagcacacgtatgtttattgcggcactattcacaatagcaaagacttggaaccaacccaaatgtccatcaatggtaaactggattaagaaaatgtggcacatatacatcatggaatactatgcagccataaaaaaggatgagttcatgtcctttgtagtgacatggatgaagctggaaaccatcattctgagcaaactatcgcaaggatagaaaaccaaacaccgcatgttctcactcataggtgggaactgaacaatgagaacacttggacccagggcagggaatatcacacaccgaagcttgtcgtggggtggggggctgggggagggatagcattaggagaaataccttatgtaaatgatgagttaatgggtgcagcacaccaacacggcacatgtatgcatatgtaacaaaactgcatgttgtgcacatgtaccctagaacttaaagtataaaaaaaaaggttatgtaaacattgaaaatacagaaatatttcaaaaaagtcattagatagggggagtgggatccatttgggcttgttggacatgaaaaagcttcacagggactggctatgggtgactgagaagacttatctttggtattgcagggggagctgtaggcgtcagtgtgggacctttatagtcacatgctaggcagctcacaagtcgaccgttgctggaaaaaatgatgaaacatacaaatgggccacaggaagctgaaatgaggatacagaaacacaatgctctgcacatcttggcaatatctgctgtgttgctgtgttcctcattctctcttgagatttttggtgttaaccactgtcatttttttacaaaaaatttgagcctcactaatgacactgttctgatctttcagtgagtcactgttatggtggttgaagtgatttatgtcatcaggtaactggggatacaacatcttgctctatactccatgtctctagagaaacatgtgcattggttaattaacattagcaattagatgtttgcgaatgaatgaatgaaatgagtagttgctaatccacagactgtcaggtggactgaagggcacagaagtcatacagattatgtcagtgaggattattggggacaaataatgaatgcagacttgctctctgaaggaaaagggcaccggggcctcacagaatcaagacaaagtggaagaacagcaggaactaaggaagcaacaaaaagatttaaaaaaaagacccacaaaacctaggaagtaaaagtttcctaggttttactggtcagggtaaagctgctgatgggccgcttctgtctctgttcaataagctcaacctcaaagatcaccggctccctcatcccctgagattcagtccacctggcctatagggtaaatggaatggtggtgggaatatggaagaaggatctgaccttcacttttgaggttactgcttgaaattgctgtcttgccaggcctatgcctatttggggagaggtaattttctataagaaaatggaactgtcagaaaagatgatagatgttggtatcccaaaatgactagatgatctggatggcagtgcttgtatcaaatgtaccacaagggaaaatctgggggagcaccatttgtatgtcactttgataaaatagttctgtttctgttgaaagcattattgcaaattaacaagaaactaatttaccatagaaaaagaacaggtaatggacatgaatagatcattttcagtaaatggtacaaataataacatgaaaaaatcgtgttcagcattactgattataaaaaagttgattaaaacaagatatgattttgattcgtgacattttcaggttataagcaaggcaatatttaatactggagggtatttttgcagcatcacacagcaccttaaaaatgtttctaaatgctgatccagtatttctacttttaggaatctatcctaaggatgtagagatcttgacaaagatgatgcaacgtagtgttcattctagcatgatttgtaaactgcaataaagtctgaaaatatcctaaaacatttgataaatgattgtaatattcttcaaccacagaaatgatatcttaaagaaagtttaataacagtaaaaaatagtcaatttataaatacttagtgagataaggaagattctaaactctgtaaagcatggtgttaattttataacaaacctctgggcatagaaaaaataaggaaatatactaaatgctaatagagagtgtgtgtgtgggagttataggtgattttaattaaaaatgtttttctgtggtctctaaaacacagatgtaaaattttttttctaaaatatagatgttaaaattataaaaatgaacatatatgtttttattctcagaagaaaatagaacaattaaaaggatttcaaataccactttgacaaaaatgtcaagtgcatattgagatgaatgtatagcatgattacttagtcactgtttcttgacatctttgaagatatgaaagatttggaaagaaaaatcacaaaatctctcaggaaaataaaataattacatacaaaatcatactacttctaaaattcatgtttgggagtccataagcttcagttcatctctaaacaacatatggcatttcctattttattcctctatcccagggaggcagaaattcagttattgtaagggcacttagataattttctttctttctttctttcttttttttttttgagacagagtcttgctgtgtcaccaggctggaatgcagtggtgcaatctcaactcacagcaacctcctcctcccaggttcaaataatcctcctgcctcagcctcccgaatagcttcgattacaggcacctgcctccacctccggctaatttttgtatttttagtagagccggggtttcgccatgtggcccagactggtcttgagctcctgacctcaggtaatcaacgcgcttcggcctcccaaagtgttgggattacaggtgtgagccactgcgcttggccttgataattttatttctaattagatttagtagaaagacctattgttggaggcaagtgccaaatgttttcatagtgacacttaagaatttgggatgcaattttatagactgctgcttctcaaccaaaagcattataatttctaaagacaagcttgtaagaatgcagttacgtgtgtgcacaagacttatcagaccatctgtgactaataaagcttgagaaagaggggaggagagagggtattctgccttccagtaacatgcttgtctgaaacttactaaactcctcttaggcaatactctgctcagagagccatgtgtttaattgtaaaaatctgtcagtatcataggattcaaaagacatcaatcatttatgtcaacaaggaaagagtgagggctgtgtgactcttctatcattaggaaaagatgtgctcaagagacaaaaatgtggtctaaggagggctgagcaactgtaggttacaggaaaactgagttccagactataatttggcccccctcccctaatttggactggtatattatatttttcatttcatgcaatgccatgtgtgcagtaagacattatgtaacttggtcagtcgcagttgtgtaatatccactaaatgctttaaagtggctgacgttattagcagtttggtgcatggggaggccattgcttcccttggctttggcgggatgcaatatcgtgtaatgaggttggaactggcctatattcaaaattacattcccaaagggctgctattcaagccacatgacaactggttctctttttcttaagactttattctaagtggactgaaaacagcaaaattgccgtgtttgaacggttccataggtggaatgggtcttttccctgttttgctcccaatttattattttatgctaagatttctgaattataaccagttttagagacatcgggacacaaattcccgtccccctccatctaagctgtgtgacctcgggctggttctgagccttcatttccttacctgtaaattggcgataacacttccctaaggaggtgcaagaaggcttataaagactccagcaaagctccagtctcttaattatgtcacctcaggcaagttatttagccgtttgatttgctgattccttacttataagttggaccagttgtggctactatccgcagtagtcgaagaatagatatcataggcaaagctccgggaaaggtggctggtccttggcggctcgagaggacctgataatggtcctaatagcgagcattccctagggtgatgcggtcgagttatgaaactttgggaaaagagagaacaaggaacgcgggcgatcagaggcccagtcgcgagacctgccccgctggggcctccagccggcaccgcgacgccccgggacctggcaccgcctcgctccacccctgcgaatccggggcgaatccgggcggagagttcctgccggccgcgcagcgcagagccccctccggcccgccctctctccctccctcccgctgagctccagctgtgccagaggcacccgagccctgagagtccgccgccaacgcgcaggtgctagcggccccttcgccctgcaggtaggagccgcgccgagacccggatcaccgggcgcccgtgggagccgggtttccactgccctcgccctccgtccctcctccgcccaacctgggcagctggccgctccccgcccaacttggacgggatttcagcgagtgagtcggcggcggactccctagcgatccccaagggcctccctcgcacgccttcgggtggaattcctgcagggtgaaagctgacaactctggcacgcacttttgccgcgcgggcggctgcctggagcgcagagccgcgcaggctcaggctgaagcccaggcgtcctctgcaggatgcaccgcctcgccgccacagggcttcgggtgcagtgtgtgtggtgtccccaggtcatccgggcgcccttggttcgggtgcgcggtggcatgactgggctggtgggggcgatgggaccggcatcccgtaccaaccaggaagtgccgcgtcccaaggcttcgagcccagcccgcagagcacggtcctgggggtgtgatcacagctgctgaccgcggctcccgccgtgtgatgtgaccactcggaggtggggcgagggggccgggggccagcagcagggagtgtgtaaaaggtcttcttcctcacaatacgattgaaggtgtttgggacgtagggctcagatccaggagtgccgtcctccaagccttccataggattttgtgacgcccttgagaaccgcccttgtagactcagtcctgaactaccgccacgcctgtatttgctcctcctcatctcggattattgctttctttacttcctctgtgaagcactaaatactagtagctttttaagaacagaccacaacagtttcttcgtttgaccattactaagtctgcctccaaaatggggagttccgttaactttatcagccagccctgccaattttagttaagataagccttcgtgggcctccaaaggcctctgagagactaggtacccagagacctctgaggtatgttaaatggtttagttcgtggtggtgcaatgaaaacttaaagaaggaaaggaatctgcaatttgaactgttaacagaccccacatttacacactgcctatttgaataagaatctctttcagtattaaatgttttgtgacacacaaatgaatttgtacacagtcttttagcttgaatttgtagacagcctttaaatgttgtttggggatctttggactaattgtataagcgctcagtctggcttctcaagaaccagtacagttaacaatccatataaaaagttggagtgctgcctgggcgcggtgactcacgcctgtaatcccagcactttgggaggctgaggcgggcagatcacctgaggtcaggagtttgagaccagcctggccaacatggtgaaaccccgcctctactaaaaatacaaaaattagccaggcgtggtggcacacgcctgtaatcccagccactcgggaggctgaggcaggagaatcgcttgaacccgggaggcggaggttgcagtgagccgagatggagccattgcacgccagcctgggcgacagggcaagaatctgtctcaaaaaaaaaaaaaaaaaaaaaaaaaaattgaatgctaaggctttgaggaaaaagtgtctttacaatgtttgtccctgatgacagaataattatgaactatagtaagcgctgtacaatgctcatttaggtttgtagacttacttataaccaggtagtggggaacccggcttcttggaagttgtatgtttacttagtgtttcttaattaaaattacaaattttatttacctttaactcttataggtaacttttatttttgttacaaaggaaaagtaggactgtcattattattattattattattttttgagacggagtctcgctctgtctcccaggctggagtgcagtggcgcgatctcggctcactgcaagctccacctcccgggttcacgccattctcctgcctcagcctcctgagtagctgggaaaacaggcgcctgctgccacgcccggttaattttttgtatttttagtagatacggggtttcaccgtgttagccaggatggtctcgatttcctgacctcgtgatccgcccgcctcggcctcccaaagtgctgggattacaggcgtgagccactgcacccgaccctattttttttttttaataatttgaaattttattttagatacagggggtacatgtgcaggtttgttacatggacatacagcatgcagctgaggttgggggtacaactggtcccgtcacccaggtggtgagcatagtacctgataattttttaacttttgctctccttcctccctcccacgtctagtagttcccagtgtctattgttgccgtctctatatccataagtacccaatgtttaccttccacttattagtgaaaacatgcaatgtttgattttctgttcctgcattaatttgcttaggataatgacctccatccgcatccatgtttctacaaaggacacgattgtgttactttttatggctgcatggtattctatgatgcatatggaccacattttctcttatccggtccatagttgatgggcatctaggctgactccatgtctttgctattgtgamtagtgctgtggtgaacatatgaatttgtgtgtgtttttggtagaacaacttattttcttttggatatatacccagtaatggggctgctgggttgaatggtagttccgttttgagttctttgagaaatctgcaactgctttccacagtgactgaactaatttacgttccaaccgacagtgtataaatgttctcttacaggatgtttttttaaaaaattttttttctcttataatttcacttttgttgtggtaaaatatgtacaacataaaatttaccattgtagccatttttaagtgtacatgtagtggcattaaatacattcacatcgttgtgctaccgtcaccaccatccatccacaagactcttcatctttcttacagggttttaataacattttaatgataatggttgtgttgcaggctttagttttatcactaagcaaggtttgagttccttctcgtagctttagagaaatgcaccttttaaacttttttttttgagacagggtctcactctgttgcccaggttggagtgtagtggcacaacagccttgacctcctaggctcaagtgatactcccatctcagtttctgagtagctggaactagaggtgcgcatcaccatccttggccagttttgtttgtatttttataaagatggcgtctcactgtgttgctagggctggtcttgaacagctgggctccygcaatcctcctacttcggcttcccaaagtgctggattacaggcatgagctaccatacccagctgagaaatgcacttttaaaagagaaaaggtaaaaagccatagccagactgtttaacaaatcttatctacagcaggaaagacctaatacattactgtttgaggataagcttgtgatgtatttaaacttgtgtctaagggtattgtggggtttagctgtcaagaggaaggaacacgtaagggaattattgttattgatcatttcctctcctgagtatctatcagaaaaataacaattgtcagtgttgtcctctatagcagtgcaaatagtacctatctaaactatgcttgagctcaggtagtgttgcctttttagtaactaaaagcagtgtgtagcaatttcctgtccatcccagatgtttactaaagattgatactaggggacccaacacataagatatgtctctttaaacttgtagttaggctgagtcattgtgttcacaagaaaagctgtagctctgcaaggtctggttttgtgtttacaatcctttaagtcttagcaccacaaaataaaatgtatttgctagggtgtggctaaaagttgttgcagggttaaaatgagaaacatgtaaacctaactttcccataagcctgtgacatttctgattacaaagagaatcatacaaatckcatcttatgcttcagtgggaacacattccagtgtgttagtttccctaaattcacagtgcagtgtaaaatctggaccccagctgttttagtgctgggttattaagcaaaagtgtatgttacgtaagtgtttcatagtgtcacagtgttttttttctgttgtgaaactttcttaatttttaaatttattgagcaaacattacagcgacagaataaaatgaattatttatttaataaacacttacgtggtgtttactttgtgccttgcactcatctaagcattttacaaacatgaatacatttaaccctcagaacaaccctgtaaagtaggtaatcttattatggccatttaatttatttatttatgtttgttttattgtattttattttgtagagatgaggtcttgctatgtcacccaggctagtttcagacttctgggttcaagtggtcctcctaccttggcttccaaacgtgctgggattcacaggcatgagccactgagcctggcctatgcccattttatagatgaggcagtttgaggcatagtgagatcccacaactagcacatggtagagctggggatccatcccaggcagcttgcacccagagttttgacactgctgtctgtctagaaaaaaacataacctgtgattccatcctcttaacaaacttttttttaggtttttttatttccatttcgtccttgttctttgacataattgcaattatagtgcaactcagacaatctgttcaagtcctttatttttcggaaaacgaaattaaggtggagcatgggtatgtcaaagggtagaagcactggggcagggtcctggagatcctctgctgggccaggccttaactcctgattgtgaggagattgggccagggatcctgggagagtctgggaggccaggtgtatttggaaggggttgggtgttatgtgcaatatttccagagggaagcatttcaatattttaataattgttatgaccatactagagctaatctgctaaataagggcccacattatggccgactgggtcatggcaggtcttgcttcctagggctccagaatcctggattgcttcccccrttgctcctaatgcccgtgaccctcagctcccctctggatgagggcaatattttattctgtactcaatcattttttgaactttttggatctagagttgggaaccttttggaagcctctgacgcacaaaagaaaaccagccaaaagcaacatggaaataaaaataacttagtttagtcagttcttttgttaagaaagagagagagagacttctgaggccataaacttatgaactttatattaagaacaggaaaataagggttcagaatttaacagtgatctttttcaaagtaggcttttacagatggcacatttagatgaaggagaataggaataaacatggggaaaaggaaagccrtagaaagggaggggagaaacaaatgcagagacgaggcattggcagagggccacagataggaagcagggagctaatacctttgtcaattctttacaaaaagccttgcatctcagtgtgttaccactggatgatgccttcaaaatctcataagcagttgsaratgatctttcctttggtttatcttgatgggatcttaatgtttaaactgttgctaatcaacaaagcatgtggacaataagatacaagggaactcttagcccctgattgggatcttcataacagtctagtctagtttggtttatgccactttccatgggtggattttataygtagtgtgatattagaatcactggatttgccattattttttctattgtctgtcttccgtgtgagagggcaaggtccttgaggtcacagactgtgtttttgtcatttttgtgtctccagtgtccattgtagtgtacaatagatgtgaactgaatgaaagggtacatggatgaagggagaaggtgtaatccattttattcaaaatacataggtatttccagaaaataagtctttataattaacgttttacttatttatttgctctatggtgccatttaactattcttaaaaataaaatgtgtagatgtagaatggacagtctgtggcattttgggtaaacagctgtactcacttcattgatctttttctgcccaatttctgatgaaggagtcctttgaaataaagagtttgagtaggtagccatgggttgggattggagatttatgacttggagcagaaaaacatttccagatgtgtagggcagtggtcctctgaagatacagacccaaaagtgagaaatttaaccaaaggggctaagaataggaaaaaaaaatgaagatgatgttttagatattgttttttaaatgtcaccattattcctgctttggaataaaaagaggtaagaggtaaggtaggagtacagaatttggggatgaagtatatttttggcactaacatcactgtgatgttaaaactatttttaaaagataataaatacccacacctctgacttactaattattttactaaatttattgctctctatgctatttatgtttattatttctatatggtgaaaatacygtaactattgcacrtcttccccaaactgtatgttctagtgatatcatgttggtaacttggaagcggccatgataggaatttctttttttgagacagaatttcactcttgttgtccaggcaggagtgcaatggtgctatctcagctaactgcaacttccgcctcccaggtccaagcgattctcctgcctcagcctcccaagtagctgggattacaggtgcataccaccatgccaggcttattttgtatttttagtagatacaggctttcaccatgttggtcaggctggtcttgaactcctgacctagtgatcctcctgccttggccttccaggaatatttacaccatcgaaattggcaaacactacagttagggtttctcctccacccggacctggttgctaagcatttctcagcacaccactggctttgcccagggggtatatccgagcttctccaccccatctttctttctcattatgaccaaagagatttctcctgcacttttctgtcaaccgtcacagtgattctgaatttggggatgtggttggggagaaaggaatacgcttagttatgcaatgttcttatctctctgtgcctatgatctggtctggtacaagtctcaactgcattcaatttaacccttgattcttccttttgtagagatagaattctccctgcaacctcctgaagagctggccttccctccttctccatcacagtagttccaaagtctggctaaacaaaatcacctgggaacttcttaaaatacaaatttccaggttctatcacatatgtaataaatttagattcttgaggaatgggactcaaaatagtattttgtaagttcccttgggagtttgatgatcaccccatgtgccttctgggcccctcttgtgggctcttgctctccagccctggcacctgtgtaccttgcttagaatcaggtcatctgggctgctggaccctggccacattgtatggtagcctcgatttttatgtttgaactcaaattctgatcctgtgaaacttggtaatcaggggccactctttgccccattggcctgatttctcatgctcattcattggagcctgggtttctaactaggaaggcagctagcgtgttgcagggagactatcagaggagtcaggtgtgctaagtttcatttctactttagcgtctgtgtaaccttgatcaacttgtttctcacctttctgaactacagttgcctatctccagagtttgttaggaaggttgtttttagaacacatcaagctttgttccatcttagagccttttaatcatgctattccctctgcctggagcacacttctcctaagtctttgcatggcttccttcttttttgtcatttggatcaatgacaaaatggtcaaatgttatctccttggaaaggttttttccctgaccattgaaagctgcctcacttcacagtccacattgcattgcttgctacctgatcctgttccagcctttcacctagggttattttcatgctaggattcaccactatctgaaattctttttcttttctctttttcttgcttactgggttttctacacaagaacttaagctttatgagagtagggactttcctgacatgtagtaggtgctcactaactacttgttgaatgactacctttccaagttgttatataaatatatgatgttagtgtgaaccctggttcccaagggattcatttgttttcctaattgttcttttctgacctcacagatgttgctgtttttatgacaatgattcattgctgagatattactgcaatttggaacaaagtgctgctctcaactgatgagaaataaaatctgtagctttctatgtgaatgcctcctgtcgttttcagagagcttgcaaaaacttgtttcagttgcatctgtcatgtgggtgtataatctgtgatagaatggatcgattaaacatgaaagtatcgtaacataaatgagactgatttggggaaactcctgtttcctaccttttttgagttctaccggggtggtttttggtagtgtcatrgggactagggaaatgtgtatcactttgtaagaaaggcaggccataggctgggcacagtggctcatgcctgttatcccggcactttggaaggctgaggcaggtagatcacttgaggacaggagttcaagaccagcctgaccaacacggtgaaacctcatctctactaaaaatacaaaaattagctgcgtgtggtggtgagtgcctgtaatcctagctacttgggaggctgaggcaggagaattgcttgaacctaggaggtggaggttacagtgagctgagatcgtgccatagcactccagcctgggtgacagagcgagactccgtctcaaaacaaaaacaagaaacaaaaagaaaggcatgccagaaacgcatgttggatatgttcgtcctgtctgatctcaccagatacacggggtaggtttgactgacagtgaagtaatttttgcagatccattgcctggaaggccaataaagttggcagtgaaagctttcatcctgtatttgcaatagcccctcttcaggatggtgttgaagaatttatcaagcacagagtctttttggtgctaacacagtactaggcctaggctagtgagtctaaaatgtggttccagccccacagcttatagtctaatgcagtcatccaaaggcaggactgaattgtgcagcagaatcctgccaggcctcctgaaatgggctggcttttataatgattgtatgttccaattttccttgatagtgattttcaaactgctttgtttcagggcagtacagtggtatgaatatttgtcttcctcaaattcatatgttgaaatcctcaccccaaggggtgatggtattaggaggtgaggcctttaggagatgattaggccatggtggctctgccctyatcaatgagattagtgcctttataaaagaggccagagagggacctctgactctcttcactaagtgacgggttagtgaaaaggcagcctctggggaagcaggccttcaccagacaccaaatctgcaagcaccttgatcttggacttcctagcccccagaactgtgagaagtaagtttctgttgtttataagccacctagtctatggtattttgttacagtagcctgagtggactaagacaggtggctggcattggagtagagattgggtccagggatgtagacagcagacttctggagcatctctaaataccacatttaatcagagcatctcatttagaaaacatactattgtatatttgccttttaaaaattrtgtttgggccaggcacggtggttcatgactgtaatctcagcactttgggaggccaaggtgggtggatcacttgagatkaggagtttgagaccagcctggccaacatggtgaaaccgcatctctactaaaaatacaacaattagccaggtgtggtggtgcacacctgtaatcacagctacttgggaggctgaggcaggacaattgcttgaaccagggagacggaggttgcagtgagccgagatcacgccacttcactccagcctgggcaacaaagcgagactccatctaaaaaataaaaataaaaaataaagaagtaaaaattatgtttgttttagatttgcagaaaagttgtgatgctattatagcgagtttcaaaggagtacacagtttcctctattattaacatctcacataggtatatgatacatttgttataattaatgaacaaatatagatgcattattaagtaaaacctgtatttatttagatgttctcccatgtcctttttctattccagtatcttgcccaggataccatgctgcatttcatagttgtgtctccttgggctcccttggttatcatggttgctcagactttccttgtttttgatgaccttgatagttttgaggggtactggttaggtattctgtagaatgtccctcagttgggatttttatgatgtttttctcaggattagattgggatgatgggtttggggagggagaggacagaggtaaaataccatatttattacatcgtatcaagggtacatactatcagcatgacttatcactggtgatgtccactttgatcacctcactgaagttgtgtgtgtaatgttttccattgtaaagttacttttttcctccctctccacactgtactctttggaaagaagtcactgtgcacaacccatacttttgggagttatgctgtacctcctagagagggggaaatgtcctaaaaggatttcattccctttacttcctttaatgttatagattttcttttgtatgtcattaattttggtctaaaatagaaaagtagtacacttaggtggtcttgtttcacttctgtgctagttcacaaacacagaaacactttagaaagtagttttagttgcaggcaagtccttcttttttttttttcctctttttttttttttttttttttttttagacggagtctcgttctgttgcccaggctggagtgcagtggtgtgatcttggctcactgcaacctccaccgcctgggttcaagcaattctcctgccttagcctcctgagtagctgcgattacaggctcgcaccaccacccccggctaatttttgtatttttagtagagacagggtttcaccatgttggtcaggctggtcttgaactcctgaccttgtgatccacctgcctcggcctcccgaagtgctgggattacaggcatgagccaccgcgcctggcctgagtccctctttttaaatgaaagttgtgggcagacaattatgctcagagaccagataatctggtcgaagggaccagaatgatgcccccaaatcaggtgttggttagtggcttagtgtgcggtaggctacccatgaaacctttgtgctccgatgcctgactgaggacacagtcctcctaaaaaagagtgtgaggcccatcccagcatggctgactctctaatggccaagttcttttgggcctgtgtgtggcttagctctcaggacggtcaggtaatatgtccagagctgggccttgggacctggctagacagacctgaagagttttctgttgcaatcaaataaaggataacaatattaatttggaacatgttgagaagacattgttgtaattaagcacaagttaagcatacataataagcacttcacataattgattagaattattttaacacaaccaaagcaagatccaaaaattcaaaacaaaaattcaattctcagtctttctctctttctcatgctagtgaccattattgacactgtcwcctgatttcacctagaatttatttctcaatttacttgatattctctaagtcatagcacttaatatgatgacttctgtacagcaacagtttccttacgcctgatttcctagggccaaggactcaaggagtctgtaaaatttgaccataatttaaaattggtcatatgttcgatgagtaggagagttgatgtgaagcaagggaggtatcatagccccagcctagaaaggtctctagaccctttgctctgtgatgcaaaaatggtttagaattcctttagtagagaatgtgtaagtgattgtaattcactgagcactcccttatcatttagttctgtatcccacagcattttaatcagtctactttgatcctgtccgactcactttcctgccattgctggttatataataggacaatcttacttaagtagcggtgttacctggattcagtggcctgagaattttttccttccctttaatgtttctttaggtttcacattttaagggtcagtgacacttaactgttatctattgtttcacagatgagtcatagaaaaatggaaaatgagtttgaaaattatcctcacaggacagccatcgtgaaacttacaaggaaaaatggcacttagggagtaataagtctctaaaaaattctaaagattgagggaaaaaaaaattaaccctcaaagaatttagccaacttcagtcagttttaaataagaggcccaaaataaacaagtgagaaatttgaaaacttcattcacattaatacatgccagcttttttcatattattaggatatttgcatatattttggtcaaaagctgcttacttaaaaatatgtattcagaagaaaaatgtccataatatgctatagtattttttttttaaagacaaccttctaagtttgcctctgaaattatcctgggagcaactgccctctggggattcatggtctagtgcagtggttctcacactctactgtgcaccagaatccctggagggctcaggagaacacagagggctgggcctcaccctagagtttctgattcagtaggtctgggctgggcagagaatttgcaattctaacaagctccgagataatgctgatgctgctggtttggggactacaatttgagagtcactgatctaatggtttagctgacacatcagtaaacacaattcaaagattaaatgctgtgaaataagtacaagtaacatgcaatgggaaacagggtgtggagaggtggggcaatagatgagtgaacaactacagatcggagaagccatatggaagcagaaaggttaagcaggatttcgaagccttggcaggtagggcattttggagatgacactctactgttgggagggagagtgcagaatgtatatgggagtgggagtatagcctarcacaggtggagagtaagggtgatgtgaggggaggaacaaccatgaacaggtggaattaagaatgagagggctggaaagttaaactaacatgttcttggtttttggagtttggcagcaaaggaaaagcatgatcagagctatgcttaagaagggcagctctggcattgcgacggatggtgcaggaagagaaagagtgattttgggagaatcaggaattattgaggcagccccatccagaagcaaggataggctgaagaagagcatgaagatgggagggatacagtcatgtgatgcatctgtagcagaagccacagatttggtagttgattggttcctgaaaatgagagagagggaagagtcaagggagagtgaggattcaaagtctgaattgttggtgaagagtgttggtaatggctggatctctcagaagaaataatggataagaaaaagaacctcctgggccttggtttcttcaggagaggagtggactagatactcttaaaggtttctttgtaattgtaattaagggtttgagggtttttggttgtctgaaatatgatagaacacagtagtacaaaaagttaatggcttatgtataacaggcattcgtatatttgttgattagttgatccatgacaatcattagctctgaaatagttacatctgcaaatagtcttctttctcagctcttcattttgctatggttttcttagtatgttgacttactcttcctcccattttataaactatgaatatcaacctttttttgatatgtgctctatgtatatattttaaayaagtacagcaggtaatttaaacatctckttggctatttcttacatcataataatcacaccatatatggagatatttatacacaactctgtctttcccactggatcataaactccttttgggtaagggacatatcttactcattttcgtcttcttcactgcactcatcgtaaatacttacaaaaagtggacagcaaatgtttggggaactggattgaatcattgggtaagagtaaattactatctgttcttttgggagagaccaatgtctcagacaataaagagcaatagtttaaagggaaatggaagtccatatatcctaggaagtagaaagaggaaacacatttaattcagtagactctcaaaactagaatagagatattcatggacactttagggactagaagcagaagcccataaaaagtagcacagtgtttagctctatctaaattaactattgaaaaccttgggccagacctttccattctgggcctcaattttctcctttgtaatattgaggttgtactaaattacaaagttttagaactctctgaacacccttttgggaagaattctaagcagagggaatagcatgagtaaaacacaagaaatgggtaagagtatgtgtgttctttgtgactgggtgtgatgtgctaggaaattaagcaggaatggcaggtggaggccttgtttcagagggccatttctcctaagatraggagcctggacccaccctatgatgataggtggtgtcttgtgcagagatttgtgccaggtggtttaattgggaatggcatccagggagcaggggtgaaagaccagagacagtcatctagggaaggaggcaatggtaatacaaggaagcaatattggagcatcattgctataggcagctggttgctttattccaagagattatctgagaagttttatgaaatgcactcagcacagtttatgtagagaaaaaaagggagaagcttttatccatgtttcttgtctcccattgaataaaggcggccccacttctggattgcacatgtatgactgccaggttcccatgggcgacacatgaaacagcaacagaggagtctaggggtgagtgggcctgtcagtttgcacttgtgtgaagctggttaaattcttcatggaactggttgcgatggcaatgcaggaataagaagcaagtttgagaggatttgaagtagtccgtaaaaggaggccaatgaagggagctattgagagattttaaacaaaggaacacctaatcagaatgatataatggtgtgcttgtaagtgtttaacaaccagctctccagaaaatgtgcatgcgcatatgtctattataaattgtactgatacaaaagatgtgttgcacacaattacaagtagtaataaaatactctttatcattaaatctatatagctaattgatttagacagatttctgttggttttttttgaactcttgtatccatagcctagtcatggttacaattgatgaaagaacatattgatattttctttttatattattgtataatttgaaagtgaagcagcaaaggtgtatcccaaaactttacttgttcagggaacatcttctttatgaattgtccagtacttttttttttaatactagaggaatatttcctcagttttttgttttattcacgatgtaactactacaagcaccaggcattttattaacattttctctatcacctcctaaggcctagacaattagcaaaacagaaacgatgtgattatagtgtttgtcaatttcagtatgaaactaccctcatcatggccagtatcaagttatggtgaattgggaaaagatgcacggtagaagcacaacacaacattatgtagtcttttcacatccagtagtctcccctcatccaagggggatatgccccaagacccccaatggatgcctgacatctcaaacagtactgaaccctatacacgctatgatttttttccctatacatacatacctatgataaaatgtaatatataaattaggtacagtaagagattaacaataactaataacaaaatagaagagttataatggtatactataataaaaattatgtgaatgtgatctctctttttctctctctctcaaaatatcttattgtacagtacttttctttttttttttttgagatggattcttgctcccctcgtgtaggctggagtgcagtggcacgatctcggctcaccgcaacctccacctcccaggttcaagcgattctccttcctcagcctcccgagtagctgggattataggcgtgtgccaccacgcccggctaatttttatatttttagtagagacggggttttgccatgttggccaggctggtctcaaactcatgatctcaggttatccatgcgcctcggcctccgaaaatgctgcgattataggcgtgagccaccactcccagccccttcttgtgatgatgtgagatgataaaatgcctgtgtgaagatgaagtgaggcgaataacctaggcagtgtgacataagtggaaaacgccagaaataaacaattcatgttataaattgtgcaccattctgagtagtgtgatgaaatcttgcactcctccattccatcctgccagcattgccagtcactcggtggccatctctgtgatcagattaacagtggttttatcagtatcatagggcttatgttcaagtaactgtattttacttaataatggctacaaagtgcaaaagtagygatataatatttttggaccatggttgactgcaggtaactgaaattttagttacatgaaaccacagataaggggggactgcactacacataaaataggcataagtaacctcaagacaatagacattattaaaatatagaaaagtaataaagaagtgataaatggagaacttttgctttaatataatttattgtaagtttatataatttaatttttagtaacttcaatttttaatattttaatttttaatgatttatgtgtttaacaactgactcacaaaattgctgaaaatttcccaatcttgatgaaaatttcccagtctgctctcaggagcctatatgagccagcccagaataccactggagttataattttagaagattaccttggtagcaatctgtagaaatgttttgtaggggagctacagtagggatcaaaagtggagacagattacgaaatgtcttcagaccctgccagcatgagggttcaaatgatgtctagtcagtggagatcacgcaaatttcactggtttgtgttcccacgtggatccgtaggaccttcaatgcaagtctccttcaggtattcctggtggtatcttggcattgtctcacatgtgttttgagagccccacttccttggggagtcttccgctttggcttccttgttgatgaccgtgggccaaagggctttgtgtgtgaggctccacctcagccatagctggtgtcctcctgaagaggatttatgccaaaaggagtcacatgccaggacttgtttttttcaagtttgcaaatctggggggagggtggggctctagaaagatgctggaacctggtatgtgccctgcagaaatgtccttgactccttttgtcaccaggagcctaaatttactgtgtttctctgtgactcacagaggcagggggaaagacaatcctctccacttcttcctgcagctacttgctccatcagcctcagccagtctggggctgggcagggaaacaggccctcttccttctcctggtttgtcccctggtttgctcagcgagaccttcgtgtctgagggcccccttctcaccttgcagatcagctggtgtggtactgaatgcctgatggatggccagrggcccctgatccatctgcattcccagaatataagaatctcatttggggccacccagcccccactactcttagtatatgaaataaggtggaatagataagaggatggaactggcccctgggtgcatgatggggccaataacggaggtacagggtgcatatgtggctgggctgtgagacagggaaagaggatggaattgagatgcaaggtagaaaagcatgactatgttcagtttgggacttgatgaaatagatactggtaggacagttcactaggcactgggccttcaggagaaagagaagaaaggaatggtggcattgggagtagtaaagctgtgggtatgaatgagtatctatgagactcacctccctgtgaggacatagaatgaggagacacagtctacaggtagactaggtcgagttcagaagcctgaagaacaccagtgtttaagggatggtgttgggaaagggagccaggccagccagagaggaaygttcsggaactctgaaaggaaggaaatggcaggaacaaaggagctggggcacaacagtggtgactcacactgggaacacttcggcccattgtgtttatgcttatagtttcccaagtttatsttttcagggttatgattacgttaacctcacctccctccctccctctaaaacaaaacaaaaaaaaaggagtgaaagactcttcagtattatgaatggccccaggtgaggaagacatctgacacgtttatatcatgtcaatacttcgatccagccttttacagtcagtgtgaggagaaaacacatttacttgaagctaaaggaataggaagtgtcagctttttcctgtttgatgtttcttgttgtgttttccatattaatcacttcattttccccttggtcacaggcctgatatttttttccctacacatgtcagctgcctagtgtgtcaggcagtttttcaccgtgatatagagacacaatagagctggagctggcaaggtgactgccagaaatgtgtgtcactcttgatggttatgttcacgagcatccagaaagcccagtgctcctgaactgaattataggctttgaaatgaccatgtggtttgcattcrgcaaaaaaayataccccagacatgtgcaagggttgttggtttggggaaaattagatgactccaacatgaaaagacagagcctatctaaagagataggctagtgtgaggtttttttacagcacaaatctgttgaataagtggatttggatgtaaccacrggcttgccatatgaaattctattccatgggaattaaagtttgtggctttgtgaaggcatttgttgcagactatgaaaagttctcatattcttttgccaaaacacagaaacatggagaaatacgaaaaagcttttactgtggctgtctcctctaatcctcttaaacacttaatgtgtcctatgtacatagcagtgaaattaaatacagctattcctgataacgtagcaacttagatgtaaaagtctactgctaagggaataggaagactaaagaaaacaattcttatatcagttaggaattgtgtttcactacaagtatcagagcccccaggtagtggctttatttctcatgtataaacagtccagaagtagtccgttgggagctggcatgacggctctagaagtcatcagtctctagagctctccaatctgccacctccaggatgtggcccttgtctgagatggctgctggggctctcaacatcatatttacattacagacagagaatagaggaagaggagcatgccagcttcctttgcaggccctgtctcataattccagtactcccaattacatctcattggccagagcttagtaacatagccacacctcactgtgcatctctaaattatcataaatctcattttttgaaaaattaactcacaatcttctcttctcctggccattattgcaagagattgggagagagctagtacaagagtgagattctttagtgtctttctgggtgattccacgccaagaggtcttcctctgtgtcctcacaacagtaataaccgtaacatcatgaatcagtcagggtttaccagagatgcagacttagtaggttacatgcattaagggatttattacaaggaattggcttcctcaattgtgggactggctaaacaagcttgaaatccacagggcaaccagtcaggcaggtagaccatgagcaggctggatccctgtgagtggagctgaagcttggagtctctgaatccagggagggcctaagccctcttttaaaggactttcagctgattacctcagttctactcaggataatctcccttttgactaactaaaatcaactgattacataccttacatctgcaaaatcccttcacagcagcagtagattagtacttgattgaataactaggtaaaggcatgtgtgtacatgcatgctgcaaaatgttgctgtctcctttcttttccccacctcttaggagagaatatcctttgaccctacgtggaagcctacaagaaggggaattctgggcaatgtggttcagcccagccacatcacatactattatttagtagtcatgaagagagagacataggtaaaaacagcagttagtatttcttcattctgatatctggcagcaagtgagtgatgctaccattatcrgctaaaatcaggaactggtattaatgcattttgttttgttttgttttctgctttattctcctctgtcatagacagtgaagagtaagtgaagaatttgagggtcatcagccattgtgaactcatcaaagttagtagcacttaaaatttgcttttaaaatgaatggaaagatgtccaagtttttaatagcacaaatatttttttctcatttgtaccttttttttgtcttttgtatacagatattcccactctggccactgcccaaaggggctcttatctgaggaatactgctgacttcgtgtacctagttttacagagccatctttctgaagcataaattagattacattattctacagcttaaatccctccatgaacttcccatcacccaagagtggatctgaaactccttagagtgtcattcaagacccttctgtatgtggctgccatgcatttttttcaactttatttccagccttgcaatgtacatacatccatctctgtcccacgccctctgcagggctttttggttccagaacgtgccatgtgcttttctcctttggagctctttgaataggatgcccttcctcccttgtctgcctgtagatagaaacatcctgtgcattggtgagttggccctgaccaccattttcttagcatgctgaattacttctgttcccctctgtgtttgcacagctttgtttgtgcacagtagacttttggctgggccatgtagactgcctcctccatgagtttgccagctttttgaggacaatgtctgttttattcatcctcgaattctcagtgcctagcagagtgcatagcacagggtagttatgcaatacatattggagtaaaggaatacaattcaaaaaaacagtctcattaacagatgcaaaccaactcctctcatgacgcagagaatctaagctcaaacaaattaccagagttggcagttgaagtactatatatagacagaacttaataaatgcttttctttgtcttaagcctttgatgacagtgatgtgtttttatgaacgtagataaccacaagcagatgtgtcaaagctcttttgtccaggaataaactgagtttcgtcatcatcttgacagtactttcctggatgagtgttcaggaaacatgaaaagtttttaaacaattcaacaaatgtgtaataaaagtttgttaycttgttttatttgttgttatattgtctcttggcttgagtttttatttgggaagctaatagagagacgggatattagaaaaccagaggcaaactgcttggtttattgaagcactaactgaatgaatgcaggtatacgagtaatccaggaatcccatgcattaaggaaaaatttatttctatcacctctgtattgttgttaccttgtgaacctggcttggttttttcagcagttggtaaactgataagcctgtttctcactctgtcattcatctcatcagtttaccagcccagaaatactcctttcagtctttacaaaaaaaaaaaaaaaaaaaagaagtgcagatgcactcacaaacacaaaagttaatttattattattwttttttttttgagatggatttttgctcttgtcacaaggctggagtgcaatgacgcgatctcagctcacagcaacctcaacctcccgggctcaagtgattctctggagcagctgggattacaggcgtgtaccaccatgcccagctaatttttgtatttttagtagaaatggggtttcaccatgttggccaggctggtctcaaactcctgatcccaggtgatccaccagcctcagcctcccaaagtgctgggagtataggcatgagccactgctgcacccggctgaatttttttcttgaggctgacaatcatacaattttttttttcttacaaaatatttttctaattttttttttcttaaaaaaaaccaagttggttctaataatatctaaatttcattaaattaccagggaaaaaatattttcttttcctaaatgagaattcagtgataatatgcttgctgctccatagaaggtggctgttctttaacttgtatcaaccttccttgtttgtaccatgcccccaacacacatacacataccacaccataccatgaatattaacaagggaaaaatggcctgaattttattttctgggtatgatgacattcaaatgagttataaaatatgcaaatgtattttagattcctttcttggtgcacaaatccataacatttttctcctaggttgataatatggtcatgaagttcttgggtgctgcattttgtacaaccagctcttgcaatgtgagagaaccatcatccacttgggggcacccaggtacttaatgaaaaaaaaagaaggcattgccaagagaaagtaatttgatcacaaaaataagggaaaatactcagggtagataatctattccaacataacaaatccagaaagtaggcctgtgttgtacagagatgaccatgccctacagacacctaatgtaccatacagactcggtaaaaccctggtcagctacctgttagttggtacttcagcacaggcatgtagcctgagagacagaggggcccagaggtggacaagcagaatgggcattgattgggaagagaattcaactgtaagctttccagggcagggaccatgtttggttgactctctgttgtgtgctgggtgcctagcactctactgtagatatgaactcagtaatatttgtttaatgaatggctggctggatgaattgagtgaatctaggaggaatttaacaggaaatggatggacagagactgaaggtttaaagcagtgataacttaccaatgaagggagttagttagcatgaggcatcactacggaggcactgcacgtattgaaagatctatttgattggctagaatgtttgcataagagataagaattcataaggaaattcccatgttacctattctagttgcagttttgtcagatgagatattttgtgatatttattatatataaaatatatttctttaaatgttgatttgtattttgagtaagtaattaaacgacacagaagctcaactgacatggaagtttaaattacaaattttatggtgccatcccgaacagtaatgttgctttgagcaaaagaaattctgaaatgctgtttgagtcctcaaacagtattcaattatgataaaaatattctagtgytcctaattctttattctgtctaattctttgagattagaataattctaatactttggatatccaagtatctgcttagacagctygattgctgcatttctctctgactctgggcagacaggattctataatgcagaatcagtcttaccagccatttccagatggacttgagggtggctgctccttggtttagaaagacaatcttactggatcttttctttatcttcctggactcagaaattcacttttattagttcagccagggataaatgaatcctacaggtttgcttaaaatcagattcactgggattgatgaagagcaggataatagtttatttattctgagaaattgctatttccaaatagttggaaaagtttattggtgggtaattattcttctgccaggaaaatgtgccacgaacctacattaaggtgacaagattgctttattctgctgagcagaataaagggagcctgatggccttaatcctataatactgtttccagtttggaaagtcaacccaagaaacatttattgagggcctactgcatgtgaaggaaaggaagctggcagttattgaacccctcctgtgtggtaagcactgtttagtgctttaacactttggtttttacatgcttgttgcatttaatcccattgaatgggtaaatmactgtagagagtacagggctgaaagaagcagcctctgcccacagggaygttctagacctgtactgtccagtatattgtcccctagccacacgtggttatttgagaattgaaatgtggccagtccaagttgaaatgtgctctaagtgtaaaatagacactggaggctgggcgtggtggctcacgcctataatcccagcactttgggaggccaaggcgggcagatcatgaggtcaggagttcaagaccagcttgaacaacatggtgaaaccccgtctctactaaaaatacaaaaattagcttgccgtggtggcacgtgcctgtaatgcgagctactcgggaggctgagggaggagaatcgcttgaaccagggagtcggaggttgccatgagctgagatcatgccagtgcactccagcctgggcatcggagcaagactccatctaaaaaaaaaaaaaaaatagacactggatttcctagtacacaagaaatgtaaaatatctcattaataatttttgtgtggatcacattttgacatgacacagtattttggtaaattaggttaaataaactcattaaattattttcacctatttcattgtacttttgatgtggctactagaaaatttaaaattatatatgtggctcacttttgtaactcataccgtattcggtcggaatagagaacagaatagaggtaagacataaacataaattgttgagatctaggctctcttccaaccttatgacaagcatttaaattggagtaaacatttcaaaggatactttggcagtatcccacaacaataaaatctggatctgtacaggacttactgtagtattcctgtagtactctgtctgtacttcagagacagaatgccgagcttaaaataggtgcacctaacactgtatttaacttttccttatgattccgtctaaaatatgtatttgtatgttattagctgttaattgactataatatgccaggcactgtgtgaagtgtccactacaatggtaaatatggagatccagattcaaatattagatgattctctctaaggggggagtttctatagatatttgctatctataggtagctatgataccagatacaaagtgatagatgccttatgtgtggcaggtaaaaagctttggtggttctagaggagtgtggtcactgtctggcttggagcctgtgtttgagctggagcttgaagaaaaataggatgtctatggaaagattgggcaggttgcagtggtggtgatccaggggagggaacagcaagaggaaaagctcagagatgagacattctttgggaagaatggggctaattcatttgcctgggacatggcatgtgtgcaggggaatgataagagactggactttaatagtggaaggtcaggctagggaatctggactttttttcctgggtacttaaatgttattcaaatggtttcttaaatacacaattagcggtccctctaaaattctgaatgcctgaacacgtgctactgtcttttttttttttttccttctgagaatgaggtgacttagtgcttacatgtttttaaaataaattctcttgaaataattactttgagactagtttcttcaaatcctccaaatgtggtatttgttttgttccaagcagcaacatgtgctttttaggagtgagaactataagacacaaagagttgagctgagacaggaggatacatttttctctgatagccaatttgttgaagggttcaaaaattacaccagctctttatgtgtcttatatttcccattctatgaaagaaaatcacttccgtagaagttatttttaagaatatgaagtcaaataatacccctgggtcttgaaaagaccaaatgggtacacatattatccagacacagagagtataggacaagagtcctgaaaatgctggagagtgttacagttaagagggtgggctgggcgcagtggctcacacctgtaatcccagcactttggtagcctaaggcaggcagatcacttgagccaggaatttgaaaccagcctgggcaacatagggagactgcatctctacaaaaacatcactacaaaaattagtcgagtgtgatggtgcgtgcctgtagtcccagctacttgggaggatgaggtgggaaaatcactagagcctgagaggcagaggttgtagtgaaccgtgattgcactactgtactccagccttggtgacagagcaagaccctgtctcaataaacaaacaaataaacaggcaaacaaacaaacaaaccctatctcaatcaataaaataaaataaaaaaaacaggagtcaaacatttagatttaaatcccagctctaccatctgccaacttttatgctctgtcttctaatatcctcagatcaacacttttacgtccactcctttgactctgccacctttttactttccattaatgccctgtgtagtctaactttccactttactcaccttatctgcttggtccactgttgtggttactctacttgcctctctcctctttctatcctagtctcctgcaaaacataaccctggttaaaatcacagttactcaggcataactctacactttcttccaaaccacggagcattcctggaaaacacacacacaacactctgatgacattaaattaatcacgccaccctccacccctgcctccactgatactcagccctctctggcaaccctacttccctagtaaactcactctcccaggtgactatttcacacctttgtttctttcctcaaacccctaacatcccttcccagactctctctttcagccatggatcttactgcttatatcactgggcaactagaagcagtttcccagctcccatattctcttgcatccatccatcatctgtcccccatcccctgctctttaccatggacaaacgtgcatcctcctggttgacatccattgcaccccagtggaccccatctgttgctcttgcctgttcagaactctgcttccatagtttctgcccactagcttcattaaagttcctctttttacaggatcattcttattcaaacattccataatgtcttccttctttacaaatacctcctcttaattcttcatctccctccagatttgcctcatatcwttgttcctctttaaagcaaaactctggtaagttgtcagttctcactgtctccaattcctgaccccacattctcttctaacaacatcttgtaaacatttcaaacatgcaggaaagttgaaagaatgtttaggtgaacacccataagccaccacctagattctacaatcaatagtttgctttattgcttgaacatacgtcttgtcacccatctatccctttatcctttcatcaattcaatttatgttttggatacattttaaagtaagttgcaggcatcagtacactcactcctaaacatttcagggtacatatgattaatttccttccctatttgtttatagttctcttttgaagtaaaatttatatacactgaaatgctcaaatctttagtgtaccattcagagttctgaaaaatgcatgtaccacctctgcaatccaaacccttttcaaggtacagaacatgaccatcgccacagaaagttccctcatgttgcttcccagttagtccccagaccaccctcttatgctctgccagaggcaaccactgttttgatttttttcccacaatatgttatttttgcctttctagaagattaacaaaattgaatcatacaatgtatgtactcttttatgtaaggcttctttcactcagcgtaatgtttctgagatgtattcatatcatgtgtatcagtcattcattcctttctgagtgaatccattcctttctgagctgctgagtatcattccattgtttgatgatacaacaggttgtttattcatttttctacgggtggatgcctgagttgcttccagattttgactatggtgaatggagtctttttttgtggctgtgttttcttttctcttggataaatactttggaatgaaataactgggtcataggataggtgcatatttagttttataaacaacggctagacttttttctaagctggttgtagttttacactgtgacccatggtgaatgagagttgtgctgtctctgtatccttgccagcatttgggtttgacggtctttttaatgtttactcgttctggtggggatgtagcagtacctcattgcgtttttcttaaatttccctggtgaatattaacatggagcactttttcatatgcttagtgatcacgagtctgtcttcctttgtggatgtccagtcaaatcttttgctcacttttatcgaattgtaggcattcattatgtattataaaatattagttctttgtcagatatatgatttgcacatattttatcccaggctgtggctttcttatttattttttcaatgatgactttagatgaacagaaattttgaactttggctaagtctgtttttttttctttttatgttgattgctttctaagccatatctaaaagctttataattttagtttttacatttatgtctatgatccatctcaatttttgagtgtggtgtgaggtcatggttgagatttatttatttttgctatatagatatttagtttttttttttaccatcatttgttaataagtcattttttttctctattggatttttctcttaccttcatgaaaatcgagtgaccatgtaagtgtgcatctatttctgagctctctatcctgtcgtattgatctatttgttgatcctgtactagtaccacactgtcctggttactatagacttactacgatgtacttgaagtcaggtagtgttaagtcctccaactttagttttattttttttatgnnnnnnnnnnnnnnnnnnnnnnnnnnnnnnnnnnnnnnnnnnnnnnnnnnnnnnnnnnnnnnnnnnnnatctatagatcagtttgtggagaacagaaaatttaacaatatttggtcttttaatccgtgaacacggtatatccacttacttaggtctttaatttctctcagcaatgccctgtagtcacattctcatttgagcccactttttaggcttttgcataaatttctcttgagcccactctttaggacatcagtgacctccatgtttctgtatccagtggtcagttctcaatcttcctctttcttcatctctcagctcctttgacataattgatctctctatcattgacgcactcttttcacctggcttctgtctttctcaccacactctcctgggtttcctactaccccactggcattttttttttggccccctttactggacccatctcttcttcctggtatttaaatgttggagagtcctgagtgtcagtcctcagacatccctcctttattcaccctcagtcagtctgtggtgaaaatatgttacttaaagctaactaccacgtttaaagccacctgaattccaagtcctgaatctcagacttatgtatccaaaccccagtcctgaatctcagacttaagtatccaaatcccagtcctgaatgttagacttatggatccaaatcccagtcctcagacttacatatccaaaccccattcctgaatctcagacttatatatccaaaccccagttctgaatctcagacttatgtatgcaagccccagtcctcagattaatatctaaaccccagtcctgaatctcagacttacatatccaaaccccattcctgaatctcagacttatgtatataaaccccagtcctgaatctcagacttatgtatataaaccccagtcctgaatctcagacttatgtatataaacccccgtcctgaatctcagacttacatatcctaaccccaggcctgaatctcagacttacatatcctaaccccagtcctgaatctcagacttacgtctccaaaccccagtcctgaatctcagacttacgtatacaaaccccagtcctgaatgttagacttatgtatccaaactccagtcctaatctcagacttatgtatccaaatctcagtcctgaatctcagacttatgtatacaaattccagtcctgaatctccagacttacatatccaaaccccagtcctgaatgttagacttatgtatccaaactccagtcctaatctcagacttatgtatccaaaccccaggcctgaatctcagacttacatatccaaaccccaggcctgaatctcagacttacatatccaaaccccaggactgaatcttggacttatgtatccaagcctcaaacttaggtatccaacgtcctacttctcttcgtttggatatctaaaaggtctctcaaacttaacctacccaaaatggcactcctgatttgccccaaaaacttactgcttctccccagaccccatcacctacaatgttcctcagctgaataattagacttttctccctgttactcatatgagtcttagagtcttccttgacacctctcttttttttacactctgcatcacgacccacatcagaaaatcttcttggccctatcttcacagtagatcctagatctgactacttctcttcatctcccacctggactactgcaatattctcctaagtagtctgccttctctcagtctattctttttttatttttatttttcattgagacagagtcttgccctgtcccccaggctggagtgcagtggcacgatctcagcacgatctcggctcactgcaacttctgcctcctgggttcaagcgattctcctgcctcagcctcctgagtagctgggattacaggcgcccgccaccatacccagctaagttttgtattttaagtagagaagggggtttcaccatgttggccaggctggtcttgaactcctgacctcaagtgatccacccacctcggcctcccaaagtgctgggattacagcatcatgcccagccccttttagtcttttctttacctacccaacttgtgtaatcttttcaaatggcacagtgtttcactttcttgattaaaacctttcagggccttttcattatatttaaggaaaaacgtaaatgaaactatgcaatggtttacaaagccatacataactggactccctagtttcttctctcactacaccctctactgttgccctttctttcacagcactgactacactggcctttttgttgttcttgaacacgccaagtttgtattggcctctgggcctttgcagtttccgtttcttctgcctgggcccttttcccagatgattacagagcctgtcacctcacttcgttcaggtctctgctcaagtgtcatctccccagagaggcctcttctgaccatcttatctaaggagtgtgctacctcgccacttatgccatctctctccagatgccatctctctccagtcccttactctgctttagttttcttaacaacacttagtattatctggctttatatatatttgttttaatttttgatagtctgtcttccctaatagaatataaactccctgaagatagaagttttctgctttcatcactaatgctgaaaacaatgcctgtcgcatagtaggtgctcactaagtacgtgttgaatgcctgaccttgggaaatttaagctttctggccccattttcatcacctgaaaaatgaggaaaataattgtatctaattcatatggcagatgtgaatgtcaaataagatattgagtctagtaagatattatggcaatagtgttggctattattttgtaattatcattaagtaacataaataatttaaatatcttgtaagcaacaaatacatatatgaatgcaatgtaaggtagaatttttgctatatgctttttacaatggttgatttcagaggtataacttgtaatatgtagttactgattactaagttggaggaagtagttataaatgcatgaaaagttaaatgccatcactatttaaataacccatccagataaaatagaaagtcgcaaggcataatttgttgcctaatggatttgcggctgctgatgatgattgctgtagttgttgagcaattttgtttttttttaaagcagggtgacctgaaaatgctttgtagaggacatgggtttgggccgccccttgaaatgctggggaggatttgactcctttactgtcgaggagggggaagggcattgccacagttgggacagtggcacaaactcaaaaggaaggaagaactaggtaatttgaaaaacagaataaaccaatttggctggaaagtgaggtcttgtgagaaagcagattgagagcaacacaaaaaacagggtaggaactagagaaaatggcttcaggttaaaggaactgctagggcagtaggaaacccttccttagattgggtaagcaaggaaggaaatgcctctgggcaattaggaaagaaggtaaatcatcaagggcttgttcctgccaggttgagttccctcttcccttacaygcaagcagctctaagcgaaacctctgcctttcctacagcggatgggtgtgctgtgtcctgagacagacagcagtaggaagaccagctctccggytcctgggacatagaaaccaattttgaactcttttcacacacaacaattttcactctagtttttaggtgactgattacaaggcaagtgacaattttcactctggctccttatttaaaaaagaaagaaaataatagagaaacttggaaattaaagatccatccatgaacatagtaatttacattgtaactgcatattaagaaatgttcagcttttttttttaagcagaagttactgtattgtgtcagattagtcatataaacccacattctcattattgtgtaaaaggaagtcatgtattatatgagaaggggccaaagtcgtctgtgaactgatcaggtatttaaaaagagaggttatctagttaaccttgagataaaatttgtttgaaattatacagttttatgtaaaattacagtaatttaaaagggtgctatcacacgcgccttcagtttattgttattgccaagttacaaaatgatgctacactttgcagggttagaatagatttcagagcaatttgtagtaattaagaataaccttgtaaaagtaaaagaagcaaaataaaacaaaataaaatgaaatatagacaggagccatgacagatgttacagaatagkgaagggatgtgaagacaataggtgccgttgtcattaccgcagccctggcaacacacgtcacagattaaataatgaatgccagttggtgggcacagagaggaaagaacagagagcccattgtttcagcttgtccatctaatttcaaaccaattgcttaagtaaagtcttctgtcttggttagagccaatggcaaattaaagagctgaaatattgcaaatcttgtaattcactctggatcaccaatcagaactaaataaaagagctttgagcaaggaaacaaattcttagccttacctgtaaatagaagcctggagagaagtgcaactcatcatttgggtgggcacccactgtgcccacctcttgcgatcaggttctagctagtgtggtatgagggaggggctcttcatcttactcttctgtgcccatgactacagctccatagagtggggtgacaggtaccaccgtccgctgcagcactggcgcagtgctgaggcccaggaaggagtgtcttcttagatggcagcttcaaggcacgtttgggttcctgccttttcctactctgaatagatgtgatgaactaacaggctaatacatgtgaaagccctttgtttacgcaaatgaaggggttactgtttttattattttagggtgtggagtcacgtggtagaaagaacacaaagtcagaagtcctgcgtttgcatcctagctttgaaagctgtctccatctcatactagggtcccccttttcgcagagctatttttaagtgttttcctgtggctttttctttccccttttattttaattaattaattaattttttttgtttacttattttgagacagagtgtccctctgtcatccaggctggagtgcagtggcatagtctctgctcactgcaacctctgcctcctgggttcaagcaattgtcctgcctcagcctcctgaatagctgggattacagatgtgtgccaccacgcccggctaatttttgtatttttagtagagacggggtttcaccatgtcggccaggctggtcttgaacccctgacctcaggtgatccgcccctctcagcctcccaaagtgctgggatcacagacgtgagccactgcgctgggctctttccctctttaaatcagatgttctttacttttacttgtgccatggggacctctttgacattctaattaagctaatgaaccactctacagaatatttattctgtaaaattaaacacataaaattaaaatgcataggattacaaaggaaaccaattatactgacataaagttatcaatatgcaaagaagtaaatatgtcatattgtaatacatgtcctttattaaaatgcattacttaccagtatctagtggcaggtctaataactactgtaattttgaaatagtgatgagtggaaatgatactttgagataytgcaataactaatgtgatatgaaaaatccttgatgtctaagaaaatatctttgacgtcaaagaaaatatctttgatgacaagttacagaaggaaatgataattttagttagaagttagtaaaaataaaaataaaattttttatcaacagcctgaattctgtctgacacccttagccttsccttaaatttcactctttcttctcatgctgtacattttccagggacaaactctgtgtcccactgtcccccagctgcagctgctccttcagtgtcagtgactcctaaatgtgcacctctgctgtctaggcaaaggactgtagcacctggcctgcatctcctggggcctgctggatatcctccctgaacagctcagaggacctcaaacccagcctccctcagtgaactccttggcttgagcatctccccaccctcctcccaccaccctgcccttcctccttgtccctaactctgtgaatggcattagtaaccaccacgtggctccagccccgagctggcttgacaagggagccagtgcgcatgctgctgcggggtttacggcacaagcctccttgatacagtttatgaaagtataaacttgtatgtcttacagcactggcctgtgcttgcctttacctggaatgtctaaattcctactcacccaaaaaggcctcattcctcctacttaccttttcaacatgcatatctggacactttccggtttagcatccgttggtgatgcctctttgctccatgatgtgacataagaggactctgccttcctcacagcattttcttctgctggtccctcagccttactaaggtccctgcaggcagtccctccaatgtcccccaccccgtttaccctttgccttggcagactgagtgagtgccctctccctggggaccctttcccttccatgtcacctccaggtctcagttctgtggccacttctctggaaagcctttatgaggactgttcacagtgcaggccttatccactgtctcccccgcccttgcatttgaccagggcctggcagggtttaagtggtacgcactcaggaagaaagagtttttaaagtacatggctaggagcaccgacctgggttctaatcccagctctgtctctaactgtgtgatcttggcagtgtacttactagcctttggacgcctcagttttatcatctgtaaaactggtataatagccgggtgcggtggctcacgcctgtaatcccagcactttgggaggccgaggcgggcggatcatgaggtcaggagatcgagaccatcctggctaacacggtgaaaccccgtctctactaaaagtacaaaaaattagctgggtgcggtggcgggcgcctgtagtcccagctactcgggaggctgaggccgaagaatggcgtgaacccaggaggcggaggttgcagtgagccgagacagcgccactgcagtcccgcctgggtgacagagcgagacttccgtatcaaacaaacaaacaaacaaacaaannnnnnnnnnnnnnnnnnnntacagtagttcatcatttcatacaaacaaacaaacaaacaaacttggtataataatagagtggtaatgtttaaatgagttggtattataaagcactttagaacaagcttggctcatcggaagagcttatataatagctatccttattcattttagttagtttgtttgttttgttttgttttttgagacggagtctcgctctgttgcccaggctggagtgcaatggcacgaagtcggctcactgcaacctccgcctcccgggttcaagcgattctcctgcctcagcctcctgagtagctgggattataggtgcactactccacgcccggctaatttttgtatttttagtagagacggggtttagatggggtttcaccatgttggtcaggctgatctggagctcctgactcgtgatccacccgcctcggcctcccaacgtgctgggcttacaggcatgagccactgcacctggcctcattttagttttagtagtacagcttgggctcatttaaaagtcatatcctgctatactcttattattgcggggttttattaaagaatgtagtgtaatttggtgcccaccacttaacttttcttcatcttcattaaggttaatatcagatattcattttagaagaattaatttatatgtggcaaaaggaaataaatttttgctgaaagataagagaaattctgggaatacagacatacagactgatggagacacagccccaccagtagtttatctagctgagttggggatttattcatatttcttccatttcaaagattgtgttggtctcccaggagtattttttgaagctctttctgcagaggagagatcaatattatttatcagaggatttccttgggcatgcaaatcatcatatatgtttgcaaaccagatccatgtaaaatagatggttttgaatctactttttttgcatgagcatttttatatcctctagaaatatatcactattgtggggaaaaatttaataatatttaacgacatactgaatgtgacattaatgtgctcgcatagctgctccttctctgtttttcttccaacatcaaagtaataacatttcccctgaggtttgttcagctcatccagctttcgcttggttttgccagcaggtggggtactagctccttttaaagtcatcagccacaggtcttgaggctcgttttcttttttccctgagaaaagaaattatcttgccccctcattctatggtgaccccatgagatcctcttgagccctgacctgggagtgggtagaggggtgggcaaggtgtgtattagatctaaaatagtctccaggattttcatgggtgaatttgttgagctaatggcttatatttcacaggttttgagtaacttgaattttaccagtaattcatgtaaatcagtttggcaacaggtgaatcaagctttgcctgcatatttggtccaatcttatggtttaggagaaacaataattaaagttcaaaaaccttggttattgtgttgaaataagtctcatttaaacaaaatacaaatcatggcaacaagccattagaattaaaactgttcttggagttgaaaactaggggaaaataagtatactgtgaacacattgtgttaaaaagctgatgttctaacaatatgctagaacattactgactctgttttaagatctaactgctttaaggaattgattgactacatttttctagaatgaaacataaatttcttattttgaaatcttagtgagtggtattaagttccattttaaaaggcagcttaaagatccatgttaaaagacgtgtcttagcttatacatccattctaaatgtaggtggtgaaactgaattataagaatgtttttaagatttatagacactaagtcagaatcagaagttagaaggttctttgacaaaatttcctattgaacttatgttaatcgttggatttgatgaggtttttaagcttattcaatgttatctgaaaatagtaatactatctacatttgattctcagaaatgataacttcatatgtccctcttatgcaatgtgaaattacagtgctatctgttccataactgccacacaacttgaacaatataaaagtcatttcatggccctaatggagggcagactgtatccccttgcttaaaattaatcattcactttattgcagtgtctgaggggagagaagggagtgagagttctctttgtttaagtttgtgttatggttttcttgggcagcaagtacaaaagtgcagcctgaagctgtagctcattctgtatgtgggttttatttctcacagcagtccggtgtctctttaacatatggggagtggtttcaagttcattactaaagcttataggctaaagtgctttgtgggcttggctatgacttaagttgccttgagggagtcagccaaaactgggcttgggaacaggaaggctttgcccgtttatttggattctcagggtagtcgaytttgccacctcttggctatcagctgccttggagattggtttcatagtaaggattctttctttaaggtgatatggakcaactgctttcacaggggcaccaggttagtaaataacattttgcactttctgctgcgtgtgtcagattttctttctgagctcacggtgtgatgataggacagactgggttgctgcgttcttttagaaaataatgtgagttcgtttatcctgcagaggtttagggggttatgtttctccttataatatatgcattttttgaccatattaaatacaactggaagccaagtggaaatgacatattagtatctgtgttggatttgcagtccagaggtcttgttagtaaatatcagccctgcccccgccccctttttttttttttttttttttttgagatagggttttgctctgtcaccaaggctggagtgcagttgaatgatcatggctcactgtagtctcaamctcttgggctcaagcgatcctcccacctcaacctcctgaatagctgggattacaggtgcatgccaccgcacccagctaatttttttttttatacttttttatagagaccaggttttgccatgttgcccaggctggtctccaaccccagggctcaagcgatttgcctgccttgtcctcccaaagtgctgggattacaggcgtgagccaccttgcctagcctagttcctttcttataattgctttctttgtgtcgtcgcactagaccttctaggtataaatatgattttatacacagttgattttattttttgaaacgttaagtagtggagtgttgggccccagttggggttgtcctccctcaccccactggtgcgtgcttgtctgatgsacggtttttcttcaggcctactccttggagtttcagtgaaccagaatatcattttaatttttctctttgaaaagtctggcacttttctggaatgcctcaaaatactggcataagaattgattcaggcagaatgtacaggtggattaagcccaattgaattttgtcttcagttttgctgtttttattctcaagtgattcttcagaatacgagattacccgaggattaaagaacagctgtaaaaatggagtgtgacttgtaaaacataaaagtatagttaatagtaattaagaaattaagtcaatataattaagcacagagaaagacattgtcttccttaatctcgttaatttaaagatctaaagagcaattctgcctttattaatttgccaccaaagcaatctggcatgaaattgttctataggagtagttcaatttggtgttttaaagtttgcaacactttatgaaatatagtttctcttgctttcatgttactttaaggatgctttagttcagggtaatgtactagtgttttaaatatgctaatatgcttctgttattgccattttattctccttttttccccactgsgaaatacagtgtattagaaagggtctgttctttcatgttcttctctgcttaaaaaaaattgagggggaagggagacagaaataggtacttaaaaaagatctctgaggtgatatgctaaactttaaggatccctttccccatcagtgctaagttgaagttacaatgttatggctgcatgccatttcgggattacaaagtggactgtattttataccccctaaggcacaattgtacagctgtgttattgcccctgcctctgtagatattttctttaacagtaagtttattacatcattttagctttcccaaaagtgcaaagattgctatgactttgctatgttttatatacatgccatatatatgctattactacgcatatatgctattgtgcaattattaattattaaatgatattaaattttaaggaacgacttgtccacctgattgtagctgcctgatgattttagagagaaatattaagacattttagtcgttgattacttgtttgtgcttgatgggtacagataaaggtctttaaaagcttacatgaaactcatttgtatcttgtggatctcagtttctgtgttcccaagtgcttcatagcttttcatctagagatggtaacaaagcaaagaccacagattcgaaacaaaaataatgtggcaaaggattagataagagggaaactccctaaaaaccagattttagggttttcccagagaatatacacgttaaaatgtttcctccaaacgtgggagaaaaaaaaggactgtacagtagagagttcaaaatctgtaaatttggggtaaagtgtctaagcaaaccttagattattcctgattctaggtttggaacacacattgcattcttgctctcattctgctggactggcttaattttgttatatctgggtcttttggctaataagagatgagcatttgtctcataacataccatctaattttaagttgagttttgtgctaattaatttttatccaacatgctttcttgttgatagtcaaagtgacttagatgtctcacacatctcagatggtttatggacctcgctgtgacccagaagggcgtgatgccaattttcttataaaatgaatctgagtttcaaagctggagagaaattcttaggcaaacttttttaacttgaattggctacgccccaaacgttgaggaagttgcatggcagtagaagatcaggactctgaggaaagaattgaagaactaggagtagtagtggtattagagatgaattttctgaccgtcgaaccttggtagattttcacctgatggaccagttccgttcttcacagcccagatcactccttgttcctgtgtgatcacacatagtcttgatctttgcagcgtacggtttgggaggtgcaggcttttcatctgcagtttatagccttgtcagcttcatgtattgactaaaatgaactgtgccacatctgccttttccatgcctaacctcctggttcttgcccccctcaagaaccaggtgcttgtgtgcacataggtcttatggttacgtaccagaaaatgtgggagattgtgatgccatccaccctggaaattcactattttagtaatgtcagtaaatacttaacttcccagagggattgcaaaagttgaggatagagtatactcctggagctgatctgaccacagagctccccagttgcctgtttcattctgaagaacccaatttaagtttgacccagcatttctggggtagtagtactaccccagttagtagtaatagtcatagcagaagtggtagaatagtggtaataataataataataataataawgaacacataaaagtcatttcctaagtgcagtcactgttctaagccccagcccccctctctttttttttgaggcagagtctcactctgttgcccaggctggagtgcagtggcacgatcactgctcactgcaacctcaaactcttggtcttaagtcagcctcccaccttggcttcccaaaatgctgggattacaggcatgagccatgtaaacaaaatgctgggattataggcatgagccttgtaaacatgcccggcctgttctaagccttttccttaatcctcacaacaaccttaagttgttgattttctttattatctccattttacagttgaggaaactattcaagaaagttagattgacctaagtcagagcaactagtaggcagctatgacagtgttgtgcatcagaaggtgctgtggagggggaagaactgaaaatagaatccaatattagaaaaatataagaaaaaaatacaacctaatacattttggattgtattatgtccaatatannnnnnnnnnnnnnnnnnnnnnnnnnnnnnnnnnnnnnnnnnnnnnnnnnnnnnnnnnnnnnnnnnnnnnnnnnnnnnnnnnnnnnnnnnnnnnnnnnnnnnnnnnnnnnnnnnnnnnnnnnnnnnnnnnnnnnnnnnnnnnnnnnnnnnnnnnnnnnnnnnnnnnnnnnnnnnnnnnnnnnnnnnnnnnnnnnnnnnnnnnnnnnnnnnnnnnnnnnnnnnnnnnnnnnnnnnnnnnnnnnnnnnnnnnnnnnnnnnnnnnnnnnnnnnnnnnnnnnnnnnnnnnnnnnnnnnnnnnnnnnntgtcttttaaacacttaagctacttttggggattttaggaggactttttaaggctaaaataataaagccactaaagctaggaacttggacttttctgattgtttagttttaatttggccagtaggagtgtcctctttatttctgcccagtatgacttcctgctagtaatcaaagctctggttatttggcagtcttgaaggtttccttaagtttagtggataaccaagattatgagacatatatttttttaaaagacataaatgtgcatttgaaaaatattgggcaaataacttctacccaatttggctaaaatttaaacgtgttacaaataagtttagaacctttaacaatatagaacaagataacccagacagattaaggagctaacttaaaagaaagaaaagaaacgaaaaaataaaaattctgatctttgaatgggtaagcactttctcttcccaaaatcaatagaggaaatcacaaaaggaaaaagtcaatagatttaaattttctaggtaggagtgtagacgctttaagtataaaaatgttaattgaagcattatttattaccatgaaaagttgcaaataataaaaacataaagtagcagaagaaaattgcatgacggaccatcacaattttatttatggaaaattgtaataggaggaaatggtgatgatagatatttaagtaaaaataatggatattaaactatctctccatcacacatctgaatgtgtttaaaatatacctctctatgtgtgtgttatgcttacagagacaatagaacggatgatcaccttaagttaatagggatttaggggttattttgaaggtgggatttctgatgatttatattttcttcttatacttttctacatattggtattttaaacatgattactttatattcattttaaaaaagggaaaaactattcatggagaaaaaagtgagactataccaacatataatagtagaaatagtagactaacattactcttaatctatttaaggtattggctctaaaactgattttaatttcctcaaatttgtatatatttaaggttttcttagatgagaatttatcatttttataataaaaattaaaattgattagaagtgacaggttagagttgaggtaaaatgaatttttataaaggacagaatcattttactttggagaacaattatattgctgcccttatacatcatgttaggaaacacctttttgacttttctgtgtcaagcttaaaatttcagttaggtttttatagctaattaaaytataaggtagatagtgtatttaataaaggatacggaggaagttcatgtaaatacctgaaacrtcagtccaggaaagattctttgagagattttcaatatgtccagatgtctggataacaattctttggtctaaacgcagttgatgatgtgatgaaagggacaagtcagcataccaagacaatccttagaagggacgatttgactggaatgctgaagacagaagaaaaccttagagtagctgacttcatacttccccttcctcattttacagatcaagtcactgaagcccaaaatgattgagtcctcaagtctacaaggtcgtagtagattcgaatggaagcttttggggtcctttgattccccctctgctgctctttataatattctgctcgttttcacacactttagtaatgatgaatgaaattttatttccatttctcctaggttggtaaaaactcaaagctaacaccattcagaacttacctaatgatgtttgaaaaagaggcggtaggctgataactgcttcctaggaagacctaccaacttcaccagcatgctcattactctcatcattgttgttggaacattttgttcttgggtacaagcttactttacacacatctggttactatgtttgttctggaagacggcagcctcatggagtgactagagaacacttgatactgagctctggaaatcgttttttaacagctttattgatattgtataatttacagatcatcaagataagccctttaaagtatacaattcattggttttttgaatatctacagagttgtgtgaccataactatagtccattttttaaacattttcatcactccaaaaggagactttgtacccatcctccctacctctctcttttcctcccctagctctaggcagctttctttctttttctttttctttttctctttctttctttctttctttctttctttcctttctttcctttctttctttccttccttccttccttccttcctttccttccttccttccttccttccttccttccttcctttctttctttctttctttctttctttctttctttctttctttctttctttctttctttctttttctttctttctttcttgatttgcccattttgaacatctcatatgaatggaatcatgcaatatgtgagaatcctgaaaattttgatttgattttcaaagaccgtgtagacaaacatgacctggttactctgcaggccccatcttcccaacagtgtcctgagtgtgagattaagaccaaatgaactctgtcagtgctgccaactgttttattggattaaatgacttgtttttggcctctggagtgtctaactctttaacttttcaaagttaaagaaaagtacatactcattaatgtgagtgtgttgtaggccatgttgcaaaattactgggttagatcattgcttattagttgtgaccttgagcaaattacatgacttctctaagactcaacttcgttgccttataaaatggggataataattgtacttaccttagagggttcttgtaagaattaaatgaaataatgtatataaaaagcttatcataatgccccatacattataagtgttaaatgaatattagtgattcttatgtgtcatcaaaaataaactgtagaccaggcgcagtggctcatgcctgtaacctcagccctttgggagtctaggcaagaggatcacttgagcccaggagtttcagatcactctgggcaacatagagaaactccatctctactaaaaacataaataaaattagctggacgtggtggcatgtgactatggtcccaggtatttgggaggctgaggtgggaggattgcttgaggccaggagttcaacgctacagtgagctttgatcacccattttagtaatgatgtatgaaattatatttccatttctcctaggttggtaaaaactaaacgctaatgccattcagcatttacctaatgatgtctgagaaagaggtggtaggctgattactgcttcctaggaagacctatcaacttcatcggcatggagacagagcaagactctatctcaaaaaaaaaaaaaaaaaaaaaagaaagaaagaaaataagctgtataatgttattttattctatttttatgactttatgctataccaaggatttgaattggcttacaagaatatttgcataacattaaacatatacacatacatacacccaagaataaaacattaaaatcagggatcaggaataattgtgttaatagaaagataatatcagaggaaataataacagtagtaatgatagccaacatgtatacagcaggttctcttttcttttctccttttttctcctcgtcttgtctctcccctcccctcccatcccctctcatccctccagatccatccccatcatccctccccccatccctccccctcctccctccccatcccctcccctcccatcccctcctctttctcttcttttcttctctgttttagagccagagtcttgctcttttgcccaggctggagtgcagtggtgtcatcaaacttcaccgcagccttgacctcctgggctcaagctaatcctcctacctcagcctctcgagtagctaggactacaagtgtgagccaccatgcctggtctatagcatgtttttaataaacctttctttcagtgtctttccatgtgagttgagggaataatgccaaatcataaatgagcagagacaaccaaatgagagtcccaggctgggaaggaccttcgatggtttctggtccacactcacactggggcatgagactttgccatagaagacaatttggtgtggtatggtgctggaactcagagtgtgagagtgagttcaccatctcacaatatgaatagctactatttatatgtatcataagcacttactatgagctaagttagaattagaatccaaaatgactccaaaactatgtaatcaggaagtaaaattgcttacttaaggcaactagttttcttgttaatagttctgttttatagaatgttctcacacatgttaaactgaaatttacactcttatagctgcccccttaccctcccaagtctagtaatatcttctacatggagaaccaaatgcctaatctgctagtccttcagatatctgaaaacaattatcattatcctcacctaactcactttcttgctcagacatccagagatgcatatattgttccttagattgcacagtccgacccaccataccccttcctctctcctggaacgggctttccactcacgtgagctcctaattggtcttcaagattcctgtccaaggtgctttatcagcggcaaccttccccaatgcccagatgttgagcagctcctcctctgggtccccgctacacttctgttcacactcttgagaattcactgtgtcctcccctggcttgtgagcccctgagagagagctctgtttagcttgtgttcctaaaccccatcccagcccctgacacttagtagcttctcaatacagtggaagagggaacttgatcttacttcatgtggatatttaactatatctgattttagagagtttgcaactataagagatgtttttggatataaaatgtgtagacaaaccttgattaactgagggctgaagaagatgaccaaaaagcctatggcttctcctagaccaaaagtagcatcatctggggaataagactgtgaagcccttgcacttggttactgcatcattcattttcacttggtgtctgctaatatcctgatgtaagtaaggtgctcgtctgttggacaaggttgatacccaccacctttgctcagagaaatgtaaataaaatgattgtaacattttacatatggttgaatgataaagttcacagtaaacttaataccagtgttcaaatgaatgctgataagaagatagagtccaaagttacgtttctgtattaatctgagacctttgcagttttcatggagtatgtatagatattttttcttaatgtgtggatagagggttaatttaagaaaatgtgtgttaacgggggaaacaaagaggctggcctgcatctaaaggaaagaaagtggatcttaccaagggtttgttgtgattcataaaaactggtccacatcttaaatggattaattataggcccaactggaacattcttcacagaatgagcccaggtgctggtcattttatctgggagtctcaggacttaccacgtgcctactctgagcactagacttaatactttcccactctgtaaatcctaggaaacactgcttcttgacacctgagtttgaattttccaggcttctccatccaagttgagtctgcctcccttgtgcatagttacagcaccagacaccccggtaaaaccaccttcttctccttgctttttgctggttttgctctggtggaggtcttgcctaggtctggaggaggaagagtcaggtgtgcaattctgaagttgaggtagatgccagcgtgtgttttctgagaccaaggaggctctcctggagagtgctggctctaggaaactcaggggctgatgaagcatctccttttttaggaagctctgcattttcaaaggccttttaactgttggatggctggatgtattagaaagtgagtgacttgccatggtctgtagaaggggatatccagacccttctttgcctgactataaagtgtgttcctaccacttgctctgctccctcccaagtagccctgctgtgatgttggctgatccaaaattcccagggctttctcacaagaatagctgctagtccaggcaactgccagcctatacatgtatacgtgtgtttaaacttaaatgaagatgtatacatttatcttattaaattttgtctcttttatttagcaaggaacaactctgtgtatgtccctttccccatatttttacagtgtgattacccgatcaaaaagtataaatgcttttgttgctcttcaaatatcctactaaagtttgcctgagaatggtgtctccattaacaatgccaccagcaagaggttgcttcagcacaattgttactagcttttaatacgatccattgcttgtctcatttgggctgggaacttgggtcccttgtggaaaactcatgcatgtgattctctcttggagttcctcaggtcccccttaagctcccatcctaggctgactcaggctggtgagttaccctgccaggtgctcccttggtaattaacatgtgtctccaggttgcagtggcctctggactccgccttgagccagacaccttggattgcactgccccagactttgctgtgcttccctctcatcctctgactttgagcatgctcactttcttccttttccatcattgtaaaatcctaggttattttaggcagtttatagaaattctctgaaactagaggatgtctcatgacagtaacagaataagagtgttgagaattaaaagcaattctttttatagaaccacggtggttgaaggagggatgtcttgcaaactttctagaagataatacctagatgattgattagcaagaaatccattctaattattctagttatcactagatgaaggcagggaaagtgatagcagaaagtgtgaagaatgtgtaattgaaggcattaaggaaaagaaaccacctgctagattttaaatcacaaaaaggataaaactcaataaaagaaagaatttctacctgtatactgtgtcattctcttagttctaggaagtgtcgatctgtaaaaatgtaattttaaaaaataaatgtaatttatttttaaaacgggaataaataaaaaagtcaaatatacttcttggcttctactaaaacctcctttcattatttgcatgactattataggtggagttattagggttcgataactctatcttgacccttttgtagcaacaatgaaatatcagtcttgcttttgcaagcaaaatagcagagcttctgcccttggggaagcaagagaaatgacaataaccgaaaggacagtaagactgttctgttagaacatcagtgttgggtttttgttaagaaaagaagtaaaacagcaagtggccagacaagctaattgctaagtaaaatgtarattgaatattgggcaagatgttaaaaagatgtttgaataagtaaatattaactaaacaattagcaatagatttgattatgctacatgaaacaaaacggtatgtgtataaacacaaagccacgtacatacacaaacgtgtaaaatatctttaattttcaggaatggaattctctagcttttctattaggaaactagaaggttcccttttcttctttttctcccttttctgctccccaaatttccctttctgttcttctactactacctacttacccgctaaccatcaagttactagtatgagggcatagggttgagagaatgtattctggaattaaattagaagaagaaaattccatagaatttctctttcaaagaataagtgtaaaattatctttcttgaatgaaaaggaaaaaaattagtatcttcagtaattagtatcttcagtatctggatatcatcaaaatataacttcattccattatttgcatgacttttataggtggagttattgagcaaaatgaactctcttgtgagaggacagctactgtcctgcacctctcagccaaaaatgcaggaccttctgcctgaataaggcataccgcttaaaaagaaaaccataaaccttactgaaaaaaactcatttaaatccagtttaagctcgtttgttagccttagtgttgtatatgtgctaaaaaaaaaaattgtgttaatatttaaaaggaaaaagtggccttgacaagaagcaactgctggattgtgaaggaaggtggtaatatcatacacatgttgagttttatcaatccacagggcagctctactttgcctgatgagtgattctgtatttgccaaagacttaatgtatttttatttgctacatgatacatgcttctaaagacaggtttggaaatttcagagagaagtagaatgatagatacactccctatagattcagttattgcttctgtcaccagttctctggggatcttcataggtcctgacttacaaatatccatatgtcactatccaggagaaggaaggtcctgatacagccaaagccagctggttttgttctctctgggcacaacgcttctgtcatattttccttcttggacattctttcctcctatcatgaaggaagtgttttactttggatctagtctaaaccagtgtctcggaagctgatatgcatatggctcacttggatgttttgttaaaatgcagattctgtttccagagtgtggccaaggttttgcatttccaacaagctcctggatgatgcctacgaggctagtccatggaccacactctcagtagcaaggatctctaggttttaattgtcgacagtcccagagagacagatggtggggaaaggtgagcaataaaacagagattaaatggaggagcaacatttgttcattgatcactatgattactttggccagtgtccagttaagttcagatagggggcagtgcacattgattaagaaattgggccctgcggtcatctttctgccacccaccagctgagtcacgtgagcacatgaccaatccctctaaacctcagtttctgaagttatgacatgcaaataatatgaaaatttacactatagggttattgtgatgattaatataatgtacatacttaataagggtttgctaactattagctattagtagtaataatccaggaagcatttattgaacatctaccacatgcctggcatgttaaggtagagatggaaagattaaaagccagctctttaatttcagaggagatttaattggtttatttgagagtccccagagttgagctaagatctaaaacttttgactccagggccagtgccctttctgtccacatgctcattggctatttcttatattgggtagctataaggaaacaaagctggtttcagaccagctttaattaagtaaaagccatgtgctgaatcagtgaattgaacatgttctgacttttaagaccaagtgatttacatttagttcctgtgtttgagcgaggtatctctgaagatggaaatcaaagggcaggttttcattttgttttgtttcgtttctttatcagctgaaactttttcttgggtaactagaactgaatgatatcaaaggcaggtataatcaatttttattctggcagatcaaattctgagcatatacatgccttccacttttggcatctatctttctgaaagtgaaatccggaaagtgatttcaaaaggactctgttttcacatgagctaacttgtttctctaatagagactaaaaattttgcatcccgtgtcttttccaacaattgcccagcatgagtgtgtgtgtgcctttgaggagctgggtattcctgctttgtgtccatcttttctacatttttttggaaccctgtcttaaaaaggaaatgatcactgacccagaatttctcttttctttatctgattgttttttctagttattgagccttccatactttctctgaacttacaatagttttctttgtgacacatacttttgtagttttttaaagacgataatagttcccagtatgatttctgtgtttgtgaaaacataattatctcactgagcagagtcttcagaagaaaacagtggaattaaagtaatattcaatgtagacgtcggtagattgctttctttaagtgttttgacaatgtcttttccccttttctttttagtataggcaatttgtctatttttgttataagaaatgtaaaaatggtttttgcctctggtttttctgccatgggatcaaggaaaattacctgccctttctttgaatattgattgatttttacaactcaggtcattattcctatgccattgctgattttaaaaaaatctttattgggatataatttataaaccatgaaattcacccactgaaagtgaacaattcaagatttttagtgtattgacggagttgtctttgcagatttttgctagcacgttgttcccttctctttctactgtgtatgctttagttcctctgtattaacatttctttaatgaattttgccactatttatagttttgggcagatgtaagtaccataacaatgactttttaacagctactaacttaaggcacatcctgattacatcgtatgtttttattcactttatattaatgccattttaatggtgaatcaataatctgtcaactatgcctatgcattcttaagcctggcatgttcttcattaccccttccatcctttcttccccccgaacctcaccgtcgacacacatccagtttagcttgtttaccttaaatattgcattgcttcttaaatgtgacagacagaattctggtggtcccattaaggcattactttacacagctgaaactcatctggaaatcattgttccctgtagcaactttatagagagctggttttctgtttagcagaatataaatttgtgatagaataccatagtttagctgggtaattaaaaataaccaagtaaaagtgatgttacttatcctacaaaatcatatttggggcagcccaaacttatttttactgaagactttttagctctaggaccacagcatcaagaccactctggcagaagggggtggaaaggtaaagtctaaatgccttaacatcacctgccttgtactctatgtccaggtacactgcmcctttttcatttcttcaaacatatcatggttatggagttaaaatacagtggtcagatgggagagatatttagaatttggctggatttattaattgattggatatagagagttaggaaagagaattgctaaggatgagttccaggattctggtttatgcagctgggtagatgatgtttccaattttcttcaagaagaaaacataggaagagggagtgttttgtggttagaagatgatgaattctgttttgagcatattgagatgctctatgggatcacccagtggggaagttcctaggcagctggatagataggtctgaagatcaggacaaggatcgcagttggaaacagttactgagagcccagtagatgctagtgatgggcaatacagagatggcctctctcttcagggagctcccagtcttttaggggagacagaagccaagaggaaaggaatgtattcactagtggtatccctgagtaaaggaaacatcagcatgtattttaaccattagagtggatgagatcaccctgagaagagtgagaaagaataatcctgggaccctgaataatattagcatgtaaattttgagcacaagaagaacagcatcaaagaagacttcatctcagttggcagagagggaggaggaaaactagaggagtgtgagaacatgtaagctgaggaaagagaccctcaagaaggatgcagtcaagggttgtgcaacagaaagattaagtgagataagaatggggaagtgtccttcgtattctggaatatgcaggtggttatgaactttggagagagctgtttggtggagtgtacaaatggaggccagtggcagcaagttaaagaaggaggagggatgaactagaaggaggaagtagacaactttcttaggaagttgactttgaaaagggggtgagagacatagctggaaagccccataaataccagtctatgtagttgagtgctgtttctgcagcccctgtttagaagccttggggtaagtgccaagaaggcagatagttcgtgtggcccaggattgmatttctccagatgactgcaaaagaaggacayacaagcagagatttttgggcaaatgaagagtcagagatggactgcatgctctcagttggatgaacagggtgtgaggtctagaaggagctggtggcgagttaacaccttgttggagatatagtagtagctgagtctcaagggtgaccttggataaaagttgcctgcacagctgtctcaccagataggatggagatttcctggttttaataaggagcgagtcacagggcaaatctctggtcattttgtcataagccctacatttgagatgttttgccacttggaagaaggatgtaatatcactaatatttatgttcatccatcacactggagaaaaatggaagtgttatctctattgttctggttgtattatttccttttctagctttacttcttttgttaaaattagccagaattgacttatcttcaattctaataagtagtttggttagacacaaggtgagaagactggtttccagatatgagattttgatgaggatagtttatggagaattgtatacatctgaatatgaaggcagtaacttacaggaratggaaaaagcagggaacatgaagttgaggggtcaggactgagtctcagaccaacagtttcacagtatgaccttaatcactttgagttattrcttcttcaatgaaaagaaggttaaaaataatagtttcccctgtaggattattaggaaaattaagagatatgtgtacagaatgctttgtaacccagaaagcattacacacatgttccttgtgctgcccaaactgtgagcagttctaagtcttattcatattcattcattcccatttgattcattcagaaacagtgactgagaacccaatagacaccagtgactcaggatttagagacagcctctcccttcagaaaactcagtcttccagaggagtcagagaccaagtggaaaggagtgtactcaatgaactcacttggatgccatagaaacactgagagaaaaggcacctaaaccagcctgggctgtcaggggaggctttctggaagaggtgacacctgatatgagtcccaatggatgataggaatcaatcaggcaaagatggggttggaggaacgcaaagctgcagacggagcagcctattgaaaggctgagtttggagagcatggagcatgtttggttcagtccagctgagcagggaaacgtaatacaaaaacctcaactatgaatcacagggagagagaagcggtagaagggaacatatgtgtaattgasatacttgagaatgttttaagtggtaataggggaaagtcacaggatcaggagaagttgatgagggagttgactgatgaaataatgagaggacggttggaaacaagcaaaggtgggagacaggagaggcagaggaggggtcttcttccaatgttttggtgggaaaggagtcaaaatcacaaataaggtgagggacattgagagattctgcccttaaagcctcccttgtcrtggtaaagtgaaatgcatgaggttattttatattctcagtgcctagcatggtgctcagcacatagaaggtgttcaataaatatccattgagtgaactactgtcatcctgagaagctgcttaagaagccctgcaaagcggctgcactggaaagcaaggtggcttatcagtctggctggtgcacaccgactctctttccagttcgtcaaagtttggcagcctgccttttaacttgccatttcttgttagtattgatgcaacccatgtgcttctgacccttgggaatgtcgtcacaggattcaggtgtcctgagaatatctctgttccttagtactatgcataggagcagcggttgaacaaagaccaaactagttctttctcagtgaggctggcagcctgtccacacccactgagcagagtctggctgcagctcagacaaaagcagtttatccagcccatctggttgtctttcttacacatttcagacatggttcaaagctgcattataaagaaataatccacccctgaaacaggcttgtatgggcaagcagagtgcaacagaggtgtgagttctagtctcatcaatcctttgtctgtatgcttctgagcctctgtcttctcagtgcattgaagaggttggaccaaatgaatgcctagatcatcatgtgtgccaggcattacagaccaggttttgtattcattggtttcttcagtctaaaagttgtatgctcagttcttactcagtgtctgccaccaaatatgtgcaccatacaggttttgaattgaattgagttgcattaatttctattctttctaagacacatacacacatatagtaaaatactgcccactggttatgtaattcatttccctcatttaattcatttcttctcaacaaatactaaagatatgagagagatcagatttgatttctttcagagatggcaagatattaaagcctctgaagtgtggggtaagaagaactaggaggtctgtgcaggctcagagaaagtaggctgtgatcacagattaatgtttgccatggagatgtaactgggaagtctggccacaagtttcatttattgtcattctgagttctcaaagagcttacagctcagcaagagggaaagagctgcaaatagataacttcggtttagccagaaaaaatgtcagatttgtatgatagagaccacagaaataaaaattcactgagtcccttttggactccttgctaactgcgttctcctcccacctctcttgctaaaggttaccactcttctaaagttattgtgtatcatttcctcaattagtttttatgtcatacttccatatatatttatccatagacaacctaacaggattgttctatgtttttaaatcctaaacaaaaactgtaagctggatttttcccaccaaactttgtattgacatttattcatgttgatacatgtagttctaatgcacttattttctctgctgtatagcattccatttaaaacattcatttacctattctctgatagatggatattttcagttgtctaattttctttctttctttttttttttttttgagacggagtctcgctctgtcgcccaggctggagtacagtggcgcgatctcggctcactgcaagctccacctcccaggttcataccattctcctgccccagcttcccaaagagtagctagcactacaggcgcccatcaccatgcccggctaattttttgtagttttagtagagatggggtttcaccgtgttagccaggatggtctcgatctcctgacctcgtgatccgcctgtcttggctttccaaagtgctgggattacaggcgtgagccaccgcgcttggccatgaaattactttctaaaaggttattttaattcacagcagtgcatgagagttccatttcctcaccaatacattgtaattttatacttggaaaaattttccgatccaatgaatgtaaaatagtatctcattgtttcaatacgacttccctgattactggaaaggttgagcatgtttaaagttttattgacaatttagaattgatctcctatgggttacctgtatatgcccctggcccttgttctttgtattttttacatttttcttatgtttttataggagttctttatacattctacttatgtcttctcccaatctggtgttcttacaaattttgtgtgtgtgtgtgtaattttcccatttgttcaatgaacgttttaaactttagagtagttgaatttatagcttttcctttatggtttgtgctttttattcctttctgactctaaggtcttaagaacattcttctatatttcaaatgtttacatgtttgtagttcatgtttagctctttaatcctaaaaatatttgttkttcatatttgggactataatatggaaactattcttattggagctttgaggtagagaactaattttattttatatttctctgaattgccaatagtctcagcattgtttattaaacagtttatttttctccattatttttttcatttcacttttgtcatatgccaagaactcatatttgaataggtttgttttggggggggtccctacttggttcagttcatctatttctgtgccaataatgtaaaattttatttctttcaggttcgtaataattattgatctacctgatagggcaagtcttatctacctattataatttctctgttacagattccaggatcatattgtcaggttctgtaagaaattcttaggaatttgaatcagtagatttcctttgaggaaaagcaacctttgtttactaattcaaccacattaattaagctttaggatgttgtttcaatcttatagcctccatttatttctaatgagaagtttatcgtcattagtgtggttctcctgaacacaagctatttttctctggctgctttcaaaattgtcttttttctttacatgacagcagcttgactttaatgtacctcggtgtaattttctttgcatttattcctgtttgggatccgctgaacttcttcaacctgtaaatttatttctttcaccaaatttaatgaattttttatcattatttctttacacatttttttttctgccccattttctctttaccctatctttctgggattcaaattatatgcttgttagatttttaaagtattatcacatacaatactaaggctctgttcatttctttaaaaatcttttttcccctctgtctgtccttcagattggataatttctattgttgtcttcaggtttattgaccctttcttctgtcattgctattctgctgttaagcccatcctgcaaattttttcttttctctggtgagattttctacttattcgttcactaaaaccatattttcctttacatccttgagcattattataatagtcactttaaataatccttctcagctaatttcaacatgtcaggattggtctctactcttcacaatggagcacatctttccgtttcttctatgtgtagtagttttaggtgacattgtgactgacatgttgtagagactctgaattcctttatacttctttccagagttgggattttttgttgagtttagttttgttttccagtcatttaacttgcttggactcaaacaccaaaccccatctgtcctgtggtgggcagtagcagaaatatctgttaaagtcattttagtactagctgagttgcattggaatgtatcccatgcctatgtagttcaagcgtcagcctatgcaaaatttggggctgtctccctctctgtggctctctcctttctaggatttctggcctcacttttcagctgctgtgattgctgtgaagtttgttctttgtttcttcaagctggaaatctatggactttctatccgagttttagtcactcaagttgacatggtctgggaccagcccttatacaaaaacaatgctgtttctttcttccaaatgtaggtttccttgcagtttcatatatatattccagaatatgtaattatctgtgggatggtaaatctaataaaagcactacctcaattactgaaagctagacattgtgatcttggataatttttatgtacagtttttcattttgtagttaaccacagttccatgtagtttcttcccagggatgctgggtgtggttatttagtcccttttaaataggcagtgtagctcgctgaagctctgggtttttttgtaagagtgtcacttccaggctgctgcctcccatgattctgagatcttatctcctaaaatttatgtgaggcaacagaactgtaatctcagatgcttatctgagatccagaaccctttgggccctacagcttcagttccagtgtgcccatcagactttagtttcttcattcttagacactgtaggttttttcttcattattgtttttgttgctgctgccactgctgttaaccttgaataaatcttttcttaaaacaattacaatttacctaacaattctgtgttttcagtagaaatggagcatatgtattagcttgattcattttgtttccagaagtttgtagcagtgttttctatagtggacaacatcagaccattcccaaatccaactgttgctgctagttcctgtgcttaggggggacatgattcaggtaggaatatatggactttgggcaggggtcttactgatagctcttagaataactaggggcataggaacaactaacattattttagcatctagtatagcccaagctctaagccacgcaatattacttccattttacacattaggaatctgagacacagaaagacagaaataacttgtttcaccataaggagagtcatatttcaagttacttcactcaaaatcacatatctaccatggtactgtactgcctcaacaaacatttttagtaattacatagatggccaaaaaattgaaattgtgctatgtctactagcagttgtgacagaattcaaaagctaatcagcactggagagtgtttggaggagattacaatgtgagtttgccagatccattcttctcatacgtgaaattcatgggttatcattgaaaacactctctgtactgccaaaactcacaccaacagaggttgcttccctgttgctttgaagggaagtgaaagaaaggaatgcatgaatattccgttcttggccatgaagaaactgagtattcatttaacatccaaggatgttaattttagaagtctgaccacagtttttagcaatattaactacctttcttttataaagaagaattttccctttgacttaagtcaatccagcggttgtacaaagtctgacttacacgtaataaacttattaacaggctttgaagtcaggagtaatcctcccatattttctcttcaaatacaaatctttataatgtgccttgtcatttacaggggcaggaataaatcttcttagacgttgactcggaatcctcatctaaatgcccttggcatttgggctagtttttgtcttctgggtgatgtcacttagaatatgttgtttttctaacatttagtaatgttgagagaggagtttttaaaattttaatctatctattgtaaagtcctaaacacagacaacttcatattcatgtaaaacagatattttaattttcagtttttaggtgaggaagttgagcaccacctaaagttactttgcccaagttaatcaaggcagaaataatagcaaattagatcagattgttgggtgacccttacagtcacttacctgtctgtgccttcagtttccttgcttaaaaggggctaagaacagcagttacttcataggtctgttgtaaggacagattgagttaatgcatgcaaaccacctggatcactgcctggtacatagtaaacatgatgcaagtctgctttttaaaaattactgttaaattcagcataaatgaatttctgcaggagccaggatggttcagaaaaaaacaatgaacaaaacatgggctttggaatcctggttctaacactatcctagctcaagtttcctgtatagagcctctaaggttgcatagtagggttgaatgggagtagttataattctagaggagaaaaaaaaaaaaaagagaggaagagaagagaggcagggaagaaggcaaagcagtcatttcctggctggccatagcttcccacaaaaagcagccagttgctccatcacatagaacatcatccagatcgactgttttgtatcagtgtgctcagcacagccaaggccaaaaggagaggggagaggcatgcatctgccagcaacttaacctgccctagtattgtgtctgaaattggtgggttcttggtctgcactgacttcacgaatgaagccgcagacccttgtggtaagtgttacagttcttaaagatggtgtgtccggagtttgttccttctgatgtgcttggagtttcttccttctggtgggttcgtggtctcgctggcctcaggagtgaagctgcagacctgctccttgagtgccacagctcttaaagtggcgcgtctggagttgttcatttctccgggtgggttcgtggtcttgctggcctgagaagtaaaactgcagacctttgccatgagtgttacagctaataaaagcagtgcagacccaaagcctaaacagcagcagcaagatttattgcaaagagcaaaagaacaaaccttccaccgtattgaagggggccccagctggttgccagtgctgtcttgggcagcctgcttttattgccttatctgggcccacccacattctgctgattcgtccattttacagagagctgattggtccattttacagagaactgattggtccattttgacagggtgctgattggtgcatttacaaaccttgagctagacacagagtgctgattggtgtattttcaatcctttagctagacataaaggttctccaagtccccactagattagctagacacagagcactgactggtgtatttacaaaccttgagctagacacagggtgctgattggtgtgtttacagaccttgagctagacacagagtgctgattgttgtatttacaatcctccagctggacataaaagttctccaagtccccaccagattagctggacacagagcactgattggtgcgtttacaaacctttagctagacacagagtgctgattggtgcatataggatcctccagctagacataaatgttctccaagtcaccacccaacttaggagcccagctggctttgcctagtggatcccgtgcccaggctgcaggctgagctgcccgccagtcccgcgctgcgagcctgcaytcctcagctcttgggcagtcaatggtaccaggygctgtggagcagggggtggtgcccgtggaggctccggctgtgcgggagcccgcggaggggaggggctcgggcatggcaggctgcaggtcccaagctctgccccgcggggaggcggctgaggcccagtgagaattcaagcgcrgtggggcgggccggcagtgctgggggacccggcgtaccctccgcaactgcttgcccggtgctaagcccctcactgcccggggccggtggcgccagccgctctgagtgcgggacttgccgagcccacgcccacccagaactcgygctggcctgtgagtgcagcaggcagcctggttcccactggcgtctctccctccacacctccctgcaagcagaaggagttggctctggcctccgccagcccagagaggggctcccacagtgcagcggtgggctgaagggctcctcaagcgcagccagcgtggacgccatggcctgaggaggtgccaagagcgagtgaggactgctagcacgttgtcacctctcagtatcacacgctgtgtgacttgcttccctgtactcctcttacccccctgatgtacaactcctgaggaagcaagagaacacgtccctggtgcagcacttcaactgaatccaaaaacatctggatgtgccagtgcctctgagggtctggttggaggtcagtggagcccacgtgctgtgctgcatgccatggaggctgtgccaaagccctgctcttgcccagaaggaggctgagatkgttggtggcattaggagaagaagtgagagcagttgtgactggggatctttactgagcagaggccagggatgcagatggacccagcccatctggaggcctgcatacagggaccagtcccaccactcacaactgtgcagcctcagtaagctcccatggccccagtgagattgttgtgaggattggaagtaatacctgtaacgtgcctttcagtacaggcactcaggaaatgacagatcatattttcttaaccatcaacatttgaaatagatgtcaatttcctttaacatttgtatttgactctggaagcaaagtttgaattcaaagatatgactgagatgagctagaagctgacaccactgcaaagagggaaatatttaactctaggatatattaaaggaaattagaaagctcatgccagagaacaaatgccgaggatgtttttaaaaggtcgtccaaagaggtcaaagaatttaggaaaagtcatgagaatcaagaaatgcttttaatgccccaaaacgtgtgagttatatcctaattcagtattggatagtgaaacagctgtctacaaggttgtcctttctggaaaccatgatgtcttatgggatttcttattgcctccatggcataaagctgccttggttttcttgggttattattaaaaatggctgggatagatcattatcagaagtatcctaatgacatacttactagttgagattagctaatggcagaaattgtggaaattttaagagctatgtaaccattttgctttatgtcattatagatgtgtttttgtttgtttctttgtttttagctaggggaaaaaaagagaacgtgagttcaacttctattctgtgggcacagtgagtccaaagtatttagcaccagtctgtatatctcagggataaaagcagcgtcagcattaggccacgtggagggtgtgatataaaaccaggagagaaggataagtaagtggaagattgctgggctctgggctccctgagatcagactagatgtggagctcagtggaagggctgtgtttgggagtcagacttctgactcttagaaccatagacataatagcaagctggactcacaggttatgggcaggaaaggcggctgggtgattccatgtcttggaatctccttttcttggcacgggcacaggtggaaggcagaagaggagcaggtgcatggcttttgggtcagccagagccaggctgagagctgacttactgactttctgactcttcacctctgtcagactgtctgcaaagtgggaatgatgacagtactcctcatgaagttgctgtgaggatcatttgacatgatgcatgaaaagccctcagcaaaagcctggcacacaggaagcttcactagcagtttgctgtgttagctgtgattgcgttggcagccaatctgtttctaacatgttacacgcctctcaggggcttttcaaccagaaggcttctacatctgagtgtgtctgtggtatgcgagggaaaataatatctctttgtgtcatttactgaataacctggagctgacagctttctctatggacagctcattgattatgtcacttaatcaacaaacgtattgagtgggtgctcggctgggtgtctgtggtgaatgcccatgactctaaccctcctccccaaagagtgtccctgtctagtgggaagacagatgtgtcagtgcatcagcacatgattgcggctcagtggacgtgcttcttcacttaaaggtcttgagagtgcaaccatgaacctatgaaaatatatgcaaaatgctgtgtgtgagcccgtgctcatttttttctggggttgtgggttcatagatttcatcaaagttgcaaaggatgccggacctcaaagggagcaggagccactgttgtgagaaaagtggagagcgctatggggatgccaaggaaggattgcataaccagccagggagagcaggttggatgaggccaggaagacatgcagggaaaaggaagcattagctgggtctgactggctaatgccttccatgattgtttttgcagaggaaggcttactggtttctcttatacttagtgtagtacagtccagaaatttcaggactggttgaatgacagagacccattcttagagtagcccagccagaaagacagttgcaagatggtatgttagttttgggagctaaataagagatgaaaagcaggataaactctcctaagattattttttcaggggtcagcttttaatagaattaaagatgacactagcaaccaagatgatttttgcctgtagatgagtatccatgatcacatttgctcctcacagcttcccaagggaggaagcatgagtggaacatttcacagagggacactgcaaccctggggctggtagttgcccaggttacactcatagtaaggatagaacaattctaggtcatttgatctttcccttataccattgacatctcattttctgtccaaggtacataatcaccttccattaatatttgcagaagcaatgttccttttaaaaaaaaagtcaaagatccaagtaaacatcagaggatatttaaaatgtattttctcaaaatatatagtctggaatgtaaaatatgttaatatcatttactttattcaaagtcagctaaactcaaaaaatatttatccaagtcgtattatattactaaagattgagtttagtacttgaatccacatttataatttttatatctcagagagcatcaagtcagttccagatatagagttgctgtatgatgtgttttcataggttatatattatggatcctttaatttatttcatcatcatgaaaaaatgggaaaacaagatatccccataactcagtttgggtttaaactatctaatcataatttttttttacgttcatacattatgatataatttttggcttaggaatccattgcatttatttatctcagttaagtacaatagcagctagaaaaaaatgaatttttgcatattatgttagaaagggagcaataagtaaatcgtaactatgttcatagagtgaatgtgggttgtttttattttaaaaattgttttactttttagccatgcgtagtggcacatgcctacagtcttagttactctggaggctgaggcaggcaggtcacttgagctcaggagttcaaggcggcattgagctatgatcataccactgtactgcagcctgggcaagagagcaagaccctgactttaaaaaaaagttttaagagtatatgaagaaaattgtaaaagtctcccagtgcccatctttcctcccaccccagtcccacctctggattggcaagtagctgggctttgaggtcagatcaaattgatcaccagcttcatcacttcccagctgtgtggccctgccaagtttctaccttctctaagctactcattaaaaatgctagtaacaatgggacccagctcctaaagttattgtgaagattaaatgagatcatgatattaatcactttgtacaaaacctggcatgtagtacatatttagcaaatactggctaatgttcatatttatgttaatatcaataattatagttgatattattattgtattttggctaaggcaatgtttatctatttgttatctgaaaaggaaagtatctgcttctctttgatgttctacttcccaatcttgttgaaaatcaagaatagaaaattatctgatttcatcactgaataactggaggtcattaaatcttccctgcaaagattttcagttctataattcaaaacgagaataaaaaaacccttatttgctttccagatacaaatgcaaacagaaataaaacacagctgctcttatctctccatgggcaccatctcttcttggtactgaaagagataatgatcttgcagtataattttataaggaggtaacaaaatcaattgcattatctcaagtgtaaacactgaagcccttatcccattgctggctaatataggctgtgcctgtggcagctgctcaccccctattatagattattttagatgaaagaaaacattgactgataaatgaagatttgacaacataggagcgtagatrgttttgcagcttgatattcaagaatgaaaccaacaatacaatggttggatgaaaagtcagcacacaatgcccatggacataagtaaaggtagagatagacaaatcacttctttcattgtctattattaaatagtaaagtctttacaaaagcatgaacaagtctgcaaatgcattgggtccattgaagttccacatgatcttataaaatattataaaccataaaagtaaaaggctaagaagaaactcaggaagctgttgagatatgttgttttcataattgaggtgactgtgggattagtatgatcccttccaaggtatggtgactaaagtagaggacatgtcttgtcacaggacttaaacttcatataaaagatgaatttagatttatagacattcaagcccataaaataaaagtaattatgggcctctgtaaccaactccataagattttagagccagacaaaatctgctttataaactcaacactgacacaagttgagtgaccttggacgattgtttaactcaatctctcagaataatcatacctaccaggtagggtcattgtgagtattaaataacataactgtgctaaaattgtgtttagcatgtaataaacacttgataaatgataagatgttttctttgtttcatgtctcactcttcaagtttttcataagtgaatatgcttcttttttctctatctgaagtcagatatttatttcagcttggtgcattggctctgtaacactgtgtagattactgtagtctttgtatttcttaaaattaacaggcatttttaagatcagcacatagttcaaaaggaaggttatttggagtaacctttgtttttcttcactatgttaagaaagttggcaaagttaataagtctgtttaatcaataaaaaatatctgaagtctttaaaaattaacaagctgcaatgatatgatgtaatttcttatctgtttttccttgtctcttttcctctaaatttttcattaccttgtattttaaataaagtaaaatctgacacattgttaagtgtttgttgaatgaagaggaaaggacatacatattttgattttgaccaagggcaatggctcctcaatggaggctgaatagatcttaattaagttatccaggttagaaaacattctgctacctgcttctcttacccaaatgcaaaactactctgattaatctcttgggataggaaaagggttaaagtaattaaattataagggaggctgaatacttttatggcatctcttatctacagttagggttttcgtgttaaaagaactctagagatgaaatggctcaacctcctcaatttatagagaggaaacaaagaccctgggaatttaaatggcttcatcctgtggtaaccgagttgcaggagattatttccaattcttcctgttagggtttgctcttacatggacttgccccagggtacttatttatattaactgttccatctattccaaagcacttacatatctacaaagaatagagagcaagataaaggtcgtggttgagaatatcaacttttgggttagagaaacctgaattccagtcccttcttcaccacttaccagctgtgtgaccttgacagattgtttaaaatattggtcaagttacttagtctttctttgcctcagtttccttatctataaagaggggatggcaaactcctgtcatgctcaaaatagaaawaacaagccctcacagatttattattaatgacaaatgagacaatgtatgtaaacaattatcaccagcgaggtgcattctaaacattagtaactattaactattatgatataaattagaagtgggagggaaagttgaagggaagagatagtcctatacttggctatatagtaggccacaaatttggctccaagctttcttacaggcaacatagagaaagaaacatgattgattacatagttccagggaacttagatatatgaattttatatgtctggccaaaccagaacctccctccttcgctcccatttttgaatttccaaacacagtctctttctcccagacataaaagtataggttttcgagactcattgagttataataagggctgtgtaagtttgcctgagactttcttagcatttcccatatagccacttagctttttgatagcacctgcaggagagacccagctaagtgtcttcccctgggcaaatttcattctcaagaagcctaagaccttggaggaggccaggggtgaactttgggttagatgcctcattttcctcacccatatcaggtgctccttaatcacaggggcctgccttattcaccttcacgttttcattcatctcatctcacatgtggtggatgctcagtgtttgtgatttgcagtaagaaaggaacatgtgccaaagagttactggtatgagcgtccttccattctagggcctggttttaacagattatttctacatcaggcaaaacagatgtttcatccaactctgatgacagtgtgcaaagcttgaatctcaatattttacatgaaaaataatatccatgtgaactcttctgccctgggtactgatgtgcaacgacttgtgttattaaatgtcagaatgaaatagaactggttttctttaaagaaaaagaaaggagggaagtataattctagcacctcagatgtctttcggaataggtatattaatcaatttcctttcaagacacatacgtcattatacctcacrtaaagtcatggccaaaatctcctttcttgaagaggtaatatacactttgcttgggatatcacctacagagaaaatgtagaaatattatgctatcataaaaatatttctaaatctatatatttcaatatgtgaaatactctaaattttctttaggaaatatttagagttgcttatttttcatgatattctttcttcagctgtatttattacagcaaataatctatttctttctctgaataagctttcccaaaccaatctcccttgaattacttatccaagttaataaagttggatgagagaaatgttggcattcaatgtggtgttgcttttttttttcttttttttttctcttgttttcaattaagcactctgttttaatttacaagttaggaatcctttaaatgttaaacaggaacgtaaactaaaaggttgttttggataactgaggctcacacagagcaggctgaattgtttccatatgctgtatctaagtctggattcaaattgtggaatagcattttatgttatcaaaatgctaagtctttgtaaccgttttcttctttcctagcccctttgcttttactctgtccaaagttaacatgtcactgaaaaacgagccacgggtaaayacctctgcactgcagaaaattgctgctgacatgagtaatatcatagaaaatctggacacgcgggaactccactttgagggagaggaggtagactacgacgtgtctcccagcgatsccaagatacaagaaggtaaagacggatgatctgagcggggaagaaaagagtttatctcggttggtcggaagaccacaaatttgaagtaaccagcaaatgattgattttccttgcagatgtaacaccgggctcagatcattttataagaggcttacttgttttaacacgtgattcttaaaagaatgcctgtaaaagacaagttatgctaatcatatattgcattaactttatttacttttttttttagtgtatatccctttctctgctatttataacactcaaggatttaaggagcctaatatacagacgtatctctccggctgtccaataaaagcacaagttctggaagtggaacgcttcacatctacaacaagggtcagagcgtttatggactcacccttttttcttttgtcaatatatgtgaattagtacatagcctttcattttcctccctcttagctatgatcatgtttgtaggtttttgtttgtttgtttttatgtatctatcatttccaagtcattttcacctgtcaagtttttgcctccttcccatttaatcttcattcttatattcctctttcttcatttgagccaaagctctttcttttaaaaaggcatgtaaggcaaattaacagtttaataaattgcaaagtgcctctcttaatcttcttctctccccagttttctgtttcatttggactcttgatgcatatttattccaccttgcatggcaggtataagtcaacaagaattttagctttcctaatgtttatttagcatgaaaatgttggtgctacctggctcttaagaaaaaaagccrggatactggatcggccagtgccattacctcaaaatactgttgagagaattctgcagccatactctgcctctctgattggttcctagaaaaccatcctttagtcctcattcacgtgatatttcactgaacgctgaaaaggctttggagtaaaatgtcttcaacaatcaaagttatgccctttgaaatggattggactagaagaagctgttagggtagctacttttctctgttcctggctggattttgcagttgttaagtctccgggggaggacaattgctgcagggtggtgacctttgtcccttcaggctaagatctagccatggcagagtaaggccaccactgcctcctgcctcaggggaagcacagattaataaccagctgtcagggcatgctttgccttcccttcctccttgtcttttggaggtggcatgcgctgcattgctttctgggtggttttgcctggtgctgtgtcccagcctacctgcacatgtactgactcccagcttacactcattttggtgtcagcctctggtttaggctttccctgtgactcgggtccatgtctccctgatacaccactgagcacaactccctcagaaatgtctctaagatgagctttgttttcttatttcacctgccagcatttagattgaaagawaataacatgtgggggtaaatgacagactctagaggcagactgcatggtttaattcatctttgccttgtgatcttgaatgagtgacttaacctctctgttcctgtttcctcttctgaataaagggtataacagtgcttacattataggtttattacaaagatttagtaataataatacatatgtattatattatacaagtatacactgtatactcattactgcagtcactttttccacccacccctccttaacactggtggttccttagggtgggtgggtggtatagacaaggctggaccttggaatgtgtttcacaagagaaggagagaaggcatgtcgtgccatttctgaagaacaaaaacagccaagatggtgctgttagtatacaatacgtctcacccctgccaattgcctggtgcacggcttatatttgtggactggacccctgaaggctaattagggcctttctcattgtctcctccacctagttcttcatttcaggtgtgtgtgtgcgtggatkcatacacgcacatatgttggaggaacagcgtttgtaggaatcgtctygtgtgattgaaagtttgtcttatgtaattcatcaagtgaacatttagagaatattatttctrcaattggctgcttttgaaacaaatttacttaagtacttacacaaaataagtaggctggacttaagtatacttctctgttactagttaaatattgttcactgaaagcttttggaatttttgttgttatctaaaatatcaaacatttttatgtatcactgtaggtaccaagtattaatctttacactattgaattaacacatggggaatttaaatggcaagttaagaggaaattcaagcattttcaagaatttcacagagagctgctcaagtacaaagcctttatccgcatccccattcccactagaaggtaaccattttggaattaattatgccagtatacaagttgaatggaaagtgtattttgtctgggtgtggtagctcacacctgtaatctcaccactttgggaggctgaggcaggaggatcagttgaggtcatgagtttgagactagcctgtgtaacgtagcaagacctcctccctataaaaaaattaaaaatttagctggacgtggtggcacgtggtgatagttagtagttctacctactcaggaggctacaacaggaggattgcttgagcccaagagtttaaaactgcagtgagcatgattgtaccactgcactccatcctgggtgacagagtacatccaatctttaaaataaataaataaaaagtgtatttaattcacaatatcggctaactagtctattgttggtagatattttcaattaaatagtctcttaaaaatatgccgtctcatgaaagacatactaaagtcatagtcacagaataatctagtaggtgtttgcattctgtgtgtttgtgttttagacacacgtttaggaggcaaaacgtcagagaggagcctcgagagatgcccagtttgccccgttcatctgaaaacatgataagagaagaacaattccttggtagaagagtaagtttcytcactattctgtggttttaaacctaattttgcagtgctgtagaaacacagcatctactgaggggtgaagtaggcctggctacaactcctctcatccactcattgatccccaggctggtttagcttttctggaactagttaggcagtcccttctttccccaagccatacagtgcattttctcagaagaggaagagcgttcttggttaggmcttgacattatgaagaagctgttctccctgctagaayctccttgggcttattgtgagtcaaagattgaactcattgttgtgggttttgagatctactcttttaaaataatattttccatacataagtttccgtgtttgtaatagcccatcttaaatatatgtaaaatctcattcctaaactatagatggagcagttagggcctgagaagagtctgacggagtacagacaggcacagcactgggacagaaaactccagaggaggggcacttctgcctgctctgcttccaagatgggtgctgcagagtgtggacaattaattttttttactagaaaatgaacaagtgtttgttaatttctgtcagttctgttttgtaatctgaaatgtttatgttccagagggaatgtttgatttctcctttgtagttgtcatcttgtttaaaatctttgtaggcatctggaccaaatattttccaagatacctagacatataaaattatatagttttggtttactgtgtgcacatgtatgaattcaactgaaaatgacacttagtgattcagcaaaagcatgctggattttacatcatggtcaatatgattgacatatgttgctccagtgccccaagcctatatccctctactcccctgctgcctccacacacagtttagcatatttaaaatcagtacattctactagaaagtcttttaacctttctccacctttgtttcctgaaaagctgtttaaaatttgtagtgtatctttcagtaagttcagtgttagaattgaaaaaaaaatgaaagtttttggtaatatcaacaaatgctttaaaacaacttatagcaagtcctgctataatagctatatacatataatagggcttgtcagcagtttatagaagacctaagcatatggaaagttaaacagtaagaagatatttaaataatagttcaagagaaatatggaaataacaccttaatgctattcaggattccttgctccatgattatattaataaataattgaataacttgtagaagttaagatgaaaatgatgatctcatcattgtcactactgtttaatttttaaaaataaatatgaccatgttaacacttatctaaaatatttgcattacagaaacaactggaagattacttgacaaagatactaaaaatgcccatgtatagaaactatcatgccacagtaagtactagtcagtgatttaagtttggagtaattttcactatagtaaattgtcagctaaattttggatcattttaataacacaagtgattgtatccacayctacattcgtccttgcattaaaataaattaagkgaatacaaagttgattttacagcaaggatccagtttacagtggtgtgacgctgttttaaaaagttgagtagaacttaatatgtctataacaatagatttaaatgaacttgaaatcctgctataggctagattatctagaaatcaaccttcttctcttctcaggtttccaggataatgccaaaaagcattttttagctacaaagagtaactgttgagtagtaagtgatgaaaacagttgagtggagttgaatgcctgaagattttgtggtgcrtagggcgattgccatctgattggtttgtcatgcctgttaaaggcatgtcttttcatgtgaaagtgagaagcatgrgaaaagctaggaaagaaaaaacccttgaggaatccaagtaaagaaagaagaggcgatggggcttagatgcagccacagagattaagcttggggtatgcagctggcaagcagggagggagtgggttttctagtgtcagcaaacaagtagctctgcactattaaaggtggggtgtttttaaaggtttagccttcaattattcagaggcctggataactgagaatgcatggtttatcgtatgtatgtatgcatttgtatgaattgtatggttatgggggctgtatgcatctatattatatatgtgcagaactctagagttggtgcaattgtgatttgtccgctagtttagagaatggcatcacataaacacataaactgaaacagtaaagactttagtgtattttggagaggatgcaagagcatttggctctgcgagtttctcatgacaggagctgccttcctgctgccttgcagcacatggtttggagtctggtccaaatatacatccagctgtcccattacacacaggtgacctggatccaggtcactacctgcctccagcagcagcttgcamtggggcattcaatggacttgagggagcttctrtgtcttcataaacctggagaagggttttctcaggaaaacaggaatttgggttgcaccagaggatctcaagagaaggatgatgggaggcaggggtttcttttcttctaggactcaggaacttgtattgttgaaataacaatgaataaggatactactactattgttaataaaaatgatacctcctgttgtgttgtctgaaatccgacatgctattttctttaacagacaactatttaaatgtgtattagtatccatatgcaataattttccatttcttttacttttctgcctgcctgtgactttacttttactatttcttttggctgtaaccattcttggtgagttcattcttctcttttcatgtacttttctacatttgggattctactgttgactaaagaatgtttagatttaaaaagtgttctttttaatgacttttccagtcataaaaatattttcaaagttaggccatgttgtatttagaaatcccagagtgacctgtaaacatttcctttggaagggaaagcctcattagcaactgactgtgaatagattctcctctcattttcttttttttttcttttttgggatggagtcttgctctgtttcccaggctggagtgcagtggcatgatctcggctcactgcaaccgccgcctcccgggttcaagtgattcccctgcctcagcctcccaagtagctgggactacaggtgggattacagcaaatttttgtatttttagtagagacgaggtttcaccatgttggccaggatgatttcgatcccttgaccttgtgatccgcccgcctctgcctcccaaagtgctgagattacaggcgtgagccaccrtgcccagcctccctctcattttcgatggttactgagattattctctccaacagctgaattgttcaatatgattcaagcataggatacaatttgatatacattaattctctaacattctttttctttaaatgtagtctggcctaaagactagatctgtagacctctgcctcatatttgtgaaatgagattggaatttacgtgttttcttcaataattgtgagaaatactaaaaaagtatctgttaaaaaatgctttactgtctgtaaaaagcatattaaaagttattttaacatgtatataataaatttatacttttataagtataaaacaaacctattttaagttaattcaggtccataagcagatagaatcatggatcataggtcaagggactgaataggatatgttcttaatctctatagggccatccagatctgtatttggaataagtgtgtttaacaaatagctcaagtgattcttatcatcaggagtttgagaactaaactaaaatgctatgatcagcttagaaatgtcttggtaaagttagaccactttaaaaagtggagacagggctgggcgcagtggctcatgcctgcaatcccagcattttgggaggccaaggcaggtggataacctgaggtcaggagttcgagaccagcctggacaacatggtgaaacctcatctctactaaaaatacaaacattagctaggcgtggtggtgggcgcctttaatcccagctacttgggaggctgagacagaagaatcgcttgaacccgggaggcggaggttgcagcgagccacagttgcgccactgcactccakcctgggttatagaggaagactctgccaaaaaaaaaaaagtggagatagatttattataaaggtgtttgtataataggattttccccaaaggaatttggtttagggttctaagcactgacattatttttcttaagtagcctctgaaattagacatggacagttctttcctctcacttttatacagccattggttgggtttgtgctcagaccttctctcccatgattatgaagacttcctctgcttttaattctttttttttttttccttcttgtggttctgcaaaggagagcatcctagtgttttagtgtagtcatgatcagacagttgcctcagagaccattggtgatttgttcagttttctttgctcatttgtaaaatggggacaaatgtatttcctctttaccctaagcataaatatgtaaaaaaatagcaatatctgagttgtgtaataacatacaaaaaaatctcaaacaagaattccttttgtattctgaaattgtattagtgctggctgtagtagagaactcactagctaggcattttaattagtaactggaaaatgcttatcttccagggaattaaaatcagaggaataaggagcaataaatgtacctttttcatacctgagattaaaatctagaaatggaacaaattgtacaatttccaagagaagggccctaaggtgataggatcgtatctctaccttgaagtaaatcatttaacttatgtgactcagatttcttatccccaagaaggtgattagcttgaaatccttgggtaaaacatcccacagatcaataatactgagttcacctctcccttgttttgtagaatgaactttaacttgaggggaagagtaggtaaagaataaacgtgcacacagtgttttcattccaacagggaaaagctatactaatttgaacagctgcatcttcaaattaagggaaatattttctttcttatgattgagtcttagcgttgagaaggactttaggcctttgcccagcctcccagtttccttcatagattagatgtcctctttgttccctgcctttcctggagtacctgagtctacaaggacattgcccaactcaatgctcttaccttccttgtatctgataatttcccacctggccatttacttgagtttttgctacctggtaaataaaaggagcctctgaaagtcacccttctcttacaatacaaggatgggtggaaggggcagtgtgtacgtgattgccaagtaattttcaggattttttgttacccctagggcttgttgcttgtctcttggcatggaaatatttttgcttctctgtttctctaacgtttttagtatccaattggtagatcatgttggaattttttacttgagaccactttccacctagtgccaagaacattattgcattgcaacattatttcaattgtattcatattttacaaattcctttgccaaaaaaacaaagacaaaaaggtattgattatacattactcaaaagatcaatggaataagccctgcgaaatgccgttaggctaaattgatctttaaattcttattcctgagaatcacttgcccaaatggataatggaattcttatcactgaagatgtactaagaagtttggacaacatcatctttgttaaatttcaatttttattagttaggtttgcctctcagttgaccctgacacatttactttcaatttgataactctgtattagaaaaacgtttattgccagatttttttttctgtataataggcctggttccttctggaaatctctctccagtcaaactttactaagccattaggataaattaaatttcatattaatgtgtaactttcaattttctacattattaatgtgtctacttagctgagattctttacgcttagcaattttgttatgatatactccaaaagttatgatttctgaatgatttcagagaatatttctgttgtcaactatttgatgataacagctatgtaaataagaaaatatccaggcattagattagtggcttccttgatttttgttttcatttcctattcttcccttcggttgttctgggactttgcataagttagttatgcctctgtagtagactatagtcttcaaatgtaaactaggactgacattatttgtctgctctccagagataaaagttatgactcaggattttaaaatattttggattttatggctggcaatctgtgaatcatttccaataacccataggattaccttttccaattaagaagcattttcacaaaccagataaaaatgcatgatactgaatcactgttttatataagaaatgaaatgtaaagaccttgaggtgttttttgtttgtttgtttgtttttgagacagtcctgctgtgttgcccaggctggagtgcaggggcacgatctccgctcactgcaacctctgcctcccgggttcaagtgattctcctgcctcagcctctgcctcctgagtagctgggattacgggcatgcaccaccacacctggctaatttttgtatttttagtagagatggggttttgccatgttggccaggctggtcttgaactcttgacctcaagtgatccacccacctcagccttccaaaatgctgggattacaggcgtgagccactatgcctgactgagaccttgactttttaaattctcaatttaaaaaatgctgtatgaagatacctttgacttaggattttaaaaagatatttaagtccttttgaattttaaagacctattttctgcaaataaccccaagaaaagagaaaaatgcaagcatttaaatgaaccttacaaggatggacgccttgagatatttgtaatttttttttacaagagtagtgttagatatgtccaatcacatataaaacttacatggaaaacttttgttttactaatcccatttacaaacctagatcaaatgcccctgcctctgtgatgtcatgtcagctgggaagtggttgccctccactattctataactctgtaactactttcacatgtatctagtgtggttcatcccacagaacttcattgagggtagtgttttccatatctggtctcccgtctgcttcctaatgctgggagagtatctttttagtctttgttggtctatcaaggctgctattgacatggcctaaggaactgatcttattgttggtcacttttcaaaacgatctgcaaatctgcatatgctaaacattatgtaatgttgatttgtttttcccttctatgcctccacatttacatctagctttcacctacctagaatatgcaaggaactcaatttgaattagataaatgttgaatgacattttgctcttccagcttggttttgagggcgctgactttggtctgacttcataatgagttaaccatactgagttaatcccttcttaactatgtgatcttggacaacttacttgacttctctaaaacagaggcctgcaaactagggcccgtggaccaaatcctgcccattgcccattgcctgtttttgtatgttctgtgaactaagaatagtttttatatttttaagtggttgaaaaaaaatcaaaagaataatattttgtgacacataaaattagattatcttcatattttatatccataaataaggttttattggaacacagccacagttattcgtttatgtatgcgtctatggctatttccgtgctacaacagcagagcgaagtagatgcaaaatggaatgtatgcccacaaagcccaaaatatttactgtctggctctttgcagaaaatatttgcttacccttacactaaacctcagtttcgtcttctgtacaatgggaaaagtagcacctgcttcaaaggggtttgagataatgcatgaaaaatggttagcataacaccaactcatagttagcactcagtaaacacagccacagttgttgttataatatttacagtttttaaccttctaatacagtgaaggtgggcctaaaattctcttcctcttcaactcattaaaaataattcttttcattatgcctgatgttcaaagccctccccattctcttttcagcctgtttaattttttattcttttccttcatcttattcactgtaacccaactgtacatcctataacctttttgaccttctgttctagccccccattcatctcccatttcacactgtgggcccaaatccagtccatcttccagatcctgcaccaatatcacttgcttctcacattcttttattgtttgagtgtacactgtgccacacaatatccatcccgtgcaacaaaaacaaacatgaaagaatattgagaataaactctctctctctctctctccaagcttcttgagcattttatctctatgtattaaggcacacatctctctcttcagatttagaagatctagtaggatgtgtcttcattgtttatatactcctaatctgcactcttttagtgcaatgccattattattgatctgtgtagtctgtggagcacaccaaacagtatwtacacacagctatacctaatacatgttttttaatgcataaatttgaattgttttgcttgctaaagatggattttttgcttcttttcagacagagtttcttgatataagccagctgtctttcatccatgatttgggaccaaagggcatgtaagttgcaataaaccttaaaagagaagtatgaaaaattgatttgcattcacacttaacgtagcagcatgccatggtgatggagtcctcctggctttactgctagcttctcttctccccagtagttagagcaactgatggaattattcatacaaatcagagcatctcctgtgataaacaacggtagcaactgctccactstctttgtcaygtgcttacagcacagattctttctaacccaacagtggaagtgttcaatacctatagcaagtctgatgtgtaggagaatacattaaaaatcaaatatataagatctccttttacaatcccttataaagttaaatgtttactactcattttgatgattattttaaaataatactatgtaaaatatgttttatagccagatgaaagtttataattttccttcacaatattagagcttgaaaacataaagagcttaactttcaagttctagttaagagcattgttagtagttgtttcaaaaaaagttttttttaaagtttagcctttgttattgctttttcttgtcaaatttttcagaattaagatatactgttttcaaaactagtagctgtgctctgcttcctttggcatggctcaactagctcaactagtttgctagaactgggtgtgaagagacacagagatgtcctggaatctgtgggtgagatgcaccatggtctcaacagcaggtggaccatccctgtgcaggcatgtggaaatgcatggagtcttttttagtttgtcacagtgtcacaatgttgaggagggaacactcaacatttttttatatttatatatatttattatactttaagttctagggtacatgtgcacaacgtgcgggtttgttacatatgtatacatgtgccatgttggtgtgctgcacccattaatgacgagttaacgggaacactcaacatttagagccaggagacaggatgcttaaggtcctgtgtagtgcacaacagaatcacactgccccgaatgctgaaggggctatatctcaccagtgtattttagggttcgcctctagggtacccggcctaacagggcactgagctagttgagagcgaggaggagagagtagggaggaaagtcatgtgagaatgagatggtttatttagtcccatgttgggaggctgtacragctaagtgggagtgggaaatttgaaggtgatgggttaattttctgtctctttcagagaaggtatgataatgaaaagatctggaggacacagaataccaggcttgaattgctgtggtcagggaagagcctgctacagatggtcaaaaaggtaggaattagtgagttttgtgtatttgtttgttttaatacactgggtatttgggctagttttacataccagttttaaattataaatcctttaaaagcmatggcagaacaaatttttaattatattttaaaatccaaattccagcatccatttaaatattctacccaaagctgaacttgtaggcaaagtgtacarattatattcatgaaaacccaaggacaaagaacgcacaaattggccagccaaagaagacgtacaaatggccaataagtatacgaaaagatgctcaacgttattagtcattatggaaatgtaagtcaaatccacaatgagatacaatttcacacccataaggatggctataatcaaagagatggacaataacaaatggtggtgagggtgtagagaaactagaatattttctgtagagaaaccgcagatattgttaatggaaatgtaaaatggtgcagccactttggaaaacagtctggcagttctttaaactgttaaacatagttaccacatgtcccagcaattccagggattcacctaggagaactgaaaaaatatgtctacaataraacttttctatagcagtattataatagcagtattatggataatagccttacaagtggaaacaattcwaatgttcatcaattgatgartggataaacaaaatgtggtattcctatagagtggaatattatccagccataaaaggaataaatcacatcaagttaaaaagcttctgcacagcaaaggaaacagtcaacaaagtgaagagataaaccacagaatgggagaaaatacctacaaactacctatctgataagggattaacaaccagaaagaactctataggaaaaaaatctaataatctgatttaaaaatggacaaaagatctgaatatacgtttcttgaaagaaaacataccaatggcaaacaggtgtatgaaaaggtgctcaatatcattgatcatcagagaaatgcaaatgaaaactacaatgagatatcatctcaccccagttaaaatggcttttatcaaaaagacaggcaataacatactggtgaggatgtggwgaaaagggaaccctcatacactgttgatgggaatgtaaattagtacgacgactacggagaacagtttggaggttcctcaaaaaactcaaaatagagctaccatatgatctagcagttccacrtctaggtatatacccaaaagaaggaaatcagtatatcaaagatatatctgcacttccatctgtgttgaagcactattcacaatagccaagatttggaagcaacccaggtgttcatcaacagatgaatggataaagaaaatgtacatacacatgatggggtactatccagccatagaaaagaatgagatcccgtcattgcaacatggatggatctagaggtcattatgtttagttaaataagccaggcacagaaagacaatcttcacatgttctcagttactagtaggagctaaaaattaaaacaactgaactcatggagattttatcagaggctgggaaaggcagtgtggagggggatagtggggatggttaatggatacaaacaaataggataattaagatctagtatttgatagcacaacaggtgactatagtcaatactaatttaattgtatgttttacaataactataaaagagtatgagttgtttgtaacataaaggataatgcttgaggtgatggataccccatttatcctgatgttattattacacattatatgcttgtatcaaagtatctcatataccccataaatatataaacctactatgtacccacagaaattaaaaatacattaaaaaaagagaaatgaagaccattcatggtcatggagtttctttatggggtgatgaaaatattctgaaataagacggtagtgccggttgcacaactctgtcaatatgctaaaaaccatcgcattgtgaacttttaaaaggtacgttttatgatatgtgaattacatctgaataaaaatctaaaaattaaatggaaaaggatatgaagttctgatacatgctacaatgtggatgaaccttgaaaacaggataaatgaaaacatccagatacaaaaaggcacatgttttatcattcttatttataagaaattttcagaatagacaaatctgtagagacggaagtagataaagggtttccagggaatgggaaggaggttgctttctactaatttgatactggtatggggtttatttttgggccaatgaagatattttggaactagatagtggtgatggttatacaactttgtgaatataccaaaaatcaaactgaactgtacactttaacaaaaacttaagtaaaattgtgcagacttcagggatgataattttacacttatatttctgaaaaatgtttatcatggtaagcgtaatatagacagaaaacattattttatatcttacgtcttaccaactaaaaactccttgaggaacaatattctcatctgattcttatctgtatcccccaagtttggcacataatagacagtaactgttgcaataacaatgtactgggattttgaaaaactattaaaacactgaagaaatcaattataaatattttatatctgtatataatatttcccccaaattgaaaatgataaatgtgtttatgtttaaatgtggaattgagctatgtgtatattcaaaatatataaaattaatactggcatccacctttacacacaccgatttaagatatactaccaacaaaaaaataccattaagctgggcctttactttctgggatttgaagggacagaagaaattacaaggaaaagatcagaagattaaactaaagaaaactgaaaatttttgtaagggaaaaaagttttttttctttttttttttctgagatggagtcttgatctgtcgctgggagagaagttttactaaaataagaagggaaataatatactaaaaaaagtatttgccttcaaatacacttctctaacttttagaaacttggggattccttctgaccactcctccctagtcgttaactttgcccaaatcagctgctacatgccaaccacagttttcagactgtaaccttaagcatttgtgattctttgaccaaaaattctgtaggctgtcagaacccacctgtctgtgtgcacagcagtctgggaagtgtcaacagctcccaggagcagccatcagccaagaactgatcggagtccagccccatcctcctcagttggggtgactctgcagcagtctctacactgtctcccagaactccttagctggcttacagcacagctgcccacaataaaaagcatgaaaatacactctctgtggcttccttccttgctctttctttctatccttccctaattggtgcttcctggtgccactgtcttaaactcttttatacacgtatatccgtatctcagagtttacttctgggacaacccaacctaaggcgtctactcaaggaatggaagccatggtctggtttattcagtcatttttcgagtgcctaatgtatgccagatggtggcatactcctgtgaaaacagtagtgaacaagatgaagtctctgccctcatggagttctgttagaggggaaatgcaggcactaagccgacaattaatgtaaattgtataaattcaggtagcgatgagagctttaaaggggaaaaatggtttgtgagggatctggggattgcagagggtgactttagctctgggagtcaaggaaaggctccctgaaaaactgacgtttggatttaacccttatgagaagcaacagctaggaaaggtgagggaaaggctttgttacacaaaataaatatgccccctctttttaaactttggattaaatcataagtcaactgggacaatctaaaaagatacgatcctccctggaatgaaatgtgtcatcactgtaaattgtgtaaatcattctgtgaagattaaagccctggttccatattaataaatatttcctgagtcacatttttgggatttaaaataccagaaagcatatatagatgataacatataatttagaaagtttctcacagtggaagacttttttttttttttgagacggagtcttgctctgtcgcctaggctggagtgcagcggcctgatctccgctcactgcaagctccgcctcccagattcatgccgttctcctgcctcaggctctccgagtagctgggactacaggcgcccggcatgacgcccggctaattttttgtatttttagtagagacggggtttcactgtggtctcaatctcctaacctcgtgatccgcccgcctcggctcccaaagtgttgggattacaagcgtgagccaccgcgcccggccttttttttttttttttttttgagacagggtctcaccttgtcaccaaggctggagtgcagtggtatgatctcggctcactgcagcctcgacctcctgagctcaagcgatcctcccacctcagccccctagatagcagggatacaggtgcataccaccgcacctggataaattttgtattttttgtaaagatggggttttaccatattgcccaggctggtcttgaactcctgagctcaagtgatctgcccaccttggccttccaaagtgctgggattacaggcgggaggcacagcacctggccaagacgactattttattaatgtctaaatgagacttacttttaaagatgacactccttcataactttttttcatttgtacccataaaaatacattctgatcacttgttaatttattctacgttgacaaattgtagtaaggcaaacaaggaaattgaattttcagttaggtctcataatgaccttatctgagagatgagttttaaaaaaagacaaacagagatcctacaatctaaaacatctgcttaaacagcacatttattgagaaacttctctgcacctggtcgtaagttaagtttcttatgtcaaataatgtcttaagaaaaagagatgtatagacgttaacaaataaatttagcatttattagggtggtacaaaagtaattgtggtttttgccattacttttaattccttagcactttcttacttagtgtttactttagtgaactatgagctgtgccaataattaaaatttttagacagtgatagtgtctaaatggttttatttactctctggaatccattcatgcagccattatttaggcgagatggtggccttgcctgaaagcttgctctgggctgctagaagatagttctaggcattgaacagatagtagtagacatgacagccacatttcctgttcccagggaccttacgctgtactgtaggagacagacaataaacaagaagacaaatacttccagatgtgctacaaagaagctaaatcaagacaacatgatggaggagagttgggggtgatgaggcagggatggtggagaacagcttttttttgaatccagtagcctgcttgtagagggatttttaaggagaggtttgattgacaagaagagaccatccatggaattgcctagaagaaacagtttttacgcagaggaacagcaacgatagagcccaaagaagaagactggcaagtctaaagaagaaccaacattgactaacattgtgagagacaatagtagatgaggctgagaaggggagggctggctcaagtgggcttatctgcatttgaatgccatggcaagtagtaacacaggcaggaggtatctttttaaaacagacggtaatctcacatggtttagaacaagattagttataatagttcgcatgtattggggccaggcactgtgctaagcatgtgcatgagttatctcagttaattctttatgaatacttatgaactagatgttgctgttaggtcctcatgttatatgtcttatgttatcctcatgttatagattttgacatcatgctcaattactgaagttcttacaagcagtgagtggcaggtggaattggagcccagggaggctgacttcagggcaggcacttgatccctgtgcagatggtgctgactcctagaaggctggttgatagatgccttacttgatttatatattcctgagaaagaaagcaaaatcttgttgagatgctctgcatctatgttcataaaggatattggcctgaagtctcctctttttgttgtgtctctgccaggttttggtgttaggatgatgctggcctcatagaatgagtcgggtagtagttcttcctcctcaattgtttagagtagtttcagtaggaacggtactagctcttctttgtacgtcttatagaatttgagtgtgaatccgcctggtcctgggctttttgtctttgtttttgtattttggttggtaggctatttattactgattctaattcagagctgattattggtccacttaaggattcagtctcttcctggttcagtcttgagggggatgtatgtgtctgggaatttatctgtttcttgtagattttctagtttatgtgcatagagttgttcatagtagtctctgacagttacttgtatttctgtgggatcaatggtaatgtcctctttgtcatttctaattgtgtttatttgaatcttctctgtttggttttgaatcttctctatatggttcaacatatgcaaattgataaatgtgattcatcacataaacagaactaaagataaaaactacctgattatctcaatagatgcaggaaagacttttgatagaattcaacatccttcattttaacaaccctcaataaactacacattgaaggaacatactccaaaataataagagccatctatgacaaacccacagccaacatcatactgactggacaagagctggaagtattccccttgaaaactggcccaagacaaggatgccctctctcaccactcctattcaacatagtattggaagtcctggccagagcaatgaggcaagagaaagaaataaaaggcatccaaatagcaaaagaggaagtcaaactattcctatttgcagatgacatgattctatatctagaaaactccacagtctttgcccaaaaactccttgagctgatatacatcttcagcaatgtttcaggatacaaaatcaatgtagaaaaatcactagcatttctatacaccaacaacaatcaagccaattgtgaatggaattgctttccagtcaaatcagggaggcaaccccattcacaatttccacaaaaagaataaaatacctaggaattcagctgactagggaggtgaaagatctctacaatgagaattacaaaatactgctcaaagaaatgagaggtgacacaaacaaatggaaaatattccatgttcatggataggaagaaacaatatcattaaaatggccatactgcctaaagcaatctacagattcaatgctattcccaccaaactaccaataacattcttcacaaaactagaaaaaactattttaaaattcaaatggaaccaacaaagagcctgaatagccaaggcaatgccaagcaaaaagaacaaagctggagacatcatgttacgtgactccaaactacactacagggcaacagtaaccaatacagtacagtactggtacgaaaacagacacatagaccaatggaacagaattatagagcccagaaataatactgcacacctacaaccatctgatcttcaacaaagctgacaaaaacaagcaatgggaaaaggacttcctccttaataaatgatgctgggataactggctagccatgtgcagaagattgaaactggaccccttagaaacttaaatgtaaaacctaaaactataaaaaccctggaagacaacctaggaaataccattctggacattggaacgggcaaatatttaatgatgaagacaccaaaagtaattgcaacaaaatcaaaaattggcgaatggaatctaattaaactaaagagcttctgcacagcaaaagaaactatcaacagagtagacagacaacctacagaatgggagaaaatatttgcaagctgtgcttctgacaaagacctaatagccagtatctataaggaatttaaacaaatttacaagcaaaaaaacaaaaaattccattaaaaagtgggcaaaggacatgaacagacacttttcaaaagaagacatacatatggccaagaaacatttgaaaaaatgcttaacatcactgatcattagagaaatgcaaatcaaaaccacaatgagatatcatctcacaccagccagaatggctattaaaaaacaaacaaacaaataaacagatgctgacgaggtttcagagaaaaggaaatgcttatatgctgctggttggagcgtaaattagttcagccattgtggaaagcagtgtgatgattccccaaagaactaagaacagtattaccatttaacccagcaattccattattggatatatacccagaggactataaccattctactgtaaagactcagtgcatgtgtattttcaytgcagcacaatttacaatagcaaagacatggaatcaacctaaatacccatctgtagtagactggatagtacatgtacaccacagcatatgaaatcatgtactttgcagcaacatggatggagctggaggccattgtccttagcaaactaacacaggaacaggaaacccaataccacctgttctcacttataactgggagctaaataacgagaactcatggacacaaagacggcaacaacagatactagggcctacttgagggtggkgggtgggaggagggaaaggatcagaaaaaaatgcctgtcaggtactatgcttagtacctgggtgacaaagcaatctgtacaccaaacccctgtgacacaagtttccctatgtaacaaacctgtatgtgtacctctgaacccaaagtaaaagttaaaagaaaaaaatatatctattgacaaaaaagaaaaagggaagaaatcagaggagtttttatgaatggcataataaagaagagctttcaataaaagcccagcatcaaattaccttgatatctaatgactagtaaaaagaacaactacaagacacagatgaaaaaaaaactgaagaggatcagaagaattaatactgttaaaatgaccatactatccaaagcaatctacagattcagtgcaaccctatcaaaatactaatgacattttcacagaaatagaaaaaacaatcctaaaattcacataaaacaacaaaagaccctgaacagccaaagcaatcctgagcaaaaaacaaaaacaaaaaacaaaccaaagctagaggcattacactacctgacttcaaaatatattacaaagctatagtaaccaaaacagtatggtattggtataaaaacagacacatgaccagtagaacagaatagagaactcagatattaatccatgtatctacagcctactgatttttccgagggcatcaagaacattctttggggaaagtgcacactcttcagtaaacagtgctgggaaaacggggttaccctttgatatcatagccttggtattcgtattgaggagtgttataagaactcttataaaatgtataatttctgtgtttgctttgaaaattgttattgggaatattattcattatgttgttcagttgtatcatgttaggtcccaaatgagaaactttgtttggaatttagttttggaggaaatccacttatttctttaatttattcatttgacaagaaaaactaggaagcttacacccacatgagtgtgtcatctctgtaattatatttacctttgtggttaggtattttaggtatttactttctgtgaccttgacgtttttccttttctgaaccataccacatatgttctttgctataagttatcctaaatccactctatgcccttttattaggaaggagataacttatgtattaaaaaaaaattaatgaaatgaaactatgtggaaatcaatgtaggtctgtctacattaaattccaagttataaagccattaaaacataatgcaattcccaatttcagtaaagatttattatagatatattttaaatactgagttcccatgctatatttacagtattacttagtttatattcagatgttccaaccttactattccataatgtggaagtgcctagagtgctttactttgtctggtatgcactattatgcccactttgttacttctcagttttcaaatgattcagtctatcactctacaattgcaggcaaataggaatacatgttgttatatgcagcctgatgaagttaccatttgcattcactgtaaatggatcccatctcctcagtcttgcccttcctgtcgtacatcctgtgagtgctacctgccaatattagggacattcctccagttttgccattagtgtttaaagagctaatgaattactgtgaattacttggtacactgtttcttagaaaaacgtaatagaaaggttttgttgggttttttttgtttgtttcatagcgattaaaaaaaataaatctcctgtgtagaaaatgtaattatgtctacagtctgccagagtgattacttaagacttgtcataatgattagttcttctcgttttatttactcaatgcaacttttaaaaatacttactaccttcttacagatggttaatagtgaaagattcctttttattgtatatgaaaccagacagcggtgccattgccttcgtcctgctggtagacaaagaattcaaaattaaggtggggaagaaggagacagaaacgaaatatggaatccgaattgataatctttcaaggtacacatttcaaatatttaaaaaagatttctacaaaaatgccttaaaaacatttttttctcaaccttaagtaaaaaaggagtttaaaaagtgttagaaaattgtaatttagagctcatcctcaatcaatagtaatgaaaccacttttttccttgtatatattttaaagagtatcctgtgtgcaacagtctgaataaacaatcccatatgtagatgtttgcctatgttaacagaaattactactcaatttgccagtttactaaacagatagattagagcaatagttcacatttttaaaataaatgaaacttttactttataaatcaatattctttaattaacaaaacaccaaaagagtgatttgttttataaaaattgttacacacatattttaagaaagatatcttctttttctctgagacaggctctcactctgtcacccagactggagtgcagtggtgcaatctctgctcactgcaaccttcactcactgaamctctatctttcaggttcaagcgattctcccacttcagcctcctgagtagctgggactacaggcgcctgccaccacccccgactaaaktttgtattttttgatagagacggggtttcaccatgtttgccaggctggtctcgaactcctgacctcaagtgatctgtctgcctcggccttccacagtgctgggataacaggcctgagccactccgcctggccaagaaagatatcttgaaaggacactcatgtacatttattatagattttattagtgagtacatgtgtatgtgatctttctggaagattgtagttataccatgtatgtgtgtctttatacatatatatccatttgtctctgtatagttcattcaccatcatgtatatgaatatatatgcatttctccctgtgcacatagttaccaacatagcttcatattcccttactgatttacatgtttgtgtgtgtatgtgtgtgtgtgtataaaaagatgctgaccttcctgatgatattctatgagaatggaacatttaagattgtgactggaaatataatggtgctgccattacaccttcctcctgcattcctgttttacagtgagccacagaagtctggccacagttctcactggtcccttactttattggccacttcatctgcatttcccaccctcacttacccgtatgtcattgccaaatgaggccattcacatccaggtttcattaccttccttcctggtgtaagatcccccccatgattttatcaaataaggccaaattcccccacttatttttgaagggcatttattttcctgcctttatttgaaattcctccctaatacgccttgcaggttctatgaaggcagcatttttttcttgcctctttccctttgcttttcttatgtccatgtttggaatagttcttgttttcccccttgatactgactcacatcctgtgataatgtcttatcttgttactcatctcttctgtaaagtcttctcataactgtttttccgaggctttttagctcaattggagtagtgcttgcaggataggtcaagcccaggcacctcctgtgccctctcgtctccatccctagaaacccgtgtctccaccacacgygatggggatgcttcactcctctcagctccaccacgtctctcctcccctgtctccacagcccagcagcagcagcctctccctgtcttcatgactttcagacaaaagccagcatctacctctgacatattgaggaaagcaggttggacatggctaatctttataaataattcttttagaatctgtgaacacagcccccttccctgcgtctcatcaggatcattgcatttcctcaaaaaagcaacctccctcctcacgcatagtcttcttacattggtatgatggtagatttctgcctacatggcagggatacagctggctccaacactctgttttccttcaaacttcaaatttggataacttatttttccctcttagtagtaggcagaattctgacacttggcattaagaaaaaactttctgtaatccactctgaatttttttttttttttttttttttttagcatttataactctgtaagagtttaggatagtttagttatgagtgacagaaaaatctaaagcaaactggcttataccaaagagaactaatcagccatgttgagcatgactgattcmcttgtggtagcaagatggccacctcccacactcacaccaaattctgtggaagcaagagagtcccttcctggcattcctgagcaagtaagtcctcacatttgcttaggaatgcctgaaaggatactcatgtccatttgttaataggaatcgatgaacaaatgtacatgagtatccttttttttctggtatcaatatgtttaattgattattattgcaaaagaacagttttcctggccaggtgcggtggctcacgcctataatcccagcactttgggaggccgaggtgggcggatcacaaggtcaggagtttgagaccagcctggccaatattgtgaaaccctgtcgctactaaaaatacaaaaattagccaggcatgatggtgcgcgcctgtagtcccagctacttaggaggctgaggcaggagaatcgcttgaacccaggaggcggaagttggagtgagccgagattgagccactgcactccagcctggtgacaaagcaagactccatttcaaaaaaaaaaaaaaaaaaaaaaggctggcacagtggctcatgcctgtaatcccagcactttgggaggccgaggcaggccgatcccctgaggttgagagttcgagaccagcctaacatggagaaaccccgtctctactaaaaatacaaaattagccgggcgtggaggtgcaggcctgtaatcccagctacttgggaggctgaggcaggagaatcacttgaacccgggaggcggaggttgcagtgagccaagatagcgccattgcactccagcctgggcgacagagcgaaactccgtctcaaaaaaaaaaaaaaaaaaagaacagttttcctatgattagtgaaatagaaaactcacaatatagtcatgccagaaccaccttctggaaccagaaagatggaatatgccattttgcttagctttgttgaagagaagggatggctgtcatgaagcacaattgggatgatatttccagaagctgagggaatggatactagggagcacaaggggaagtgccctctagagcaggggtcgccaaccccctcggggtaccagtccgtgtcctgttcggaactgggccgcacagcaggaggtgagcagtgggcgagggagcattaccacctgagttccgccttctgtcagatcagccacagcatcagattctcacagaagctcgaaccctattgtggattgcacatgcgcgggatctcggctgcgcgctcctcacgagaatcatatcacttcctgatggcctgaggtggaacggtttcatctcgaaactactccccatcatccgtggaaaaattgccttccacaagcctgtccctggtaccaaaaaagttggggaccacgcctgtaatcccagaactttgggaggccgaggcgggcggatcacgaggtcaggagatcgagaccatcctggctaacacggtgaaaccccgtctctactaaaaatacaaaaaaattagccgggcgtggtggcgggtgcctgtagtcccagctactcgaggctgaggcaggagaatggcgtgaacccgggaggtggagcttgcagtgagcctagatcgcgccactgcactccagcctgggcgacagagcgagactccatctcaaaaaaaagaaaaaagaaaagttggggaccgctgctgtacgggagccaacagctctctaactaatacttaaaaatagaacctcaccttacccctctttctttatcctcctcatggcctagcacacagctctaggtctatggtaagtacctttatgcatgtttgcatgagtgaatgaataagtaacctgaacatttatttttgttatattgaatatatttttagaaatactaccaaaaaatgttaaatgcctgctttcttgatgttctttgcctcaaattttcagtttgtgtttggtatattaccaaataaaaaagagcatgagatrgaacagagtgaccagtcttttcaatatttggctttttctttaaaggacacttattttaaaatgcaacagctatagacatgctcggtggtggggaggggctatagaagaattcatccagaaacatggcaccaactttctcaaagatcatcgatttgggtcatatgctgctatccaagagaatgctttagctaaatggtaagttattatttctctaagcctgtyaaggcagtcatagcatctaatattacactggcctaaattcacctggaatcagttttcaaaactgtgaaagattatgcattatacttaacaagggcttctctttttgtgataattatgggactacctgattatagattagtttttcaattgttgcttttaagatttttcacagtgagcttagctagctttagattttgaagtttgaattttaaagctaacttcatacatttctttaatgatgcaaatggaaggtttatttaagtcattacccctaatttaggaaaaagcatttacttgctagatatttcttttaaataaagtcatgcttagcatgtttttctacccgtggattggaagctagtttgttttcagtctcagaactgtatgtaagaaaaactgtatgtaagttcaacaggataggaaaattaatctggctccttatgatgatgaggctcaataaatttgttgttctctaagcagagaaaaatcaggctgcttacacttactgcccttcctaggcagcagaggaaacttggtattttcaatccttgttttccaggtmcacaaagtcaatggtggttatgtgttatgtggagactctaggcagtggcttccatgttttgctttaccataagataagtttcttttcttttcttttttaataacaaaaaggaacaataaacttgtctttcaggtatgttaatgccaaaggatattttgaagatgtggcaaatgcaatggaagaggcaaatgaagagatttttatcacagactggtggttagtatttgtccctgggaatttttttctggaagtctctatgtttagaaatgtacagtggtatagtgctgttcaagaattacacattatgaaaatcagctgtatctgtggatggtttggccagggtctcaaccagttgactaagccttcagtgaaaggccttttcaaaaaccttggcctcaacaatattcataaaatacttagtttgaacaattaggttttatatttgcatttggaagcagacttccaagttttcatgtcagtaaagattatactgtaatgcaagtacagttatagaggtaatggtgtctttggatgtctttttctaattttggtatgtctgtcatgagggccagtgaatatacttcttctaaattgtccttttgatgttgaaatagttccacttgcctgttaccgtaaaaatatcctctgtaatgactaggcctggtcagctgttctagagatacatccggtttcaactttgtgaccaccttaaaaaaatatccataagagttgctatgcttattaaagtcaccagaagcctcatatcggaaactcatttaactcttgggaaatttactcctgtagttggtgtaggcattctagtctgacttcagttccaatcattcatctgcctggaaagttaaaacccattacacatgccaacactggctacgatggatatggaaatgtctaaaatgtgttttccttctaggaacttagtagtagttgcctgaattaccccttattttactctatccggttttcttccaaaaggtaccttataggaactgttaatatatcatcataatttattcccttctaattctaggttttgtgggcaatatcaatatctaattcaagaatgcaaacacatcttttgcttcggttgtctggaatctataattataaggcatgctttcttaacctttgccctgttgacatttggggctagataattctttgttgtagggggctgtcctatgcattgtagggtgtttagcggcatccactaggtaccagtagtaagttcccagttgtgaccaccataatatcttcatacattgctagatgttccctggttggggttgggagaggatgcaagatccttgtcggctgggaatcactgatctagaggggatagacagggtatgtggtggccagcatgctcatgcttgtggaggagcttaattctggtctttctattgttaccaaattttgtcttttcagtcagttactaggaggaaaaaatgtttcatgcttaggagctatttctttggttgaatattttatgaacacttgtgataataaatttgtgccagtgagtactatattctttaaaaaatatttctgaaagtttggtgaagatgtgagagagactaaaaataatttttctattgagcctagattttcatgctttatgtctgaacaccaaaatttttttaacttttaaattcaggggtacaactgcaggtttgttaaataggtaaacttgtagcatgggaatttgttgtatggattattttatcacccaggtattaagtcttgtacccactagttatttttcctgatcctctccctctaccttctgaaaggccctagtgtgtgttgttcccttgtatgtgtccatgtgttctcatcatttagctcccacttataagtgagaacatgtagtattcggttttttgttcctgtgttagttttctaaggataatggcctccagctccatccatgttgctgcaaaggacatgatctcattcttttttatggctgcatagtattctgtggtgtatatgtaccacattttcttcatccagtctaccattgatggtcatttaggttgattcaattaaacatataaagagatggaactctgaatgttttcctctctactttcagcaagagaatgaatcggggttacttatttttcacgactgcactaggataccattttattacaacacatcattagaaataaaaccttcacagtaacttccctcaaacaagtaaagaaaattcttgttgtacaagcatattgcaaaaaggagcattcagaaacttaaccaaacactagtatgcgtagatctgagagagtggggttatctaccagtctctgtatgsagtcagtatgttaaatgtgtcagaaatagaattaataaaacaggagaatacaaaagaaaaacaatgaacagagatttttaaaagagggtgtttgtaaagggtagagaaacagaagagacaaaggttgggccggagacaaaggttataaagaaaataaatcagcattgcattactaactgactcacaaacaaagactattccaggtaaaagaatacatgttttaaaagtatttaagttggttttaaatgcaacattctttaagttggttttaatattgttagtgtttttcaaatgatgggttgagcctctttagtaattgtgtattaaaataatttggtaagttgtgaccagcatttaaaaaaaaaaagaatggcataggataggaaagggaagggaaaagaaagaaagggtacaatgtaagtggtaataagggctactaattttggaaacttttatatcagtkgtagatagatagatagatagatagatagatagatagatagatagatagactgactgacccggtgttggtttgggtgtataatgtatttctttctgcagcttatggtccaaaagtttaaaagttttaaagccactgactttcaaaaatggttagtaacctttttctttaaagagcaagagagtaaatttgttttaggcttttcaaatcatgtatggtctctgaagcatattttttttacaactctttaaaaatataaaaaccattcttagctcacaggccatactaaaacagtctatgggcaacatttggcttgtgagctatagtttgttgacacctatcttagaagatagatttaatttaccacattttatcaatactaagagctaaatgtagtgttttccaaagttgtaccattttacattttcaccagcaatgtatgagagtttcaattcttccacataattgctagcacttgatgttgtcagtctttatttcaaagggtatacagtagtgttttattatgattttagcttgtatcagcaacatcgtttcatgttgagcaaattttcatgtgctatttggacattggtttaactgttcaaatcttttcccttttttttgagagggagattgtgttagtcttcttatttagttgtaggaggtatttgtacattctagttaaagtgattgttccatttcattctggcctccatgatttctgttgagaaattttccatctcttgaagacattgttcccctctaagtaatgtgttatttttcctctgagtggtttcaatattttccttctgtctttagttttcagcagtttggttatgatgtttgggtttatcctgtttggggttctctgagcttcctgaatctgtagttttatatcttttgctaaatttaagaaattgttagccattatttctttacacattttttctgaactttcctctttctctcctccttctgagtcttcagtgacacaaatagtatcttatttatttgccttcaaattcattgactctttccgctatgacagggtccccaacctccaagccaaactggtccccagcctgttaggaaccaggccatgcaacaggaggtgagccagagcttgtcgggggaggtagcgagcatgagcattactgcctgagctccgcctcctgtcagatcagccgtggcattagattctcgtgggaacatgaaccctattgtgaactacgcatgtgaggaatctaggctgcccgctccttatgagagtctaactggtgcctgctggcctatctgaggtgcaacagtttcatccagaaattatccttacccccagctcccacccatggaaaaaattgtcttccatgaatccggtttctggtgccaaaaaggttggggactgctgctctatgatctccattctggtattgagcctatcctgtgaggtttggggaatttattgtttgcttttgtttttctagtgtttttggtaatagtgtttttcactttgaaaatttttatttggttcttctttatatctttttctataagacttttttgtcttttcattcattttaagagtgttcacccttattagagcatttttataatatctgacatagccttaagtagataatttcaatatccatgtcgtcttggtattgacatctgctgattcccttttctgtacaagataaggtttttttttttttttttttcctggttctttgtgtgccaggtacttttaatgtattctagaacattttattattatgttataagactcttgagtcttgtttgaatcctgtggagaatgttagtatttttgttttagcaggcaatttaccaatttcagttcaggcttaaagttccaaccagccttttatgagtgttgttttaatgccggttttgttgttaatgcctttgtggtgctattcagatctgccccatatgtgtgccacctagtggcccttctgggacttcggtggtggtctattcctcagttcagttctcagcctctttggagtgatgtttaggatgaaatccatgcataggcagcttgggaatgagccaggaaatcagaaacaactttatggagctgcttttctgagctcctctccccaatttttagtttcccatggcttccctttttagtcttctagccagaaagatgggtttttatttactgtgctctgcaatgtgctttctctgatggcacccatgtccagagccaagccaggtgtatttacatctccattggagaggagatttcccctgcctcagaggttttagtaactttgggctttccactgcaaccctgtcactaccagagatcctttgctttctccccaagcctgaactagaggatttttgaagttctctctgtgccaatgcctgtttccaagttttccctccaagtcaaggaatcaaagggagaaaaatgttaaacttaccactggttaggtggtacttctttttctatattgaggcttccacttatttagctcttatgtaatttttctcagcaatattttgtatttttctatgtataggtctttacatattttgttaaattttttactgagtactttatgttttttgatattattgtaaattatattttaaaattcattttccatacagaactagaaatgcaattgatttttgtgtatttaccttatagcttgtgaccttgctaaattaatttattagtgctggtagcttttttgtagattgcttagggttgtcctatagatgattatgtgatctacgaataaagacagttttacttcttctgttctaatctgtatgctttatattttattttcttgccttgttgcattggctagtatcaccagtaaaatgttgaatgaaagtggtgagaatgccttgtttctaatcttaagaggaaagcatgcagttttgttatgttatgtgtgatgttagagatagatttttttataggtaccctttattacactacggaagtttttttctatttctaatttgttgggagtatttattgttaatggatattgaatttcatcatttcttctgcatttgttgaataataacgtttttctcctttttgttgttactgtggtgaattgcactgattgatttccaacttttaaaccaaccttatatcttaggataatcccacttgatcatgatgtagtattatttttctaagttgctgtgtttttggtaaatatttttacttctgtgatcataagggatgttctttagttttcttgcattgtctttatttggttttagtatcaggataatgctgacctcattaaataagatagtaagtgttcctcctttgtttactgaaagaatttaggtagtactagcatcatttctttcttaaatatttgataaaattcaaatatttaataaattctgtaaatgtttaataaattctgtaaagttggcaaagtctgtagttttccctgtaggaaagttttaattacaaattcagtttttcaatagctatgaagtcagtttcaatttctttttattttcattatgaaaatattttattcaaggaatatgtttattttatttaaattaccacaaatattggcatacagttatttttaatagttattattcatttaatataattataatgcctctaggccctatagtgattmcctgtctttcactccttttttttttttgagacagggtcttcctttgttgcccaggctgaagtgcactgacatgatcgtggctcactgcagcttcaaccttctaggttcaagcaatcctcctacctcagccccccgagtagctggaactacagacatgagccaccatgtctggctaattttttaaattttttcgtagagacagggtcttgctatgttgcccaagctggtctcaaactcctgggcttatgcaatcctcccattttagcctcccaaagtgctgggtttatacatgtgagcccatcctttcaatcatttttttgtcatttatttttagccttgctagaagttcacaaattttattgatatttcaaagagtcaacatctagtttcattgaattttctctgtattttttcaggtttgtatttcatcaagttctactcttatatttattattcccccatcttcttactttgggtttaatgtcttctttttctatcttttaagaaaggaaagtctgatcattaatttttaattttttgtctttctcatgtaagcatttaaagtcattaaatcttctaagtggtacacttacttagaggtacgtcttaatatctccgcaatcaggatgcatcttatgctcttacagttatagttgtcatgatgttttctttcttagtggtacatgcagtaacgatgcatcctacagtcactggtgtcctagatccaatgaaatgtaatattaaacaataactttgtttacaagtaagtaaagattcttacataataatgcttggtaagttatagctgctttcttcttgccatgcagccatggtttatacttttatagcatgatataacaaaatctttttttctttttatgcattatcctcaaaattgagggctcctcaagagctatcttaagattcttcaaagtatcttgtagaatgcttagcatacaagggtacacatgtttgtggattaaatgaaataaatgatgataaatacttaattgcagagtatgacattaaaagtctcccccataccgaagctctttgagcccatatttaatgtacacatcaaaaaattgcaattgtatatatgttgttggctatctctcacttttgrtgaactagcagtgcacagcaatgcattttactattttaaaacagatttccttttaatgcttctttgatcttttctgatcaattgctgtgctttatttgtttgtttgcttgtttggacatagattacctttgagtttgtttcctactctcaattaaatatgcaagacttacactgtccaaactcttccatttgtctgtttccttatttattttacccaataacgtttcctttagaaactttatctctgggtttttattttctttaactgaatgaaatagagcataaaattgatttcttttaatctctttagctccttaaagcactgttgatttcacatgcttagagggctgcctgggagggcaatactccagtgcagaattccataaggctttcatcctgacatagtctacctctgctgcctcaggtctagcagttcagtggagaaaggagtattttctactgcttcttttttctaactacagggaagttacatcatgtacatgtttaactcagaaactaactttagaacccagccccaggggaaaaatgactctattgtactcttagctgccttgtgaagcttagcttaccttagctgccttatgccttactgaaggagaagagcctaggaaaaatttcatatatcagccgaccttccttctcccctgtccagaaagccccaggttccctcagatgctgcttctttgtataggaagtcatgtgtctgtgtatctattagaatgcttttagtttggggtaacagaatgttcaactaaagagggcttaaacactgaggatgtatttttcacatttaatgttaagtctaaagttgggcaatcctgaggttggcagagtgatttagtgattctggggttatggtcttccccttagaatttcaatattgctgcacccctgtaagcatcatactcccatacaacatccatcccaaagctggaagtgtgggcagggctttctctgagagagagggagagagagcaaaagagagggagggagagagagcgaaagagagggagagggagagagagagagagagtgtgtgtgtgtgtgtgtgtttgtgtgtgtgtttcagggaggaaaaactttcccattaagcccctgtgtacctcctcatatatctcattgttcaggattgtgtcacgttgtgctctagctgcacaggagtctgggaaagcaagtatctagaatattcagtctgtggtgggagagaggctctgagagcagggaagaagttggagattggctgtgggtgggcaaccaacagtacctgtgtgcatatgtgagcatgtgggtatgagagacagttaaagaggggggagagagagagagagagagaaagaactaagattgatgttttgtatagctaaaggctatttttcccatacgaagttgttcctagactcatagtaaagctttggattacccatcacaatggaggatgataatggggttgaattgggctgaaattgcctttgcttcctatgacacaatcagaactttatattttgttttagttacttaaaatcttsgtttcattgtttcaggctgagtccagaaatcttcctgaaacgcccagtggttgagggaaatcgttggaggttggactgcattcttaaacgaaaagcagtatgtactttcccagaaaatgctgatataattttttaactgtctgttgtctytgaaatgcttttcttttcaaagcctttcacacgtataacttttcactttagagtttgacaaaaagtaggataactaatgttttccagttcatttggttctattttattcctattgcttttgagtgcataaatattttagactaattcacagcatggattatgttagcatctctaaytcttatttttgaatcagttatgggcagctaattttataggcaaaaaaattataataaaatttcatcattgaataataaatgatgaaatggagcatagcatttaattgtattcattattttgtcatttaagcaaaaggaaaactcatctggagaatggtttcagctagatggggctaatgtggtgtagaataatattaaagggggaggaatagtcacagttggtggtgttttttctctggttttggtaaagttcctggtaaaaatgtgaaactgtttcctgtggagttgaccctgtacattctgggtgaacattgaatgtgtgctttttaggtataaaaagtaaataactgaagcagcctaggctcactaatgactgcattcatatttctagtgatttttttaatgtaataggcccttaaaattaaatcagtttaaattaaaaatagatctgggatttattatttagcatgtccaaattaggaagtgctaactttttgctattatcagaaactgtcttaaccttttttttttttttttttgagatggggttttgttcttgttgcccaggctggagtgcaatggtgcagtctcggctcactgcaacctctgcctcccagctttaagcaattctcctgcctcagcctcccaaatagctgggattacaagtgcccaccaccatgcctggcttttttttttttttttttgtatttttgtatttttagtagagacggggtttcaccacattggccaggctggtcttgaactcctgacctcaggtgatctgcccacctcggcttcccaaagtgctgggattacaggcttgagccaccgctcccggccaacctttttttattctgtcattaaacatgctagcagaacgtgtggagcctaaataattggggttagcatttttctgtttctcatagctttcactcatttcttctttcctatcctctgcattccactttttatttccccattcactttccccttttctttctgtatcttttccccatgcatttacttgagtatttctggggatatccacaaatatagtcagacctcactgctaatattgaaagcaaaagaaattgataatatttatttgaaacacattctgccaaacaacatcattttgatggatagtctagtttgtttcatcaatagaattccagttacagaattggacattttgattctgaaaacattattcacatatttattaaataattcatcatacggttactgtctcctatgagccagcttctacggtaatcactaagaatgccaccatgaatcagatttgaaccttgccagtggcgaacttgctgagggactcatgtcttgggctcagtcctagccttaccagactactttctacctattgaatgggcagtaactttctctatgtttctctcaatgaaatggcatcttttccattttccctcaagattctattttagtacatttttccagccttgcgtagcaatctgtactaatactagtaaatttttgcttataatatttaatcagcacctcactgttttaggtttcaatcaatatgtatttattgaatgttttctatgtgcagggcatttggctaatcatatgaggatgtacataaataaaagccatgattcttaagttgaaggagcttataaaatctgcagaagtgtcagttgcmtgcagaaacaatgccccgatttaatggcaagagggaaagcattgggctttcccaatggaaaaggtccagttggggagctccacacaacatgaaggatgtggggcatttaggatggacaaacatttttaaaagggaaagaagaactttctaggtgtagtagatgtaaacagcagtgccaaagactttgtcaggcacggtagggtggttcatcacatctgagtgttagcatagccggatgggggattaagctggaactgctagttgcagctgggatgcagaggctttgtgagccaagctagtggtttgactttatgggagacagtggggcagtactgtgcggggcagggcggtgtggggaagcaggggtggtctgatcaaaataatgtgtcggaccccgtctctactaaaaatacaaaacaattagccgggcatggtggcgggcgcctatagtcccagctacccgggaggctgaggcaggagaatggcgtgaacccgggaggcggagcttgcagtgagtcgagattgtgccactgcactccagcctgggcaacagagcaagactctgtttcaaaaaaaaaaaaaaaaaaaaaaaaaggtgtccggaaggtgactctgatagtggaagaaactgggaagagctgattcagaaagctaaagtttagatcacttgaagatacagtgtctacaagacatctaagttaacttgagaaagctagtaaatgcctcggtagggctcaggaggaagatcctgcaggcctggcttccacctcttgtttgctggcatgcgcttgtttactgcccttggcatacctgtctggttaccttttctgtgtctagtgtgacttctctttacttttttggcccttgaaccctggcgaggtccctcgtgaacaccatggccaaataaacgttattgcctgataacagtgcttcatttccatttcatccacttcttggagctggtaatttttaaactgtgggtagcgatatttaaaatttcctaaagaaatagtaatacaattaaagattgatttcttggtggtacatttagcggagttgctcttccttaatctcattccaccatattattactttgttcataaattttttaacactcggatcactccaaattgacattttatatgcacataaatatggcttcacataaataatttagtttytgaaagccacacactagctttgcaaagtatgaggttgaaacataatatttgttttttgcattaacaggtcccagaggtccacaaggtttattaaaatgaatgttttattttcttctatctgattgtgcagatattctgagaggaatttaggaactgtctctgccttatagccaacstatggcaaacatctcttatgatggctgtttcttaagaaaaaatagaatattttatgtatctgattaataaccaagttgaacttctcctatttctttggccttctgatctgcaatgccatcatttaaaataataaaagccaatcttcagaggcagactgttcacaactcaaagaaatcagcatctcagggctttccacagttctgcacttgctatgctaagaggtgagataagctgcatcatacttatggcagccaaatccccacacgcaattttgtgtatctcaaccttagaagcttgtgatatttcctatgaaacttagactaatgggagaatttgtcttcaggttgattttctgtcctggatcacaaggcacaatgtagagttgcagtcagtgaccaataaaagggaaagttgtccagaactgagaaatgacaggaataatcacatctctacacagaaaatcaaatgagtcttatcaaagtggtgggcaacagtggcttgcagggaaggtatcttcagcttcaaaaatgtgcttcaaacaaaattggattttaaaaaaaggcacatgagcttttgtgctcttatatcccaatgctgcctgcttttaaacggtgaggaagtgatttctttatatcctttactttacatctttacattttcttaatatattgtattggggaagtccttggcaagtgacaaaaacattagtgagcatcctgggttgggggggtggggtgggctaaactgtcttcaggcagtggacaaacttggctgcatttagaaaatattttcactatgctcccttgagcaatcggaggaaaagttggctaagaaacaaagtcactgatttccactataaaaattttcttttcattgtcttcccatgtagtttgaatatctaaagctcctaaagatttctactgtttatagtgttatgtctgctctacttgacaaaaaactaattagaaaagaggacagaactttcatcttttaaaagtcatgttttatgaaatttattctatggaaactttgggtcagctgagttcaccagagataagaaacactgcattgcataggcaactccaggccatctgtttttctacttctcctattaataatttccgtccctttctttaagcaaaaagtaatttccccaagggtatttaaaggcactaggcactaaagcatgggatgttttgaaagtgtattttttaaattgcagaattaacatcatcaggtttttttttcctttggctttcattttgcagaaatatttcccacattttgtataagcctacactataacaacctggaaaatgccttcatccccaaggaatgattcattcgcctttkccctttatggctagagtttataatagtcaataccttgaccaaaagaagaagaatgcattgctttattatcacaggaatcttgtcactaattaactgtttattgtggctataggtgtaggtaaataattataaaccacatacaaatgaactttctatctttaattgcttcctcattggtcatttgtctttaagctaaaaagacaaagtctctaccctatttcctttagaattatttcaatgagaaaagacagtatagaagaaatgtcaggtattaataaatggagagtagtaatgtattccattagtgttaatatctctattatttcaaaaatccattagttatgcaggtragtagaaaactgtaggattcaggccaagttcctaatttgcaactactactcttcatgagtaataatgtcttaagcctaagaagcagaatttcatctgcttaaaataartgggtcatgatgaagaatgtcaggtgtaatgttctactatttaggttgaaattttgggttttaccctttgtattatatcttttagtgaaaggcttttttttttttgtaaccattattcagtgctgaattctaaaatattcaaataccaaaaatagaactgaacagtagaggagaaaaataaaataatattgtaattttcctttagagcccttcatcagtggttaattacagagcactctctggccagaccattaaaattaatctgttcactttctgcctatgcttttacttctttactgaaatatgtatttatattcttgattgtaatagtacttgcataattataataaataattagcaagtactaaaagccagctgttaaccagagaaatagtatgacatatatattcttcttgatcctgctttttttagagcaagaatgagtcttctcctagtactcaaatcttgttaatgcacaccagaatgtaaatctagtgtgcacctccagaaatacatacacctttaagatattactaacaccatgaaaaatagagtgttagtattttgaagtgttgtgttattataaggaatttagggtccaaaacgtgctttttagtattggcagaacaatattacagaaatgtttatgtgtttggtttgctctaagattttgtatcttgtgatgtgatctagaatctaaaaacattaactcctatgttatgttagatcgtatagcattacaaaaagttttagttcttgtaaagtaggtgtgttcaacccagtaagatatcttaaagatttttattcaaatttcccttataaacaatgactaatcaccatggaatcttaatataaactgtaacaaaattattttttattatggtttattaaatacacctgcatctgtaatattctagaaagtattatggaaaatttttacctttaatctctacgatattaaatgccaggtgtcatttagatacataatccagtatatatgcaaaatgtttcagaatgctttcagagctgctgggtgcaaacaatgcaaattaaaatggtgcaaactatacaaaaataaggaggattcaagcctaaaaagtaaaaaaagcaatccacaaggtgggggtgaataagccacagtttcctggaggtaatacattctgaactatacattggagggggatccatgagtgggcaagcagaaggagaggagcattccagtaaggggcagtttagcctagcctgaaagcctgtcaccaaccagaactagaatggaaaataccagtgtttttctatactattagctattggacctggtcttttggtttttgtttaaatctttttttcagatgagatgggtaatgtgcagacgtcgtaagaaggttcgagtgtggcacatctcacgcttgtgtgtgaacacacaatcatcatgctcatgaactacaaaaggattggacattgtctttttgattattaatattgttaaataattgtattatttgtatagcatgttagcatctacaaggcacttttgatttaatttgactcrattaaataggccacrgtgaccttgtctattttcttttagatccaaggtctaaggaaggatgaatcaattgaatttgggtgtccattttatactaaagttttcaatgttttggatctttaatcagttattgattctttcttgatatgaccagttgtaagaatggaagggagatagatttttatttttaatatttgtgtctcaatatacgcacttatgtgtcacttccttgtattgcctttttcattaaaattttatcttacttgtttataaaagaagttagaaagtacagtgcaggccaggtgcagtggctcatgcctgtaatcccagcactttgagcggctgaggcrggtggatcacttgaggtcaggaatttgagaccagcctggccaacatggcgaaatcctgtctctactagaaatacaaaaattaactgggcgtggtggcatgcgactgtaatcccagctactcaggaggctgaggcatgagaattgcttgaacccgagaggtggaggttgcagtgagccgagattgcgccactgcactccaggctgggtgacagagtgagactctgaaaaaaaaaagaaagaaagtacagtgcaaaggaaaaagaaaatgaattgtaacttccctccagagatactcattcctccatcggttttctcctgtgacagcaacaaggagtgaggatcttcataatgctctacaaagaggtggaactcgctcttggcatcaatagtgaatacaccaagaggactttgatgcgtctacatcccaacataaaggtattcaggttcatcttgataaccaatgtttctttattattctataggattttttcaggtatgttttgttctgggcagtaataatctatagaatgcccaaatgtatatttgatcaaatagcattgtgtcctcagaaataaagcaaaatactgtactttcttatcttccctacattgatgggggtaagcagatctcacatttctgcttctctgactctgataattgaaagtgagagtttagacaagaacatgtttcctgcagttgttttgatattcacgagctctatcaagttctcacacttctcattatcctggaacctcttagatgtgatctccctgtgacatcccctgatcactgatagcagcaaagagatctcctctaggatttaaaatgccttaaaaaatcaatggcacctagtataaaatactaataaagtaaataaacatgaaaagcaatttgaaaaagttctttgatattttgccaatatctaaaacctatcaataaatataacccagtcattgaggtacatcaagacataatgaattaacaaacctccagcaggcttaaaatatgtaacaattgtatgtttcacttggttagaaaaaatgaaagtgttttctcccaaagaatgatttattaggttgcgtaatttatatatattatttattcattcaccaaatttctatcaagtacccactaaagatgtaattttgcaacaccaacaactgtgagggaagagctgttaaaggagcagagatttgtatgttactgaagttaaactggtataaatacaaattagaatgttacaactttaagatgttacatttaactgcaaagaaaatagcaatcaaatatatagctatttaacaaaaagaaatgagaaaggaatttaaacatgtcactacaaaaaatcaaccaaacaaaacaagacagtaatgcaggaaatgagagacaaaaaagctataagacatgtagtagaaaatagtagcaaaattacagaagtatcttacaaataattactttaaatgtaaatgtattgacccctctaatcaaaaaacagagattggtagactggattttaagaaaccatgatccaactatatggtatctacaagagactcactctagctgcaaagacacaaataggttgaaaatgaaaggatggaaagggtatttcacacaaatagtaaccaaaaaagagcaagagtggctaaactagtatcagacaaaatagactttaaatcaaaacatgcttacaagagacaaagaaggacattatatattaataaaaggttcaatacagcaagatataaaaattatacatatttatgtacctaataacagataatcgaaatatatgattgaaaggagaaaaagacagtctatgataatagttggagacttcaacatctcactctcagtaatggttagagcaaccagacagaagataagtaagaaaacagaggacttgaacgtacagtaaaccaactggatccaatgggcatacagaacattctacccaacaacagcaggatacacattcttctcaagtgcacttggggcattttccaggaccatctgttaggctgcwaagtaagtcctaatagattttaaaaggtagatatacaaacatctgtctgaccacaagataatgttagaaattaataacagaaggacaactagaaagttcacaaatttgtggaaattaaataacacactgttaaacaagcaatgatmaaacaaaaattcacaagggaaagagaaaatacttagagacaaatgaaaatgaaacaacataccaaaattatgggacacagagaaagcagtgcaaagggggaaatttacagctatacttgcaagaagaagaaagatctcaaaataacaacctaactttacagtttgaggaactagaaaaagaagaacaaactcaacctaaaactaccagaaggaaggaaataaagattggagcagtgggaaataaaaccagaggatagaaaaataatacagaaaatcaatgaaaccaagttggttttttgaaaagataaaatcaacaaacctttagcttggtgggctaagaaaaaaaaagactcaagttactaaaatcagaaatgaaagtagagacattactaccaattctacagaaataaaaatgattctaagatattactgtaagcaattcgataacctagaggaaatgtacaagttcctagaaataagaaaactaccaagactaaatcatgaagaaatagaaaacctaaatagacctttaactggtaaggagattgatcagtaattaaaaatctcccccagatgaaaagccagggacctggtgaattctaccaaacatttaatgaggaattaccaccaatctttctcaatctttttcaaaaattgaggagaagagaagactctctaactcattaccctgataccactgaattgtacacttaaaaatggttaagatggtaaattttatgttatgcttactttactacaatttttaaaaaatgtgttattaagaaaacagtaaggccaggtatggtggctcatgcatgtagtcccagcgctttgggaagctgaagtgggagggtggctggaagccaggagttcaaaaccagcattagcaacatagcaagacacccatatctacaaaaaacaaaaagattagccaggcatggtggtacacgcctatagtcccagctactcaggaggctgaggcagaaggatcgtttgagctcaggaattcaaggctgcagtgagctatgatcacgtgtctacactccagcctcagtgagagtgagtctctgagaaagaaagaaaggaaggaaggaaggaaggaaggagggaaggaaggaaaagaggaaagtagttgccaaagcttttgtaatctttttacctaaaggtaaatgaaaataagataggtcagactgggataattttgaaagcaagaggttactaacttctcaaggtaccttttaaataaagagctgccaaaatatctatatgcctatattcatatgcttaatatttcaattcaatgactgataaaatatcaatataattcattacacatttttccagagataaatagtagttaaatatttttagctttttttttagtaccagatttaacataatccttacagggggaagggaaccagctttcaaattgagctgactgttttctaatgtattgccagacctcaagctaaatggcggctgccccaaaatatagtatatgggcgtgggagcttgaagagtaaataggagtcttttttttttctttttctttttgctaaatrctgagaataaaattattttctttggtgtatacgttgtacagtttggtrtttgaattatagaaaatgcttttcagggagaacacagacctatttcattatgacaggaaggacatttcaaaagcatattatcagtggggattattccctctcaaggtgatgagacacccggatcatgtgtcatccaccgtctatttgtgggctcaccatgagaagcttgtcatcattgaccaatcggtggcctttgtgggagggattgacctggcctatggaaggtgggacgacaatgagcacagactcacagacgtgggcagtgtgaagcgggtcacttcaggaccgtctctgggttccctcccagtaagtatatttaacctttatggaaatgtataacacgaacataatttgtataagtttgtattagtagcatgactgattgattcattgaataagagatggtgtctccttggaggggaaaagaacattttaagtcaatcatgagacagacctggtttcaaacaccagcttccccacctagctagctgtaacttagcattgctgagtctgttcttctcttgtaagaaaagaaaacagattcagtggaattttggctgtcccatattcagctttgttttccattttaattaagatttattttttattcagaaataagattcataaacaaaaatatgtggcaattgagatttaggtagtaaaaagccttaagtatctgccacagtttttggaaagttcctacttaaagatatacaaaaacaggataggtcagtctggggtcatttagagggaatttgagccagaagtgaataacttcccaaagtgccttttaaatagagctgccaaaatatctgtatgtgtatatcaatctgcttgctatttcaactaaatggctgccagaatatgaatacacttattaaaaaaagtgtatatcaatctgcttgctatttcaactaaatggctgccagaatatgaatacacttattaaaaaatttgatgggcttcatcttatttactgctggaaaatagtgcaaaacttatgcaaaaatagcaatttagtgcataaggaacagggaaaatgattgacagaggaagccttgcttacttaatgtttattagaggaacaagttcaggagctcaacactgaatgtaacccatgtaattgtatttgagattaaaagtttaattggagtgaaatttcaagaatttggcctactgaaaaaagaccatagcagaactcctcatattcctttggtagtttttaaacagttcacaagaatccaccactaccctgtggctgacctcagacattattgcatgtctgttatagaacctccatcatttgtaaactttatacttcagctctacttgaattaaagaaccacaytgcagcatgtcttatgcagtgtctttttttaaaaaaaaadttttctcagcctgccgcaatggagtctatggaatccttaagactcaaagataaaaatgagcctgttcaaaacctacccatccagaagagtattgatgatgtggattcaaaactgaaaggaataggaaagccaagaaagttctccaaatttagtctctacaagcagctccacaggcaccacctgcacgacgcagatagcatcagcagcattgacagcacctccagtaagtcatggccttgactagaatttatcttaactacccactgttcttccatagccagacactacatacctgtttttaaaatctgtctttctgtaatggagtagaatgagcaatgttgagaggtcgctatatcattctattcaacctcatgccatttggtggctttgtttgcctcattttagaacagatttattgttttatccacacaaaagtcataacgaccacgattaccacttctaatggtagcagaatgacaaagggtttctaaaatatgccaagccataaaagaaaaaggtattagatgtactttataaacttttcttagaagaaattacatttatcttcctatccagaaatatatcaagcttatttcgtcaaacatcagactttctacatcttgtaaatttactattcctttgaaatccatcttaaagccctacaattttctgttgcacagaatcttaagactgatgttatagccctgcctggttttaaaaatgatcagctttgctttccagtttagaaaatttgatatttgtatttttttgtaaaaaaattcttaatttctctaggttattttaatcactatagaagtcatcacaatttaatccatggtttaaaaccccacttcaaactctttcacccgtccagtgagtctgagcaaggactcactagacctcatkctggtaagtaatttgtgaagtggcagaactcccttaggcttgagctttggttgtgttgtctgctgcatgggcatagtgaatgtgtttccagattggctttctgtttgcaatttttatgctacgtatattattgagagcctgctctgtgcaaagcattctgtagtatccaagatccctactccctaagaacttatagcagcaaagacaaaacagacctaataagagaaaatgcatggcacatgcaattcaatagtgtcatggaagttctatggaaggagggaggaattcctctctgatgatgcagaaagactttttgaggaggggacatttgggttaggcctggaagtaatttaaytggggtaggtgataggaagtcattgcaagtgagggaggtgagttgagcaaaggtgctggaatgggaaagcaccaactgctttcaaattgtgtaaaatgcattatttagctaaaatgcagtttttgatataagactaagaagatatatgacattcacatttgggagctggaattttatttggttaaaaatctttttttttttttttttttgagatagagtcttgctctgtcacccaggctgcagtgcagtagggccatcttggctcactgcaccctccgcctcccaggttttagcgattctcctgcctcagctcagcctcctgagtagctgggattataggcgtgcatgaccgtgcctggctaatttttgtacttttagtagaaatggggttttgccatgttggccaggcttgtgttgaacccctgacctcaagtgatccgtctgccttggcctccgaaagtgctgggattacaggtgtgagccaccgctcctggccagttaaaaatcttgaaggcctttgggtggatgtgtcatgctgtgtgaattttcagaaattacaatctgatagcctttggtaagaagatactccagatactcgaggaattaatgaatgactaataagtttaacttgtggtgggaataaagaaggatttggccgctggtcagatatggggataagtaatcatcataataaatgacactagtaagatcataagctaacatttattttgcacagactctatccatcactgccctgagtagttgcagtgcttggtagtgatattgtcatctcctttttacagatgaagaaactcagggttagagatgakacatgacctgcccaatggagttccaatttatcatcctcccagtgcccataattaagacctgtgatttagcagaaataaagattactatgttatgcttttttggctagaacctaaggccagggctctcatgtcctgtttagcagatgagagttacagtctagctcacatgcctgaatgtgagtcacctgtggcttgcaggtgctaatgaacctgaaaaattatgctagactttgagtaatgattcccagcattctttcatctagggcaggggtgtccaatcttttggcttccgtggaccacattggaagaagaattgtcttgggccacacataaaatatactaacactaatgatagctgatgagctaaaaaaagttgcaaaaaaaaattacaatgtttaagaaagtttgtgaattcgtgttgggccacattcaaagccatcccgggccgcatgtggcccacaggctgtgggttggacaagcttggtccagctacgctgcattttaaaaaatgcaataatcaactacacacaatgaactaaaacttcagtgtaactgttaaataaatttgtgtctataaatcataacagcatcgatatatatttaagaatggagaagaggccaggtgcagtgactcacacctgtaatcccagcaatttgggaggctgaagcrggaggattgcttgagcccaggaattcaagaccatcttcggcaacgcagtgaaaccccctctctacaaaaattagctgagtgtggtggcatgcatctgttgtcccagsttttctggcagctgaggtgggagaattgctggagcctggaaggcagaggttgcagtgagctgagatcatgccactgcagtccagcctgggtgacagagggagaccctctctcacacacacaaaaacaatttttaaatttttgaaaaataaaaatggagaagaacaaatatggggagacatatatttatttagcatacacctagtactgggtgtatgtgtggattcagggacaactcccagtaattcctgtgcatgacaaagcttcaaagtcctgggaagtaggaggcctctgggaaatctaggaagccaggtcaagagtgcatgcagtggccgatattagaggtaaagggttggaaacagctccaggtagtgccttatcgtttcaatgtgtaactttgctgctttattactgaagttaaaaatgaagtggaggaaaggaggttgccaacccatgaagattatggatctgaattatgactgatagtgttgctggcaataggattgacagcaagtggaaaagatgtgagtgaggtgctgagtccagtaagtaactcacgcctaccccaggttgacagaggtgatatccacagtggtgatctgagacactgatcatacatgtgtatggtgttgctgatgaaaagtacccttgacatctgtttacaacccctcactgataaactgaatatatgtctagtgtagcattgttgagagacagagagagagatagagagagagaacaacctaaacgtcaaagagtagggaaatggtgargaacataatgaatggtaacaaatggttcatctcttttatggaattgggcaatgattacaactgtagttggggatacaaaaataaacatagaagatttatttatttaattaaataagtgtttattgagtttctgttatatgccaatcactattctgggtgctagagatgtggtgaataaaacagatgaagtgcaattaactagttggagggtaaggatgggaactrtgtatacaaatagagagtcaaacacatttcaggtggtgataattatcacggagaatagttgagcatgatccgggaggaagagcataggagaagagttactattttgtaaaggctcatcggagaatacatctctcatgaggttagttttcagctgacatcgaaagaaagagaagaatgaggataagaaactgagagagggtgtttccgacagaaggaatagcaagtatgaaaggccatgaggyagaggggttgggtgtgttccaggaatacggctgtagtgaagtgggctaggagaggatgataagaacaaaatcagagaggtgggctggggtgggttatgtgaggtcttgcagaccactgtaagattttgaccctgagtgagataggaagtcatcggatggtcttgagcgaagggtaggcgagggctgacttacattttccaaggatcattcttcagagcagaccagggtggcaaatggtgactctgcaggttgtgaatatattttgagggtcgagctgacagcatttgccgatgaactagatacaagatgtgagagatggagaggactccaaatctttggccccactggaaagatggaatttccatgaactgaaatgaggtggctatgggaagagcaaggaaaatttgaggacaattgccactgtatcaaaatatgttcgtgaaggcagctgacaaaggacattcaatgatgctatctttgttaggaagatggagcgtgaggtgatttatttttttcccacattgttggtactgttttcattttacttttatagtcaaatataaatacaaatttaattttttaaaatgaaaacagtttacctaaaaagaaaagccaaaggatcatggggtccttctagagcagtgctttccaaagtcgattccttggatcctggagtttttaaaaggctttgaggagaacattgaagtaggtgaaccccaggaccctcccacagctattggtacctcttcaaccagaacaatcccacttgtatctgttttaattattggagttccttctgaacttgttttcaaaaaagaaaagttctactaaaaaaatgaaggaagtttaaagagcaaggctctagatttaaatcatgtaataccttaaaaactcaggttgccttataaaacttgaaacccaaattaagcatggagtgactcttcgttagaaatttaaaactgaatatgaacttgagttaatgacttccttttcctgagaatgcaaagagagttagcctctctgcaatatcaatttcacttgaccgcatatgaccatgttgaattgggctccttgttgaattaaacctcctggtgtcatacagaaatcagtgtggagtgaacatcactatgggtttttatatagaaaaactgcactaaaaacgtggttaggaatcatatctgaaatatatgtttttcaaaatcactcagtcattttcaagattttttttcattcagaattatgttctaagagggagaattttgcttgatactatttttaaagtgttgaattttattccctttctttctttctttctttctttttctttttctttctttctttctttctttctttctttctttctttctttctttctttctttctttttctttctgtattatactttaagttctgggatacacgtgcagaacatgcaggtttgttacataggtatacaagtgccacagtggtttgctgcacccatcaacctgtcatctacattaagtgtttctcctaatgctattcagcaactatgtgctgatcttttccttttaagcaatattaaataggtaagtgagggaaaaattatttttgcaatttagttgagacaggcttttcaaatttgaatgtctcgtcacaagggataatattaagctgtttctaaactgttcttaggaatgcaatggataggatgtgtaagattcatctagtgctgttaaatagcttgttatctaataggtgagcatgagttttaaatattttacaaacctaatattttagtaattcattgagggaagatactcctactgcaagagtcatcattgatccacagacgaaatacaggtctacaaacccttaaccacgattctaaattccaaaaaattttgaaaaccaaaatattttttaaaatataacttgttcagtgcctgtattggaactggccttgaacatatgtagaaattcggtaggtagagactaaaaaggtagaaaaacaggcattttaggtagatactacatcttaagacccagatataggaaatgcaaaagtatttatttcggcatctcagactgagtgtagaatgtggtaaatacatataggtctataatctctcatacaaaatccttggaatcagatttcagaaatcagaaagttctggattttagaaaggtaatacaatacctataccctctactatattacactcccagcaggatccaggaaatacctggaatgtaggcaaaccatttatgtttgtgcaacaccaagtgggatcaataaagataataaataacctcttgtcagttcaggtcagattttgctgacctgtgagttatgaaatgagctgtgaaaatcagctatgaaaaaacatttgaattgttagaacttttggagttttggaattgtggttaagggctgatttgtgcagattgagctggtgggatatatctgtagcagtttacggaggactttgaaaatcagactgagacattgcacctcttccattaaatgttggaaaatccctaggggcagggagcaattaagggtgaggctttatagcgtttatagtagagacacagggagtctgacaaggttgtgtcagtgagttcaagaacgaagtaaatgggagaaactttttccaaaagcagaatcagcagattttcatcatgatctgggaagccgtggggaggtgggtggagaagtcagcgaagaataaaggagccaaaggtgattccgaggtttgagcttgagttactacacacagacagcagaaatctcaaggaaagacttgattttatggaatgatgatgattttagtgttagacataattttaaagttctggagggaactaggtaaacaatgtcaagtgaggcactggaagtgaccttagatttggagtccaaaacagaagccatccttgcaggtgcacattttagaaattgtatagaaaaagacaggagaggccgggtgtggtggctcacgcctgtaatcccagcactttgggaggccgaggcaggcagatcacgaggtcaggagttcgagatgagcctggccaacatggtgaaaccctgtctctactatcaaatacaaaaattagcagggcatggtggtgtgcgcctgtaatcccagctactcgggaggctgaggcaggagaattgcttgaacacttggccctgggaggcagaggttgcagtgagccgagatcgtgccactgcactccagtctcaaaaaaaaaaaaaaaaaaaaaaaaaagaggaagaaaaagaaaacaaaaagacaggagaaagggggaaaccttgttagtgaggaggagctaggaaagaagaacaaggataggctggagaaatggtagaaaaatggagacctggaagccgagagatgagaatagaaggaggaggatgtggcacgaccagaggacaccaggcaaggaacaagaagtcccccttctcataaactttagtagccagaatctgagccactgacagaggaggatgcagaaaattggcctgacaaatctgtgccaaaagacaaggcaggtgcaattatgaaatcatttgggagccagatagcagcctaacgagacccccttggatcagcattgttgatgccataagtcctctcgaccacactcatgtaattctgagctactgttttcacaggaactagtatttggctctattgccttaatagttcatttgtactgaggaggaaccctaatttatgtggaatagtttttaggccatggctaaaaacaaaaacaaatttgaattatgagcaggttgaattcaattagtaccaagataatttcctgagactaagaatttcctttattttccttatcataactggttgttaggtgaaagataatttttaaatgagtgtatatgtgtttatgtaaagccttagcttagagttttgcagttgatgaaagcaaattgtatatgtgtattttatatttgaaatttgaaatattgtttatctcatttttcatcccttttgtttcttttctcaccctcttttcttcttttaacaaagtgctatgtaaacaataaagagcctatagatgagcaaacagacctacccgtactttggcctttcagtctcataaagcaggaaaataaatcactgggagaagtcaatagaagtctatttttaacatgatttcattttgctaatctatggcattttaaatcatttttcttctgtagaaaactttaatagcctttgaaaggttaatgattcagtttgagatagaatattagcattgtgtgtggtgattacataaaaacatttgttctgcaaatatttattgattgcctgggtgcttggagctactggcagtgagaagatttggttcccactcccaaagagtttatagactggtgaggcattgatgcgggcaggggagcatcctgatacaattgcgtcacagagtcagaggtgttggggcagttgttagtgggatgacagcagtgctagtgactgcctcttccttatggggagatggsaggtgatagctaatgtggctcttgaaggatgattaggatatcaggccaagagggagaaaggagcatttcaggtagaagtaataatgtgccaactgcatggagacatggcagtccacacctgttataatacagtgaaacacgtgatttgcatggggcctggggttgggtggggaaaaacaaggactagaaagatagattggcaccagtttgggaagagtcttctatgcacactaagcccttaggacttgagcttcctataggcagtatgtgaaccttccagggttttaagcaaagagtgcattttacaaagacagttctgggacagtgtgttggtggcaggaccagtgtagtcctctcactggctactgcaagcagtaccatttattcattcaacacatatttttgcattcagtgtctatttgttaaatgcctcttttgtgccaagtgctgcgtttgtgatttgtaattctgcatctttttacttcattgtctttgtatttagccgtaagtcaatggtctcggcacagttatttgtgaaatgctatagtagattgctgcttttgcacctatatcataagctttcatctgttgttrccatattttttataaatgccatctatgatttgaagtatataaatgttaaagcgcaacagattttagctgttatctaggccaaattcttcattttacgcataatggatttatgatctaaaaaactgaagctcagtgtcacttagctaattaattccagggctggaacatgggctatctgtaaatttgaggttcttgctttaatgcaaaagaattatgcatcaggtgtgcaccatgttggttgaggaaaaagaagtggcatggtgtctttattgcccctgcgtctcaggtttctccacctctcccctccccgcccttcccactctgcccctgaaagccccccaccagctttactgctctcatagtgccaccttgtgagttctttattcacagttaattctgtgatagttcttccagtgatctggtaggtggtggaaataagttactcaactgcctgagaaggtcaaatttcattgtttaatgatgaatcttgttgtagccctaactgcccactaaaagtaaacttgtaaggactgtaaaaccttgttagcccacagcctgtaatagaatggacagatgccaccctagttgtgtcttaagaaattaagaagcttttaggtgtttaataaatgagagttgagcctccctttctgggactcacctgaaccacagtctctgagggggtcttgctgcattcacagataccgggtccatccgyagtttacagacaggtgtgggagagctgcatggggaaaccagattctggcatggaaaggactactgcaatttcgtcttcaaagactgggttcaacttgataaaccttttgctggtgagtatcataatggtggggtgctggttatattttgtcttttacctttgaacatctcagcaagtatacatgtgcatgatctaaatgccttttgttttgcttccgttgatttttgaaaattttttaaaactttggagactagatttagtcattagcatgtgcttaaggacttttttttcagttataataagaaaagaacatgaaatagagctgaactgtctgaaaaatccagatttttataggcatattttgggggcaataatcagtaatttttcaggaaatggtaggctccctttgatcatcttctattctgcttatttcctgcatttcyagcrttagaatggcatattttcaggttatcactgggtttatatgtttaagaggagatagagatggcattgcctgccattgtttcaacaggataaaaaataaaaaatataatatcaaatacacagccttagataatttgtaccaactcacatcttgccatgtctagtgattatctaatcctaagtgaaacggaaacatatgtggggaagtgcctgggagactatgtccctgaatgtgaaatctgtttcccttgattataaaaatgttgttctatgcaagccaagaaatatatacctagtgggcactaacccacgtttccttttagtttcatagttggagtcagagagactttgccccaacactgaagttaatgactgatccttgcctggtgcacccgggcagatttcattgacaggtactccacgccccggatgccctggcatgacattgcctctgcagtccacgggaaggcggctcgtgatgtggcacgtcacttcatccagcgctggaacttcacaaaagtacttggatgttgctatcatgatttatccacatgaagagaggcaggcctaactagagaagaggtttagaggaggctggtagcaagaagagactgttgtggccacaactgtgtcactgctctgctgttggctgcattgatgtccgggtgcctgggcatctgggcaaaaaaaaagggaaacattcccgaatgtccacaccatagacaattcagagtgcctagggacaggtgctgctgtgtgggtcctgattttaaccttgttaacatcttggacacagtgttgactaagcatttagtagcctgggctcggtagtcatttgcagggctgttatagggggataggagcctggtttagatgagagggcttgagctttaaagtcccatccagttggatgggactggaattgcactgggtttatattggtacaggattctgagagctggttctgagcaaaccaagaagtattaagaaggtggggccattttccttttatccagattgtgtcctcattacttgtaagaacttgacataacattcaaacctaacattcataagttaagtacgtatcattcaggccaggcacggtggcccacgactgtaatcctggcactttgggaggcctaggctggtggatcacctgaggtcaggagttcgagaccagcctgaccaacatggtgaaaacctgtctctactaaaatacaaaaattagctgggcatggtggtgggtgcctgtaatctcaactgctctggaggctgaggcaggaaaatcacttgaatccaggaggcggagtttgcagtgagctgagaggactccattgtactccagcctaggcaacagagcgagactctgtctcaaaaaaaaaaaaaaaaagtacatattcaggtgttattaaagtttcactttatttacttgaagggataatgagtcatgattccccttggtcatttggaaaaagaatttagttttatcaaccacttagagtctaactttgtttttcattcacataatgattataaaaatttagtggacattctaattgaaattttttaacaaaaatttaggggagatggatgaataaacaaatggggtgttacttttaacctgctatactggcaaagataaaagtctctgctgatacctgtagttaggtttggggtggtttttgtggtgtgctcatacatgctaccccagggaggataaatttgtacaacaccaataagtcttttttaaagtatgcaatctttgatccagaaaaactatttccgggtattcaaactaaagccataatccaataaggtaatttattttgatatggcttctaataattcaaataaaattagaaataacagaaatccttactaataggaatttattaaacaaatgattcttttataccattttactatgaagttattaaaaataatgatatcccactatattgctgtgrcaagatatctagaacataatcagtaaaaaattagtttataaaacaatagtctcatttttgcaattataaagttctgtaactacagattatatttaacctgtctttacaaatataaaacaatatttcccctacaaaaggtaaaaacaggactgtgagaagtagaaaacaaacacaaataatctgtagcccttcacttagaaatgtccaccattaacatttttctttttctttttcaaattaacctgaatttcttttcttttctttttcttttttttttttttttttttgagatggagattcactcttgtcacccaggctgtagtgcaatgatgaaatctcgactcactgcaacctctgcctccgaggttcaagtgattctcctgcctcagcctcccgagtagctgggattacaggcgcccgccaccatgcttggctaatttttgtatttttagtagagatgggggtttcaccgtgttggccaggctgatctcgaactcctgacctcaagtgatccccgcttcttggcctcccaaagtgctgggattacaggcgtgagccactgcacctgggcatgaatttcttttataatcacaaagtagggagaatgaatcttttttctcatttgaatattttatcctttttctttattttagattatgaaatcaaaatatcggtccctttcttatccttttctgcttccaaagtctcaaacaacagcccatgagttgagatatcaagtgcctgggtctgtccatgctaacgtacaggtaagtaagttctggcttttctttttgacaaaatgctactgagtaaaattactgttattggaccaagggcctattacattggcttcagatttttcaatgactgcttttctaaagcaaaactaaatggatcttttaatacttgttattatatttcctatgttaaatggattcaattcagtctctttttaaaactcttataaatataataaatgcatgtccttagaaaaggccacagccaaggctattcctgtaattccttctgaagtgaccctagcaacatgatacccagtaaacctggacctgatactgcctaagcaccaggaatgtggctgaaacttagcagctaggaagctagttgtagttcagtctaattttagttcctgattaaccaaatgtcttctagaggcccttttaatggaataaggaatttgcttaatagagtcacaacagtttaccacatccagtttaaccatctcaaactacaaataagaaaattcagacctagtggggctctgaggcctatctagggccggccagctagttatcaacagaggtggagcttgaaatcctagtctggtccagtgttacccaatctgcttcctttaccaactacagctcaaatatcttgagatcatgtggggacagaagtaggatgggccacctttggcattgccttttgtttgaagtcatcaatatgggcatcagaagaattgtttaagtaaagtccagcagtctgctactgctacatatcatcagtagggaccatcagtagggacttatataatgcagacatggatcctagggaatgtgattatataaatgaagtgcctaaatcagttattttgcatcrtgtgcaattggaggtatgtgtatwtaagaaataagacatttcagactgtagatcaaataatagaactttttttwaaaaaggccaggtgtggtggctcccacctgtagtcctagcactttgggaggccgaggcgggtggatcacctgaggtcaggagttcgagaccagcctggccaaccctgtctctactaaaaataagaaattagctgggcgtggtagcgtgcgcctgtaatcctagctactcgggaggctgaggcaggagaatcgcttaaacccaggaggcagagtttgcagtgagccgagactacaccactgcagtccagcctgggtgacagagtaagagtccatctcaaaaaaaaaaagataagctgcttgagagaaatatcggcagcaaatattagtcatcccaggctaaaaagaaaactaatttaaactcagaggcatagagatagctatgatttatatgtaagttgatgaatattttatgaacctgtttaattttattctacgtagaggagaaaaaattaccaatgctagaatataaaataagaaacttgttattaggaaaataagaatttaagatttgaacttgcattattattgacgtggtggtcaatttttcaaagttagctgatgttaataagtatctgttgaaaatggattgctgggaattaagtatttttgtaatcaatgaaggaagttttagcatagcgttgcatatgcatatattttccacttcactgttggtaaagccctgactcacatagtctcatcctgctgcctggtgaggtcaatagagactctataaaatgcttctcttcgttcgctttttccgcatcactgatgttgtgtgagaaatgacactagagtgggtgtggtggctcacgcttggaatcccagcactttgggaggccaaggcaggaggagagcctaggagtccaagaccagcctgggcaacatagtgagaccccatctctacaaaaagttcttaaaaaattagccaggcatggtggcacatgcttgcggtcccagccacttaggaggctgaagcaggaggattgcttgagcccaggaggtggagactgcagtgagccataattgcacccctgcattccagcctgggcaacagagcgagactgactcaaaaaaaaaaaataaaaataaaaactaaaagaaaagaaatgagactagatctgataagctcatatgttaatccctcacatgttcaggtggcctggactcaagaatctacaaagccaaggatatttaacaagacttactcactcattcattcatttattcagccaacatatgtttactaagtgttgtccgtttgcatggtgaagtcatcaaagcacacttgggtgtcgagagggcagacagcaaaggagttctttgcctctggaaacttagttagctggggagagatagctgagatgaataattcagttacagtgcaaggtayggtctctgagtaaatgctggtgtgacagtaaggaccagcatgctgtaagagtttggaaatccagagggacagaactgggtgtccactctaaggaatagtcctgcttgctcagaagacaaaaggactgactgcagtaacccattcgctcttagagaggcactgatgaagttagacagcataaggccagggcgggggcggggtgggggctacacctggagtgctgtcctagtgaatttggacctggtcctagaagtgctagtgaactttggatgtttttttttttcgattgggcaagaagcatgatgcaggaatgttcaatgaagattaatggaggagagagttttccaaactgaatttacctgtgagatgctgataactattccacaaagatttccatggacagataaggttttgcagaattctttaatacaggactccttagcaccttttttatgctacagtgtattataaaaccaccaagaaggaatatgatgtgcgcatttcccaagcttatttgacagagaatctcttgttttatgcattcttatctgtttccatctttccaaacaaataccttgagaccaaaygtttatacacatgaagaacttattagactagagagataatgagagcaaggggacaagtgaagaggctattacagtaattctgacatataattaagtcctaaactagaaatgaagagaaggaacaaataggaggtatttttgaggaaagagacaaarggacatcacgactaggaactaactgaaaatttgggacagaggaaaaagttaaagatagtttagtgtcacaaagtctccaaagaaccataggaactgtgtcatgactgatgggccagggcactaattgagatcaccaaaggactcaggtagctcctgtagtacatctagttcttggtaatataaattttgcagcatgataatggatatataaaatgggtatataaaagtgtcgctaggcagtgctgctggaaatatccagctaaatataataacatgcattttcacgctaacaaatcataaaagcacacaaggtggtgtggtatgaagattgtatagcagcatgtggcctcagcatgccattacccctccctgagcccagttttgtcatctgaaagacttatgtttggtatgaatctgatctgagtcccttcagacatttaaagggaaaattttcattcattgtctttcatacaagaggtatcattcaaagtacaggtgttaatgactttctatttaatcctcctgctatagttatgatccctcacaaaataaaactcaaatggccaccacagatacacttcttaatttttaaagtagttagaatgacacttatcactaaatagaaatagaagccattgctcagaatttttaccttgatcattaaacttgtttctatggatctttgagagaaaaggaaaatatctaagtaaattaaaacatcatrggtacatttagccacatggcagtgataaataggacaaaaattaaaaggaaggataagagttaagaaactaggacatcactgatgaactcttaaattccaagattataagattataatttattttattcctctggtcctgaaaacctgctatttctataattagctttttgccatctcagtgcctaaagtaaaatctcctacagactggctggagttaaggctgtaagtagggaatgaattgctcccttcaggaactcatgttccttgcagcttcaggcccttgcttagctttaggaccctcagccacccaggccttttctagacctgttctcagctttatatttgtaaatttgcattgattttattaaagaggcctcagggtatttggagtgtcatgatctcaagtcttctgttatttctatgtgtttggaacatttcatgtcctctcgtccagctcttttgaaataccaatacactgttgttaactatagtcaacctgctctgctattgaatactagaacttattccttctaactatgtttgtacccattaaccatcctctctttatctccaccctattccctgtacccgcctacacaaacccttcccagcttctagtttctatcattctactatctacttgcatgagattgactttttaagcttccacatatgagtgagaacaagattttaacatagttgactgttcataatgtaacttagaagccacaagcttatttaattgtgaagaaaaatataaggtagcaattaagggatagattctagagccagactgtgttaacatctcagctctgtgacatatgagctgtgtaacctcgggaaaattacttcactctgcagtatgtttcattcatttaaaaaacataaatgacagtatctgtctcacaggattgtggtgatggttaaattaatccatgcaaagcatttagaagagtataccagtttgagttccatcaaaaacagccttcaagctttcgctagtgtttcaaaagtttgcaacaggctgggcgcagtggctcaggcctgtaatcccagcacttacggaggccaaggcaggtggattacttgaggtcaggagttcgagaccagcctggccaatatggcaaaaccccgtcctactaaaaatacaaaaattagctgggcgttatggcgcatgcctgtaatcacagctacttgagaggctgaggcaggagaatcgcttgaacccaggaggcagaggttgcagtgagccgagattacaccactgcactccagcctaggcaacagagcaaaactcgtctaaaaaacaaaaacaaaaaaagtttgcaacaaagaagttaacatttctctgggtaggtcaccaagcttgttctagatagaaatttttatgccataaatctattggaatggggagaaagagtatttgacataataaagtaaataatagataaaattcaagttattctttcttctggagaagggcacctagttattaatttttttaatacagaaacattggtcacacgccactggcaattccagagggggagacacagccagccagggagaggggagctacggcaggcagtatggatgcctgcccaccagcacgaattgctgctcctgaaaaagttatctagacctgacagctgacttcagcagcttccactgtacttttaaaagaatcttggatgtttcccctcagtgctgggccttctcagaagcctgccaagagcactcagagaagacatggcaggaaaaggcatgggtagcaggaggaagtgggagagatggtcctgaaactgcttctacacagagaaggtgaaggaactagaataaactcagttccagaatggtcttaatggcatttaagatatattataaagacagaggatatttgacatgtctattaagctgaaagaaaatgctgaatgccgtgtcagcatcaacatggggtcaacacatgggaacaatcctttttaaagctcatagtagaaaccattccttggacagtcatgctgagaattcctgcctatatggaaataactctactggaataatgtcttcagtcctacttatgggaaaagaaggaaagaaggaagggagggaggaacaaagaaaggaaggaagaaagaatgagaaaggaggaaagggaaaaaggagagagggagagaggaaggaaaaaaaaagaaaattttcaagaaagtataaataacatccaaattataccactgaaaaaaaattgttttcacgcttggaataaatgtccaaaggatattccmaaggatctgttagatctgaaaggacagcaaaatgttttgtatcccagaatggtgtgagagaataaagtagataggtgaaaaatraagtgagcaggtgggggtaaaaggaatccaccttgtccatttccatggaagttatttaccatgggagttgttttccatgtatgggccaggccttcatggactaacacgtttgtgagtgttactgtgggtcttggctagaagagctgatatgaacagggcatttgctgtgtgcttggcactgtgctaaccctttgtgcattatctcatatacattcagcagtctgtaagctaaactcctgtgcagcctgtttctacagatgaggaaactgagactttgagaggttaaaataacggtaactagtgggggtctagtgcggtggctcatgcctgtaatcctagcactttgggaggccaaggtgggcagatcacctgacgtcaggagttcgaaaccagcgtggccaatgtattgaaaccctgtctccactaaaaatataaaaattagttcagcatggtggcatgggcctgtagtcccagctactcaggaggctgaggcaggagaattgcttgaacccgggaggcagaagttacagtgagcagagatcacgccattgtactccatcctgggcatcagagactccatctcaaaaccacaaacagtaagtggtggggatgacttgcttctaagcagtttggcttcagtgcctgaggttaattagctatggatactgtttccagtaagaccaggatggttgtaactgctggggctctagcagagcaaagtttcatgtcctgtttgcctttgggtatcaccttctgttgccacagccccaaatccatccctaactctccttttgcttctttctggctcccaagaacacccaactaatactgtgtttcctaggacttctttcaccttaagtcctattcttcaataattatcttttctttctgtccttcagcctcaaaattaacttttctcttttgttcaggaaaggaatcatcctatgtgaataacygcacactgtgatatgaatggctgacactcaactagaaaagtggctatgaaaagaaagagcttgataagatgagacaggttcttgaactaggtcaatttcttgatgctccttgcctgctgttctcagtacagtctggaagaaaaaggcccgacaatcagaggcttcccttctctccccaatgcataccacttgtgagcttctacacagttggcctctgcttgtgaaacatataaaaagtgcttttgtcctaaatagtctttgttccatgattgacttggaatctcagggaaataaaaaggaattcatatatgtgctgaatttatagggaataaaagcattatgatgagagaaaggaagggaatttgggacaaatactaagaaagatccaaaggttttccttcagaaagaaatttctgttatttaatccatacatttgacttgggcccataggatggaaggtgattagggattgtggttaaagagaaggctatattttaggttaaaaaataagacgtagcacgaagaaaatgactagtccaagttacagctttgaggttaaaccataaaatcagaaatatgccattttttatatattttaaaattatgtattcaaactcgtggtttgaaaagtatagattagatttgattcccagcacatttgggacggtaagataagctatatttttgcatgtgagggaacagtttgagggttatctcagttacattggtttaaaacagaaatgcaagacaagttggtgaagtcagtgaagaaaatgaagagagtaaatattaaaacaaaaggaaatctcagtggcaatggaaaaaggtgaaaaaataaaacaaaaggaaatcaatcaaaatgggtgataatggtttggctctgtgtttccacacaaatctcaccttgagttgtaataatcccccacatgtcatgggagggacccagtgggaggtaactgaatcatgagagtaggtctttcccgtgctgttcttgtgatagtgaataagtctcatgagatctgatggttttataaagggcagttcccccgcacatgccctcttccctgctgccatgtaagatgtcccttttctcttcctttgtgttctgccatgattgtgaggcctccccagccatgtggaactgtgagtccattaaaactctttcctttataaattatccagtctctggtaggtctttattagcagcatgagaacagacgaatacaatgggtttgacttatttgactgttgataaaacttcctaggccatcaagcatttaaagcagttaagttgatttttatataacctcagggttccctgcctgtagttcaatggtctaggcagagcaagaaggaaattcgtattttccatttttcttgtggtgatagggagattttaactaattagaatagtagtaaatgaataacaatcccaagtgattttcttcatgtgttgcttgaaagatatgtttcaagtttagccacaaatgatgacattttttaattaatgagtttttattgtaagtaaaggatacggggcttggactcaggcaatgggatagatgatgctgaagcccctcaggaggtaggaaacccctcatacttgatggttttgcaggtatcagggagccccctccgctttttcttattatgctctcccacaggctgatatataaaatggtcttttttttttttcttttgagacgcagtttcactattggtgcccaggctggagtgcaatgctatgatttcggctcactgcaacctccgcctcctgggttcaagcgattcgccatcctcagcctcccgagtagctgggattacaggcatgcaccaccaagcccggctaatttttgtatttttaatagagacggggtttcgccatgttggccaggctggtcttgaactgctgacctcagttgatctgcccacctcggcctccgaaagtgctgggattacaggtgtgagccaccgcccctggccataaaatggtcttcttttggcttgaagctttaatattttaaatacttaaatgcctacagatagagaaacatttaccattatccttcacagaaaaaatggcaaatatgtgaccttcaggcgtccccttccatgaaagccattgaggatcaatctcagaattcttccccagtgcacctgctttcaagaatcgcctcttaacccagctgtccaggaagccactctgaatctattagacttcatatgcaagctgacattgatgtaattctcctcatgtgtatcttatgtgaatgaatttattgaatcttatgtgaatgagttcattgagtcagagcaaattttgagagtgagaaaggaaagaaagtataaggtttttggattcgagggaaaaactcagatgttaccagcaagggtgggttataaactttgcctataactttttacagaggtggacatactgtatatagaatatctagtactaagtgccacataccattattatcactttgtgtttgttatgccatttttttcttcacagcagctttaggggatggggagaggtctcagttgtacagtggaggaaactgaacctccatgatatttaaattatatgtaaattctcttacaccttggacaagtcatttaaacatcatggagattccggccgggcgtggtggctcacgcctgtaatcccagcactttgggaggctgagacaggtggatcacttgaggtcaggagttcaagaccagcctggccaacatggcaaaaccccgtctctactaaaaataaaaaaaaatagctgggcatggtggcacacacctgtaatcccagctacttgggacgctgaggcaggagaatcacttgatcccaggagacagaggtttcagtgagctgagatcatgccactgcactccagcctgggcaacagaacaagactccgtctcaaaaaaaaaaaaaaaatcctggaggttcccttctttccagtgtaatctgcaattgtatacgttgcctccagagttgtatagaattacatcaggatagcatgagaatcttctcaaagtagcctgcattttcagtgctatgttccttagtaacaaaattaaacattaatttgagtggactaagaattaaaacttctatttcttcaacctttgttttttctacctgatgaataataatgcagctccttggagatgatgtaaaatcatgatatttttccagtgtggataatatttatctaaattttccttatgagttmtcttctatgatatttaatatattcatgttgacaattaaattttgaaattttgttgcacatattcatctgataatttttttaatgctttgattggcgatattttgtaataaatacctcatattggataaagaaataacactactgaggatggcacagtcagcgatttttagtaagtgtgagttttggatttaatggccgtatagttgcaattttaaagttattgatttgaacaagaatttttccaggccttttatatacagcagacatagaactgattatgtattggatcgctttgtatattcctaatgagtatgggascattctttttattttcaatatcagttgaccttataagggacagttttaatattcatttcaaaccagaaatagcaagtattatttttatactaattcttctgtgtgtcatgctattgtttaagcacctactatatgccaacatcatactgcaatgctagttagaatgttggaaaaaagtgatgaccaatggttgctgagtgttgagaacaccttctttccatgttctctcatcctttcttctgtgcacagccacagtctgctctgcagcatccctgacatgacctgccacagctcaaacacatcttctaatgctcattaatataacacttataaccacttaatagataccaggcctcctgctacacatttcacggtaattcacttaatcctctctatgaccctataaagtagaactccattttatagaacaaaaatctgaggcacaaagaggttaagaaacacgatcaacagccagtaaatagttgagccagactttgaacctagacagtcctgctctgcatcagtgtatataacctatattcaggtgtctgagcgagaagaagctcgagtaatacagcctggacaggtgagtgtctgcgtagagcgaggcaatgtgagcgatgagaaagaggcaaatctgagaaatcctccaaagaataaactgaagtagatgtgagattgaatatagacgctaaggagaagaggcatgccaaagactaatagaatgatggtatgcccctggccagtggggtatttgaaatgggaaatggtttagagaaaaaagtcaggagctccacttcgatgggtttaatctgaggtgatgggatcaatcccaaattgactggcatgccacacacatgtgatgaartggcaaaacagtgtggcatagtagaaaaacttcggatatggaatgacaaaaagcaagttcaagctgtgatgctgatgctagtacctctgtgacaccatgcaagtttctttgcttctctgagccccagttctctttcctgtgattaatttcctttattatgccattagaaagtttagactaaagtggcgtgccatggaacagacagctattaaaggtagaatgaagatcacatgccaaatgrcctaccttttagaatgtattaatctgaacaatatctatttaggggaaaaggaataatcacattgttaagtcagagctaggatggccataccatatggtccaaaccagtacccttttaagagtaaagatgggtgctctgaataaatgcaccagaacaacagggattctggtataattgagggactgtcataggaaaggaatacaaatggttaccatactcacagccatcagaagaggtacttctgaaatagtctttgtagaaaccacaatttgtggtttccagttttgaatgaaaataatcctggatgaaagagggtatattcaggatgtgatttccagctgaggaccttcyttatggactacatccaaggaccagttgccccctttctcccctcttccttagcagcattccccaccccactactctcctttggttcacacatgacactcaagccactgtaatcattcagtcgtctggaagaaaaaggagtgacttcattgtattaatatatctgatgtcctctccattgctaatacttgttcatttctgattgctgccttgtagttgctccgctctgctgctgattggtctgctggtataaagtaccatgaagagtccatccaygccgcttacgtccatgtgatagagaacagcaggcactatatctatatcgaagtaagtcttgctcatgtaaattcgtgtgagaaactgccttcccttaaatatyatgcagagatttcagggtccccaaacttaggacccctcatattaataagtatattttgaggcgtgaaaagtgctggagaagctctggttcatatcacctgaattttgacctcccaagcatacctggaactggctctgcattgtcattaactcaagattctattgggagtctcacaaatctttgctgttaaaatgcatcatcaactcattgtaatagtattagacagaaataccccaacatggataggtaagttttgttttcgcttgggttggagggtttaagtgtgaagcaagttctatttcaggagagcacacacaggggtgagttgctaaaatagagaccactggatgccactggtttgggcatggcggagtagggagagtgcagggaaaagaacgtggaaaaggaagatgtgagaacattaagagcaggtaccaccttcttcaatcctgtgtgaactactattgattaggaagctttttttcatcccagaatttttagagcatatgagaaaatctggggacactgagtttagtttgggaacttaaattactcttcaaagtgaatataaaaatagttcagagaacttgaaaaaccctgagaaaataaaaagtcacaataatggaaaaaataaatcatagcataatttccttccttatttgagtcttttctttcccattgaattttttaaaggtagataggggaatgggttaactgaggaaaaccattctagccctgtttttcttccccttgggtcctggccctctcccgctctgcacagcaacaattcattagagacaagcagggaagaattggagctttatttgtttcatgagcctggctagagaaacctaagttaaatataatatattagctggctaaatgcagtgtggtatcctgaatggcatcatggaatagatataggacattagtggaaaatgagcgaactctgcataaagtctggagcttagtaatgctattagtattattaatttaaacaattataccatagagatggaaagatgtgaaggctggctcatctattgcccagaatcattttgcttcatctctttttagtagcattaacatcagcttttctggccgggcacggtggctcatgcctgtaatcccagcactttgagggggccaaggcgggtggatcacctgaggtcagcagctcgagaccagcctggccaacatggtgaaaccccgtctctactaaaaatacaaaaaaattagccgggcatggtggcgggcacctgtaatcccaactacttgggaggctgaggcaggagaatcacttgaacctgggaggcgaaggttgcagtgagccgagatcatgccattgcactcaagccttggtgacaaaagtgagactccatcycaaaaaaataaaaaaaataaaaaataaaataatcagcttttctttttaatgtgacratagtattaaatgatgtcagtaacgccatgtaggtatacatagttgggacatagacctggttgacactcctctagtcaagataagcagtcagcattcatccgactcttccaaaaaaggagaagtaaaggacatgacatgtagccagtctgtgtttacagctgctgaggcatgctaagcttctttataatatgaattcagaaaaagaaacatggtttggttgccaatgagattttgattgtctgatgccctaaggggaatcacattctcaaaagactttctgcaccgtgtcttcctgtaagtttgtcttctggaggcattttacagatttatgcacttaagtataaaagcttatatagtcataaaaatgataatgccacaaagggatgataattacgagttgttacatatatatctctttaccttgagatgattagcaaatattactttgtgataattgtccttataaattacagatgtgttataacaatctattctatttgaacacataacattagtaatatttgcaccaaatttttcacattcctttatgcagcaacaaaatattttgcattgttatgataatgttgtaacttgttttctagtaacagttttaaagactattttgtagatatataaatagcagaagtacttagaggaaaaaaacattttttattttattaactggcttatatatatgcaacatacaaaagagagttgaggctacttaaaatagaagttcagagataataagagacccagacaaacaagacaaggtgaaagcagataccaggaaataatggagaaagggtggagaaaactagaccaggctttaccatctactctgttaaaaaagcaagcttagcatgagatagaatgtttgccaatatagaatttttaatcataagcatttatacaacatgtgaatctgaaaaaaactagtttccccattgattaaatttgcagtgttcctaagtattctgagaatgtaatttagaaaatcacctataaggaattctcatggtgaaataatatagtgtaactttccacttgattaagtgttacaggtgatatgacctggaatcagatgagaccctgagtgagatgaggcggcttttwttctgtgtcgttgactttcttgatgtgatttcagtgatcagaacacatctgctgtgtgaaacattttaaaaaatatattacagtattgttctkacgtatattgctaagaaaataaagactaacatgattgtcttgtttatttctcatagaaccagtttttcataagctgtgctgatgacaaagttgtgttcaacaagataggcgatgccattgcccagaggatcctgaaagctcacaggtaacagcctttggctgagagttctcgctgcagatgttcttgtatttattactaaaatgactttgcaaarcccatttttaaagtactgtcatttcctagcagcttaaatttggttcagccagcaataggttattgatgcctttagtctgagtcagttgctaaagatttttgactgccctttctagggaatttgaattcttccaaggcacaaaaatttcttcctggccagtctgtttcccacacatgaggtttgtgatttgttttatttaatagcagactatgagctgtgttcgcttaaaaaagcaaaacagacataatattttgctatgggttatatttaaattcttgttaccgtatgtcatatttattcagctcatgggattttttttttaataattggtttgctgagatagaatttacatactgtataatccagccacttaaactatacaattcagtgatttttagtgtattcacagagttgcacaaccaccacctaatcaattttagaacattttcatccactcagaaagaaaccccattagcagtcattacccattccttctatttttagcctctggctaccactgatttttctttttctatagatttgcctaatctgggcattttgtataaatggagtcacacaatatggggtcttttatgactgatttgtcttagcataatgttcttgaagcttatctattattatagcatgtatcagtatttcatttctttttattgccagataatattccatgatgtggatataccacattgtatttatccattcattagttgatggacatttgggttgtttctactttttgcctattataaataatgctgctataaacatcctttactagtttttgtgcagatatatattttcatttctctaggggtagaattgtcaggttatagctaactctatgtttaacattttgaggaactgccagactgtcttccaaagcggctctgccattttatattcccatagtatatgagaggtccagtttctctgtatttgccaatacttattattatctctctctttgattatagtcattctagtaggtgtgaaataccatttaagaaatggtatttcattgtgattttcatttgaatttctctaatgactaatgatactgagcatctttgtgtgtgcttattggccatttgtgtattatctatggagaaatgtctactgaaatcccttgcccatttgttcactggggtatttgactttttatttttgagttgtaagaattctttatacattctagatacaagtctcatatcagatatatgattcctagtttctcccattcgatggcttgtctttttactttcttgctggtgtcatttgaaacagaaattttttttattttgataaaagctaacttatctatttttttccttgtatcgcttgtccttttggtatctaaggaatatagatagtgatatctaagaaatcactgcctgatctaggatcatgaagatttatgcctgttttctcctgggaattttatagtgttagctcctacatttagatatttgactcattttgttactttttatatatggggtgagttaggggcccaactttttattcttttgttgatggatatagagttgccctagcaccatttgttaaaaagactattctttccacattgaattgtcttggcaccagggacaatttcttcttatggctgatttcagctccatttaaaagtagcagaacaaacacataagcaaaaccattatatttcattactttaagtcattgaatgcacgcagtgaagaataagtgcatatgcatttgggaattaaaacrytttttacttccagtgtcatgtggtactttgatatcttttttcacataatatttggggacttttatacttaaggacatattataacagtaactatcagcattttatgtgattcacagtttataactacattatctcactgaatcttcacaactacacttgagagtaggtcatgtatttgttgttgttattgttgttattattgctgttgttgctgttcccatttttaggattaaaaactgagattcaagaggttatgtgacttgtctaggccactaaccacaataggcaaaaaacagctttgagcctaaatctttggactttcaacccaatgcttcccctcacaccacatgactctagtgcattgatggttaggattaaaaacccattcagggcttccccaagctgaggcaaatgtgttgggcctgtagttcccttcccctattgaccagccattggatgcaggctgaccctagggagtggggatgaccttgagtgaggcaagtccctttcacctatggaggactccatacttttcatacctggaggacttcactgtgagtattccgtggcctacatgctcagtagctgatgggatggatgtcttgatcccatggtgaggggatctaggcagcacactacagcatccatcatatcctgcagtgtgtacagtggatctcacctgtgactacacatcaaaatcaccactgacttttgcaagattacagagagcttgactcacctccaggcttactggatcataatttcctggatcggggcctggccccggtattttatactgttccaaagatgtgtttttaagtgtttggaagcctgaaagaatatttttctttactgtagtaatttgtctttaaaaatctggacttctaaaataataaaattaggctgggcatggtggctcacgcctgtaatcccagcactttgggaggctgaggcgggtggatcacctgaggtcaggagtttgagaccagtctgaccagtgtggtgaaactctgtctctactaatagtacaaaaattagctgggcttggtggtgcatgactgtagtcccagctgttcaggtggctgcggtaggagaactgcttgaacccaggaggtggagattgcagtgagcygagatcatgccattgcactccagcctgggtgacagaccaagactctgtctcaaaataaataaataaataaataaataaataaaattatagtattttagggctacaagaaacttcaagatattttctgatagaacatttcctagtgatcttatgagctgctcctgaaaggaaaagggatctgtgactttaaaaattatggtaaagtagcacctgttgcagattgtatcttacacttggagtttgacagagcacattaaagactggcaatttcaagtttgctttgtgaaaaatgggaaattagttcatcaaatttcaaataaacctgtgtcatttagctctgatctctcaatagtctcatttttttgacagacacattttcaaaatggtacatatgtcacacatttagactttcagtggatacacacacacattctcaaaacatattttatgttcccctcacccctggcgtctctgcattcttgttaatctccctatgttaattgcaactgtaaaatatattttcacttaatttcaaatctgtgagcttgtgttctgtgagcttgtgttaggcaaggtaaaggcagaattaaaaagcttatcttgggcaggtgtggtggctcacacctgtaatcccagcactttgggaggcggaggcgggaggatttctaaaggctagaaatttgagaccacctgtctttacaaaaaaataaaaaattatccagatgttttggtgtgcctgtagttctagctacttggaggctgaggcaagaggattccttaagcctgagagtatgaggctgcagtgaactataatctcaccactacactccagcttaggagatagaatgaggcctcatctctaaaaaaataaataaataaaaaatgaaagaaacaacatattttgcaggttgccaccctggggtgaccccttttcactaattaggtgccatgatgtgccatcccaaacttacccctctctctccatagacttctctggtctctacttttctgagactcagaacttccctgccaaagtcacattcttagcaacaagtataattttggctatttgaaaaagaatagaatgcagcccaaagcagatggagggaaatgacagtccgcagtcagccaggcctcaccaaagaatacaggccctctgccaggtccctcctaccctggagaaatctgagtcttcaaattgccaactccctggactggtctaagtatttttctgccagcgttggaatccagcctcacaacaattcccctaagcaatttctcagttcctctcacttcctctggttccttctcaacagccataattctttatagaaataagttttgcaaagccttcatgttctgacatgacctagagcctcagactcatgtttaccccatgctgacctcagaacagccgggggaatcagaataaaaaaaaaacaaaaaacaaatcttcactctaataagtaaaactgtctcagagttgaagccagctgcccaacccacttgaaacctttctttgacagctcaaatgtgattggcgatcagagagaaaaaaaatcataatccacagtctaaaatttactgttttatgccatgtttgactaagccaaaagataggaccaactgatccaggtagacacatttttaaacactgtgtgccatgaatgaatggtttctgaggagattctcagatctttgcacatggaaacttgacatgcataatttttctgctttggtagaaagtcaggaagtgagaaagtgcattttatagtgttagcaacaaacagttgacacacacaatgaaaatagtcagttgacttaatgcttctatgttttaatattaaactgcattaaaaatatgctattaaactacattaaaacaacaattttgaacattgttcaaacttaccatgttcttttttttttttttttttttgagacagtcttgctctgtcacccaagctgaagtgcagtggtgtgatcttggcttactgcaacctccatctcccgggttcaagcaattctcctgcctcagcctcccgagtatctgggattacaggcacccgccaccacactcagctaatttttttgtatttttggtggagacggggtttcaccatgtcggccaggctagctttgaactcctaacctcaagtgatccgcccacctcggcctcccaaagtgcccctcatgcttcttataactgtagaagagctactgcttgcctgtaagtgggtggtatgggaaataccacactgggaaatctgaaattattgggggaccagatgtctggagacctggattctctccagctctgttatccacaggtatgtgaccttctgagtaygtcagtttgtccttctgacacgctgtttcttcaccaaccacgaataatattatctgttctacgtagcttatatgaatatatgtgaaagtagtttgtaagctgtaaagcaccagttcatgtaagaacttattatagcatttccatgatattcatcatctggaaatatgttgttcmctgtaaattsaagcaaggataaagaggcatcatattcaaatcagctgtttcaaaattagtatttatgctagaaaaagaaatgttttaatttaaaagatgcttaaatgttccgtattttaaattattggacggctacttctggataagaaaaatttgttttggtttctcacgactggctgttgttcatcatgtgacttgtttaggcacacgattacaacactctgtctagaggtttgctgccagaaacctatagctgactcttcctgggaatcaatttttgatttccctgttattgatctgataacactctccccaaaatataaagtaaaacaaaatgtattctgaagcataatatgtgtttagtttagtattgttttaattttagatgctatttactttgttgttatttgaagatatgcaagccttctaattgaaatcagcaattgatataattgaataaaaatgttaccaaatagtttctgagtctttccacataatcagtgctatacctgtgttacctcattcagtctttgtatcaactttatgggattggttgtgtaattactcccattctacagatgaggcagctgaggcctagtgaaattagataacttagccaagtcatacagctatggttggataggagtaggactcaaaccatgtctgtaggacctcaacttgtgctttttaccagtaagctacaaagcttcccccatttcaagggatgtagaaattttcgaatggtaagcctcccagaaatctatgaaaaatactttattttgaaatataaaaaattgaatgagctgggcactgtggcttatgcctttgattctagcactttgggaggccgaggcaggaagatcacttgagttcaggagttcaagaccagtctgtgcaacatagtgagacctagtctctacaaaaaaaaaaaaaaaaaaaaaaaaaaaaatagctgagtgtgctggtacatgcctgtggtcccagccatccgggaagctgaggtgggaggatctcttagcctgggaggtgaaggctgcagtgcgccatgattgcaccactgcactccagcctgggtaacagagcaagaccctgtcacaaaaagaaaaaaaaaatcagatgaatgttttattttttaaaagcaatgtttgatagattaaaagttcttgggtttaaagaaaaatctatgtccataattaccatatcctataattttgtaccaaactgaaaagacatgttgggcttgtttcagaagccttgtcttaaagaaaattcaactgcagtacctttttttttttttttttttgagaaggagtctcactctgtcgccgaggctggagtgcagtggcgcgatcttggctcactgcaaactccacctcctgggttcacgccattctcctgcctcagcctcccgagtagctgggactacaggtgcctgccaccacgcctggctatttttttgtatttttagtagagacggggtttcactgtgttatccaggatggtctcgatctgctgacctcgtggtccgcccgccttggcctgccaaagtgctgggattacaggcatgagccaccrcgcctggccaaaacacattttatctaagtatgccaatcattggtttcacattttttcttgtgggataactcccaagctctgtacgatttctggagaagaggttaccttgggacacagatgacaacagatcgtggcaggagaccttttgatttagrtcatgtaaatgcttttattctattctaaaaattgtataaaatggtaacctcagcagatagagaaatgtaaagattagcacagggcaggggccagcactcattttgagcctgagcatgtgccctggaaaagagaggaaggaagaaggagacttaaaaatgacaatgaaaaccgtctgggccatagtgggaacagtttagtataaggttctatataacctcatttgggggccactcagggctaggcttgccaaagactatcaagcccagggtgaagtctaagtcaaacatgctggggaatccctcagcattcttatgtttgaaagcttgccattttcaaaagataaccaatgagaaaactgatgtgtgtttgtgcacaatatataatagttcataatctatgaagtcacatagaggataggtaaagtcagtgctaaatagggccagcatttctagtggactagtcatgattttagccagttctttcatgtgcagatgaggaaactgaagcccagaaggatcttctccttttaaaggatttgccaagcacaaaataaaaggggttatgtcccaaacgaccaagaagctacagatccaattccaacataattgataccaccatagtataaaattctctttacacacacacacacacacacacacaccctaagccctaaccacaattcttcctatttctgacagtattcactgctgcaaaatctacaacgagacgatttatagcagctcttgaagtttacagtaatgaaatacaaactataaatctcaaattctcaaaaaaataaagtgtcttgtcactagcgaagcatatcaagcttcctcggggccttcttgccagaccctgagacccagttgtgagcagatcaagcttctcctaactgtccttcatgctgaggagggactgtgggtgaaggaggaggggcttatgcagcagagaaaaacaagaaaaggaaagtagaggtacatcactgctgtgacccatctacatggtacattcgtactctgcttttaaaggtacaaacagctttatagcaatcacaaaaattttaaaattaatttttttttttttgagacggattctcgctctgtcgcccgggctgctggagtgcagtgccgcgattttggctcactgccaagctccgcctcccgggttcacgccattctcctgcctcagcctcccgagtagctgggactacaggcgcccgccaccacgcctggctaatacacacacactactattttctgttgaattgtaatttattttcttttcctagagttcatctgaatttctagctcaagcgcatttccacacaataggaggggttttagttttagttttggcacttcctgataaatgtggccaaattcagtgatttctcattatttcccttctatattcagcatcagggttctactcctgcctcctctccctccacatcccgtccttgatcttaatgctatggggccctggatctttggaaaggggcttccagacactgatgttgatctccctccggcctgttctggcatctgcttaacgtagcttggggacgtcagccttcacctttcaggcctgcctctctaccacttctcctctgctcctgccacatcgcatagctgctgaacgacatgctccacatttctctggagttcacctgaaagcaaggcacagatcctcctggytctcatatcctcacattgaaaagagagtggggtctatcctgtttttccccgaactcagcttgaggccaaaggactgattccttgccctgagtcttgctcttatttctctacactcctgcctcagcttagagaatctctccagttccccaaatctaaaagaagttgatgtttttgtgtcctgcttcccttgtgagagtgccaccccgggagcaatgcctgcttcgtttctccggtcacagagtgggggaagttaacacatttaaagggaaaaatgatttaatgttttatagcattggcctgccacatttttattctcttataacattgcattggggccattttaacacagtaccagaagtattgtgctactgagccttcatagcggtcatttttagtggctacaaggtgatcattccattgactggctcaacataatttaaccattcctttattattggacatttatttccaatttttagctattatacgtagcactgccataagagttagtgaattttgaagaaaaacttttaacaagaagcctgagaatgctgtttggtagaaattgctttgaactaatgtggatgaagtgattgctggcatgatgggtagttatccggggcttagtgcccactagccccaaaagcaagattgcttttaagatcataaatattttatacactaggggctcagattcttaccctaagctgaatgctatcatttccacaacccccatgttgtgaggattcagtatttccgaaggacgttggattcctcagcagctggaactcttgtcctctgtggattggatcaaggaggcagattggacacagtgtcccatggaatcttctgtgctttggcttacattcaaccacaattttgcgtttgaaattccagagcccttttttctacagcagtgaaaatctaaatagtttccactagtttgctgaacgcagtttaaaattttcatcattcaggaaatttatgagctaccatattgtaaaatagcaaagggcttgttatggagctaagagagtcctaaaaacaagaaaatgtgaatattctgattcctacaaactaaaatttgcaagaatgttttataatatttttataggacatttctcaatatcatacatatgagatctcccttgtaaaatcatttttgcttaaaaaaaaagataaaatagaactgtctcttacaaacatcatcacaaacatttgtgtcaaagaccagcaataccacttgtaagatttttccaacaaatgtgaaaaattacttttgttagtcagcgtaaatatcaaaatagttactttgaaatagaaaaaaaattagaagcaatttaaatgcctatcagtaaagaactggtttaaatattaaagtatagatgcatggtagaatattacctccctgttcttaaaaagtaactatgttctggccaggtgcggtggctcacgcctgtaataccagcactttgggaggccgaggcgggtggatcacgaggtcaggatatcgagaccatcctggctaacacggtgaaaccccgtctctgctaaaaatacaaaaaattagccgggcgtggtggcagacgattgtagcgccagctactcgggaagctgaggcaggagaatggcatgaacctgggaggtggagcttgcagtgagccgagatcgcaccacggcactccagcctaggcgacagagcgagactgggtctcaaaaaaaaaaaaaaagtaactatgttcttatgtggaaggatttccaagataccctgttaaatgataaaaatcatgttcagaaaagtgtttatagtattctaatatttgtgtagaaggaaaaaatacatatattcttataaattcttacactatttctaaaagaacatggaggaaactgttaacaggagttgccctcaggatgaaggagtgagagagattttttttcactgtataatcatctacctcttacattttgtactatgagcatatgttactcatttgaaagtaacctgtttggtagttcctcaaaatgctaaacatagaatgaccacatgacccagcagttccattcctgaatataaaccccaaagaactgaaaacagggactcacagatactgtatgctagtattatagcagtattattcacaatagccaaaaggtggaaacaacataagtgtccattaacagatgaatgtgatatgtacataccatggaatattattcagtcttaaaaaggagggaattctgacgcatgctacaacatgggtgaaccttgaagatgttatgctaagcgaaacaagtcagacataaaggacaagtattgtatgattctaattatatgcaaaatccagaaccagcagattcatagagacaagcagattagaggtttccaaggggtgcaggcagggaaaaacagggtagttatgactggatagtcaccgagtttctgtctgggatgttgaaaaggtttgggaatagatcattatgatagttgtacaacattgtatatgtaattgatgccactgaactgtacacttaaaaatgggggctgggcgcggtggctcactcctgtaagcccagcactttgggaggccgaggcggatcacctgaggtcaggagttcgagaccagcctgaccaacatggagaaaccccgtctctactaaaagtacaaaattacctgggcgtggtggtgcacacctgtaatcccagctactcaagaggctgaggcaggagaattgcttgaacctgggaggcggaggttgcagtgagccgagatcgcaccattgcactccagcctgggcaacaagagcgaaactctatctcaaaataaaaaaaaaagggtaaaatggcaaattttatattacatgtattttaccacaataaaatgtaatttaatttaaagacataaaatataattttatttaaagaaaaaaatgtatgtaatatattatatacactttacaaacaaaatgtaatttaatttaaaggaaaaaattcctgttcagcttaacctcttctctaccagaaacttccccagaaacatttttccaacctgatcccatcctcctaaagcaaataataccgagtgcatagcatgtgcaagggtctttgattgggtactaccaaaaccagaaagatatgtgggcaggcatcctgtgtttcaaaggagcttatcacatagcctagagagcagatgtgtgtatcactatcgtgtaaagcagaaagagtgcagaacagacatcctggccatgtgctatgagtgccgaggcaagaataaaacaactctgactggaagagccaagtggcttggcagaggaaatagccaataaggtgacctagaagaagtgggattcactggaggcccagaaggctgatgagccaagctttattagtaggaaggtgtacctctgaacaaagggtggtagtctcctgtcactgggctgtggtgatgggaggattatactgtaaggcagtataatcctgaattctgaaaaggcagttgaggccaaatgacatccatttttaactgtccagtttaattttttgacttttaaatgttggctgtggggaaatagcttaatagcttaggttttcttttctttttttttttttttgtctgttctttttcgctatcctgctcaccatttagggatgtgagccttttattcttaccaagcagcaaacttgaacagtttacattttttaatgtcttctttccaactcaaactatgtttgccatctagtgaataatccatgccattacaacaacctactyaagatccttgtttcttagcatggcagccaaactcacaggcctccaaatttcattgttggtagtcatttctgccctgaacttctctttccacttgccctgacatcgactttagagacatcagtaataaaatctgatcccccaaagagtactgataatattcacatgaaagaaaaatttagttgtttagaagaaaatgcactttagaaatgagaagtttaagtaggatcggacttgaaaattaaccaatgacaacacctttgtgtgaatatagtcctcccggatatcccagcgagattcattgatcacagtgtatgtcacattcctttcgaggctttttcttctccctgtatatcctataaatagagacaagaacgttaatagcttttgattctgaataaatggtacctatttggagcatacttcaaatttctgattttytgaatgcccgtcaaagagagaaagctacactttcttcttctattgttatatcattgagtagaattcattttctttcaaaggttgtcattaatcacttgagagaatgggacatgaaatattgtgttgtatgtgcaggggacttaaatatacatactggccactcagaawtctttttttttttttttttttttttgagatggagtctcgctctgtcacccaggctggagtgcagtagcgcgatctctgctgactgcaagctccgccacccgggttcacgccattctcctgcctcagcctcccgagtagctgggactacaggcgcccgccaccacgcccggctaattttttgtatatttagtagagacggggtttcaccgtgttagccaggatggtctcaatttcttgacctcgtggtccacctgccacggactcccaaagtgctgggattacagacatgagccaccacgcccggccggccactcagaattcttaaagggcctagggtaacattttacagctgaaaactcagagtttctaagtagataatgatgacttctgttttggaaaatgtaatgggtccagtgtgtctttttgcccctgcgatctaggctatgagaactgatttactcaacaattattaactgaatgtctactatttccacggctctagctaggtactgtgttaactattaagttctttttccaaaactttgttatagcctcccctacccgcctctttccatgggatccaagcaaggatttcttacactgcattttgtcctacaagcgattatgctgtagagagacaatgggtacaatttctactttactgccaagtttagcttgttattcaggctatgaagcgatagcctggatgacagcttctgtcytccagtccaacagcacaccctcccaagtcctgaaatgtgacagaaygtgttgtaggaagccattcactcaatctcaaaaaccatgtgaactgcttggctgtcatctaaaattgatactaccttttattttttgggtgaatttctctgcatctgacctttgcagggaaaaccagaaataccgggtatatgtcrtgataccacttctgccagggttcgaaggagacatttcaaccggcggaggaaatgctctacaggcaatcatgcacttcaactacaggtgccaaaactctaaatggtctattttgagctttyggtcatgcatcatgtaagctgatgaagggaatggcagtgtttctccacatccattcggtggagtggggaacaaatgaacactttattttactttcaaatcttggcccgtttgctagttgataaaattcaaatggagcctacaatgataaatgattggcctaagacacatggcaaacataaaagaactaaaatattagtccttcttgtatagttactgtctatttctatatatgtataatgttgattaaaacttatctttaagtgggtaaatagctattgagctttacatgtactttgcagtaaatagagaaaaaattaaatgcctgaaatggtaagatttgcttgtgtttggttatgattctttaggtagcaagtccttcaacaaggttgataatgatagcctctgttagtaaataaattcccggaattttgttttctctaccacatctttgttaaaattttagggaaagttttgtgcttgatatttttaaaagctgagtttttatatttatttaaaagggcacacttgggttcctcttgaggcttcagatttggccagtggagcattgtgaaaagggctggaaagtgctagctggtgggttgggggagcacaggctagaaagcctgcatagatggggatggaaatgcacctctgaccttctctcagggtcacttaaccaaaatctcttatttttctgaaccacctgtagtttctcacctttctaatcaaacccttctgaaaggtgggagaggacgaatgatactttacatagaacctttggtaagtaaagcagattaggggtcagggccttggtcaaatcgggggtggagacttagatgccctcctgcttgggccccctcgccagatgctcctgctggaggatctgtgcacagttcgagtgcaccattgtagtggaaatttttttttaatcctcttttttcttactgatgtttcaagcttgtatctgtttatctgccaggatttcaaggaaagatttttgtttgtttgtttcctccagggtgcttctgcctagttacagtacaagagagctttaactgtgctttggcctatatacttggactgaagatttgcacatttctaatattatctgatttataaaatgataaagcttttcaagtatttaaggctctgacataatgtttaattgaattttatcaatttcattcgccattctaatattatttttgtaatattgttaattgtaattgttttctatgactattttcttgccttcgaaccagctgaatgaaataacacatttggcttttgttcagaaacaaaaactataaccttttattatgcaaaaacatctctatttgctggcatcatctttaataatagcatttctcaggcataagtatactctttattactctcatagagcaagcagatgaagcatagaatttttggttttgtcagattttataattcatcagtgattatcagagtcttaagaaacaaaatcattagcagagtcctttatttgagactatatttttcgtttttagtggttttgctgaatttaaagacagtccattctaatagtttaatttgtaaattattctgctaagtgcttgcccttttcacctctgagagcaatgtgattctctaagtattcttatctactgatgcattctaaatttatctttgctgttacccagttttgtaagagggaaagttcattcatgacccttctttttttaatagcctctctttctgaaatctaacacgaattttataacttttccatttacctacctcaaaacaactatcatgtccctattagtagcattacaaaagtgatattcatgtaactgtttttagcatttagatatatatgtagcatcttctcatagaagcacttgttctgtttttacttgtgttaggattaaacctacagatactgcatgggattggttgttttgaaacctctgtaattattttctcctttacatattttcagaaccatgtgcagaggagaaaattccatccttggacagttaaaagcagagcgtaagtaactgctttttttctcatatcattgttttttattatgaaggtgaggtatcagtaatcattaatgttttcacagtgtgattatagaactctgtttataaaaggtaccccacaaaatgttcacctgtaataaagtatttattctcattaagttgcccaaaccattattcaaatgaagacaccaagactaaataggtaataaaaaccgagcatctttgtaatttctatttatttttatttatatatagttgttttaataataacaatcatctttatgaggtattatagttgtttgttcttctttatctactggatacaattttttatacttttcaaagacactttcgcagacgtcttttttttttttttttttttttttgagactgggtttcattcttgttgcccaggctggagtgcaatggtgtggtcccagctcactgcaacctccgcctcctgggttcaagcagttcttttgcctcagcctcccgagtagctgggattacaggtgtgcgccaccatgcccaactaatttttttgtatttttagtagagacgaggtttcaccgtgttggccaggcctgtctagaactcctgacctcaggtgatccacccgccacagcctcccaaagtgctgggattacaagtgtgagccaccatgtgcagcctcagatgtgttcttaattgattcttctacctagttcttggctacaatatattgtaactaggggtttacctatctatagctccctgaactatgggttcagcatatagtgggcactcaatattgctctatatctctgtgctctatatctttgctctatatctttgtgtatcattacaaactaagctggaatcagaacccaagttgtatgacttctagttcaagttgggtccagattgtgaaaacgtggacagccacactaagaaggctaggttttatccagaaggcaagaagaggttggtggaaaccctctgagcccctggagcaaattcatcaaactgacgtttatatgaagattcatttactgttggtaaacagggtagagatggtggcaagcaagagacaaaggtgcactggtaatggaaaaggaggatcatgtgtgggtaagattatgagggatgacttgaggggatgtggaagcaggagaggaagggaagtgtcagctaattctgagtttcaatccaatggaccaagagaatggagctgctgcaggaggtctggaaaaggcagaaggactcatcctaatcatgtgaaggtcatgatatgaccttcagatagaatataaacctgaattgagtattttgaaggaagtttttattttatactggtagcctcccaaatggggtgcactggatgatgtactggaatgtgggtagaaaataatagactttccaagtctgtatatttttagcttaaaagtaagaaattaggacatcagcaggaatggcagaggaaggatctccaaaaatatagtcctacataaaagcaacaaaaatactgacaaaagttgtcacaatcaacttctttggatggggaaattaactaaaggcttgtaacaatccaaggagtgtttaatcaagaaaaacagctgaatcttggtaagaatagcaagctttgtggcattttaacttgccatatacccatctccctcttctcagctccatgataatcttaaaagccaacagctgctcaaatcagggtgaaaaccagcagcctagcagccattggagggagcagatcagggttaaggctcccatgtcccacagttctcacattgtcattatttgacctgtctggcacttccctttaaactcccattctaagtacttatatttatttcacctgactcagaccttgctcagtgcaagtagactttttaaaaaacctggtatttatcaaaaacaatcagcaacatttatttagcatcacagctgactgaagaggcagtaacagttgagtgagcaagaagctgactaaaaatcttaagaggataagctgaggaaggagatcccctagtgggcactagaaacttccaacatatccctgggaatctgaaaggtcatgggtctgtgtagggctgtgtgcaacggcccagggcaatgcacgtgctcaggaaaggattgagaaggccctaagctctcacctctggctgaccttgaggctctgtggaagcagaaagtgaagcctaaggcagagttataaactgcatgcctgagcatgtaaggcctgtggccctcacacacatacacagagcccctcagtaaagtataagaaactcatttggtacaggcatttaaggaattgtataaagtatgttctctgaccacaatggaatgaaattataaataacaaaaggaaatgttgggaattcacagataggtggaaattatacaatatacttctaaataaccaaagaatcaaagaagatacttcaaaggagagtagaaaatattttgagatgaatgaaaatgaaaacagcatatccaaacttatgagaggcagctatagcaatgcttacagggaaatttataactataaacatttatattatttaatagaaaataagaaatctcaaatcaataacctaaccttacattttaggaaagtagaaaaagaagagaaaactaaacctaaagcaagcagaataaaataaataacagagattggaggggaaataaatgagataatagaaaaaaatagagaaaattagtgaaaccaaaagttagctttttgaaaagatcaacaaagttgacaaactttaggtggactgactaagtaacaaatagagaagattcaaagtaccaaaatcagaaactaagaggggacattactactgactttacggaaataaaatggagtgtagaatactatgaacagttgtatgccaacaaattagcccagatagatggacaaattcctttaaagacattgtattagtcagggttccctcaagaaacagaaccaataggagatatatatatatatakakagagagagagagagagagagagagagaaattatgtaaatataacttctcagcctccataattacctgagccaattcctcataataaatcttttcatatatatgaaagatatatgtatgaatatatgtttatatatttatataatatatattatatgaataggtattatatataatatatattatatgaatatatattatatataatatatattatatagaatatatattatatataatatatattatatgaatatatattatatgaatatatattatatataatatatattatatgaatatatatttatataatatatattatatgaatatatattatttattatgtattaaataaaatatttatctattaaaaatgaatatattatatctaatttatataattttatataatatataaaatataaattaaaaattatatataaatatataatttacatgtatatttatatatccatctatataatatatattcatatatatcttttatttatatgaaaatatttatatatagataatatatgatatatttatatatagataatatatgatatatttatatattacttatatgttatatattataaatatatgtatagatatatattttatgtgctatatataaataatatataaaattgtatattatatattatatatttatatatctatctttcatatatatatatgaaaagatttattatgaggaattgactcaagtaattacggaggctgagaatttccacaatctgcaagctggatacccaggaaagctggctatgtaattcccatccaagtctgaaggcctcagaatcagaggagccaatggtgttaatggtagtaaaagggtaagagcagaccgagattccaacagaagcagaaaagcaagaatcaaaaggcatgaattctttttccatctgtctcttgatctcctctggccctcaatggattagatgatgcccagcaacattggggagggcaatctactttagtgaatccacgaattcaaatgctaatctcatccagaaaacccctcacagacacactcagaaacaatattaaactgggcacctcttggcccagtcagattgatacatacgattaatggtattgtattaaagacacaaactcccaaaactgcttctagaaagagctgaaattctaaatagagcaataacaagtaaagagattaatttagcaatcaataatcttcccacaaagaaaagccctggcccagtggctttgctaattagttctaccatccgcaatagaattaacaccaattcttcacatacttttccccaaaaatagataggagaaaggaatacagttatgtgttgcataatgacatttcagtcaacaacagattgcagcatgatggtggtcccgtaagattataatggagctgaaaaattcctatcaccaaatgatgtcacagtcatacccatggcatggtacaattattttatttttaaataaatttaaaaatttaatgtagcctaagtgcgcagtgtttataaagtccacagtagtgtacagtaatagtttagaccttcacatttattcaccactcacacccagagcaacttcattcatggtaagtgctctatgtaagtgtatctttttttttttttttttttttttgagacggagtctcgctctgtcgcccaggctggagtgcagtggcgcaatcttggctcactgcaagctccgcctcccaggttcatgccattctcctgcctcagcctcccgagtagctgggactgcaggcgcccatcgccgcacctggctaatttttttttgtatttttttagtggagatggggtttcactgtgttagtcaggatggtctctatctcctgacctcgtgatccacccacctcggcctcccaaagtgctgggattacaggcgtgagccaccgtgcccagctggttaagtgtatcatttttgatctcttataccatgtttttaccatgctttttctatgcttagattcacaaatacttgccattaagttacacttgcctacagtattcagtatagtatcatgctgtacaggtttgtagcctaggagcaataatctataccatatagcctgggtatgtagtagactatatgatttgtgtagtaggtttgtgtaattacactttatgatgttcaaacaatgacaaaatcacccaatgacacatttctctcacattctcattaagcaatgtattactatacttcccaacacattctaagagtccagtattatcctgataccaataccaaggtcattataagaaaagaaaaggaccaggcatggtggctcacacctgtaattccagcactttgggaggctgaggcaggtggatcacgaggtcaagagatcgagaccatcctggccaacatggtgaaaccccatctctactaaaaatgcaaaaattagctgggcgtggtggcatgcacctgtagtcccagctactcgggaggctgaggcacgagaatcgcttgaacccgggaggctgaggttgcagtgagccaagattgcaccactgcactccagcctggtgacagagtgagactccgtctcaaaagaaaagaaaagaaagccacagatcaatcagatcaatattccttgtgaatgtaccacagaattcctcagtgaaatactactaaactgaatccaacaatataaaaaggattatacatcatgaccaaatgggatttttcccaggaatgcatggttggttttaacatctgaaaatcagtcagtgtaatgcatcatgttaatagaacaaaggacaaaaaccacacataatcatctcattgacacagaaaaattatttggcaaaatcccaaacactttcataattaaaacaaaacaaaaaaacctcaacaaacttggaatacacaggaacttcctcagccatgtaaatggtatgtgtagatgtcacatataagctgacatcatacttaatggtgaaagactgaaagctttcccctctatgatcagtgatgagatgagaaagttcacttttgtcaacatcgtactggaggttttagccacaacagttgagcaagaaaaatatacattttttaaagggaaaggaacaggaagagtaaaactacctctttttatagatgacatgatcttgtatgcaggaaattctaagaaattcacacatactattacagataataaattagtctagcagtgtttcaagatacaagatgagtatacaaaaatcaattcacttttatactctagcaatgagtaaactgaaaatgaaattaagaaaacaattcgatttaaaatagcatcaaaagaattaaatatttaggaataaatttaataaaggtagtggaagatacctacgctgaaaataataaaaccttgaaagagattaaggaagatataaataaataaatactctgtgttaatggattgaaagacttagcattgttaagatggcagtactctccaaatttacctatacattcaacacaatccctaccaaaaccccaactacctttttgaaaaaattgacaagctaatctgaaagttcatgtgaaatttcaaggcatttagcattgccaaaacaatcttgaataagaacaaattggaggtgtcacatacgtgatttcaaaacttgcagtaaacccacaataatagtgtgctactgacataaagttagacttacaggtcaaytgaataragtcgagaatytaaaaataattyttatgattatggtcaattaaatttcagcaaggkggtgccaaaacaattcaatggagaaagaatagtcttttcagcaaatggtgctagaaaaactagatatccmcttgcaaaaaaaaaaaaaaaaaaaaaaaaaaaaaaaaaagaagttgaacccctacctcataccatatacaaaaattcactcaatatggatcaaaggcctaaatgtaaaaactaaaactatacatttcccggaagaaaataataggcataaatcattgtgacaatggcttcttggattttacaccaaaagcacaagcaaacatataaaaatagataatttagatttcatcaaacatgaaagcttgaaagcctttgtgctccaatgaacattatcaaggaagtgaaaacaccccacagaatgagagaaaaccatttgcaaatcatatgtataaggtactagtgtacagaatatgtaaagaattcctacaattcagtaataaaaataaaaataactcaaaaaataaaaaatgggcaaagcagctaaacaggtatttttctaaagaagatattcaactggatgataagtacataaaagaaaactcaatatcactagtcactagaaattcaactcaaacccacaatacaacctcacagcttcacattcactaggatggccataataataataataataataaagtattggcaaggatgtgtaaatagtggaaccctaacacattactgttgggaatgaaaaatggtactgcttctttggaaagccagtttggcatttctgcaaaagttaaatatagttagcctataacccagcagttctactccttaacatttacccaaatattaaaaacaaatgtccacacaaaaatctgtacatgaatgtttatagcagcattattcagaatagccaaaaagtggaaacaacccaatgtccattaactgatgaatgtataaacaaaatggggtgtatccatacagtggagtattatttagatgtaaaaaggcatgaactgacatatactacatcacagatgaacctcgaagaccttacactaagtgaaagaagccaggcacaaaaggccacatattgtctggtttcatttttataaaatgtcttcaataggcaaatccatagagccagttggtagaataatagggtgtagaggagagtggaatggggtgtaactgttaatgagtgtggggtttttttgggggagtgataaaaatgtcttaaaattaggtggtggtgatggttgtacggccttgtgaatgtactacttataaaacatactgatttgtacactttaaagacgagaattttgtagtataaaatttataaattgtaagaatttttaaatgatttggaaactttaaatacaaatttaaaatattgacaagttaaaatagtgacaagtttttagtacatgtatataatttcaaaataggcatatgtacatatattggtgttgtgtgttcagtaatttttcactgatggtctgctcaacctacaaaacttttgtaagcaactttagacaaaagatatgtacatcaccaataatgaatacttccaaaagttgcatctcattgtatctaggacagagatttgccagagtattatctctgtctctattttctaatggcctaaaatgaagatgatagtgaattagtaaatttataaaagatatatcgataaaataaaatcgggaaaatcattcagcgctggcagtggcttgtaaaaatgcgcaggtgaggatatagggcaaaacagcttattattgagtttctcaacagtaaaaatgtcctgagcttattataaagtatttcctttggctctggacccttttcttgcctttgcctattcaagggtgcaaattggtttttaacacaagaattaatttcratgctaagcctgtttatgaaaagatttccaagtaccttgggaacagtcaaaataaggcatctcagtggggaaaatgttcatatgctagacagagagcaaagattaattacataatgcctgtttctaaagtacaaggttgtattgttggctttgtttttgtatatgtagtggttttaaatacatgaactagctaatctctaattggatagagaaatatagttctctactgttttaattatttagaataacaaaactgctgctatgaatatgttaaaattcctgaaaagaaaaccagcagctattagtatataattatctgatataccagtcttcagagatttaatgtttaatttaaagcatttctttgttgtttttataatttttgttaattttggtattttagcagccaatttagtataatttaagataagggccagaagttttcaatcaggattagatacgtacatatactaagtgctacaaggaacgaaagcctgtaacaattcttgatgtcctttcacgaaatttccttataaatattgagtctattgtattgaatttctcttctttttttaattatactttaagttctggggtacatgtgcagaacgtgcagttttgttacataggtatacacatgccatggtggtttgctgcacccatcaacccatcacttacattagagatttttcctaatgctatccctcccctagcctcccatccccgcaacaggccccggtgtgtgatgcacacaccaatgttcacaacaggtatgtcctgggatctgaataaatctccaggttctcagatacctccatggcattatgtaatttgggactctttcttatacttgttcatctatttcttcacattaatgcttatgtatgctcctggcttgctcatattttcttcaaaaagcatatgtttctctagtatatcctcataacataaattaacatcaccaacctttgtacctattacatgtcaaggcagtttttttcacagaataaagtactggctgaaatattttctctatttgttttttcttctttccgtatagagttcatggtgaatttattcacatcataaatgggtgtccccatagcatttgacaggccacactcgcatttgtccaaaatgtctactttctggctaggaaccattatctttcttttagatcatgttactggaaccaactgttaggtctcttcccaaggccrtttttcacaaagaaataaagatttaattacttcgtaagagttattgcatagtcaaggatgagtgggaagtaggtatggactgtgggctgacaggatgtcttactaattgatgttttgctgatactctgtaggcctgctttggcatggcacatagatgtgctttagaaaattacgaatatgacatgtcctaaaccttcaagctgctaaaagctagtcagtatcattaatcttaaaaaaattaattttgaaataatctcaaatttatagaacagcttccaggactgccatatatccttcatcctaatttcacagatgttataataattttactttctttgctttatcattctctctcaatagaaagatacattcatatatagatgtagggatttttttttttaccctgagtcattttggaataagttgcagccatgataccaatttccccctaaatatgtatgtggtttctgagaaaacaaggacattctcttaatcaagtatagttcaaatatcaaaataaatgaacattgatataatactattatccagtttatagaccttattgaaatattgccagttgtcttaggaatgtacttcatagcaaaagaggaaaaaaggctttttcctaggctagaattcagctcacaataatttgtgacattgtcacatgtctttattttcctttaatctgaaattatctttcaatcattttgattttggggggtggcagagctttcatgatcttgatgtttttgaatagtacaggccagttgctctatagactgtccctcaatttgggtatgtccattattttctcatgattagatttagcttatgcttttttggagcagtatcacagaagtgaggttgtgttcttacggtaacatagcaggaacaaccttactggttatattaactttgatcacttagtgaaggtggtgtctgccagaattctccactatttttcccttcataattaatagtattttgtaggaaaacactttaggtgtatataagtatcctgcttcttatcaaccattgacctcctggttttagcatgcgttaattattctgtgaatcaattatcatgatagttaccaaatgctgactttgtgattccatcatttttttctatatttattagtttcttttaaattaattagttggaattctactgtaaggaaagttttccctttttccccatttatgtatttatattagtatggacttacagctgcttctcttatttagtgagttaagatcttggagttcagcttgcccagatttggccaatgagggccttttaaaggtggcttgatgatttttggacatgtccccgctaatcatcttcttttactggcacaacaaggtgtcccagactcatatattcccaacactagccctgcaatcagccatttcttcaaggaacctaggttattttagcgaaaaatggtatttataaagcaaaatctgggtgctagatgtgatcattgctactagaatatcactactttgggcctttgtacacacacacaaacctattctctctctttcttgtcatgtggatatctccaattccaatcccacagcataggattccttctagctatccctctttttatgtttatagctcctttctttcacagtgagaaacacggctcccattatccgcagcatatttatgtatatcctcaaccttttaatacacagaaaataggtttgggattgctggcccataccaccatgaaaaatgaatctacttactagagtttaacacttgcttatagtgttttgcctttagcctaagggtatacactcaaatgtctgtaatcaaaagtagtttgattacattgttaacttgatttgcttggattatgttattaacttcattaggtttggttcatttactttggtttatattacatttcagagttttttttaattattcagcctttattttattttatttcattattattatactttaagttttagggtacatgtgcacaatgtgcaggttagttacatatgtatacatgtgccatgctggtgtgctgcacccattaactcgtcatttagcattaggtatatctcccacggctatccctcccccctccccccaccccacaacagtccccagagtgtgatgttccccttcctgtgtccgtgtgttctcattgttcagttcccacctatgagtgagaatatgtggtgtttggttttttgttcttgcgatagtttactgagaatggtgatttccaatttcatccatgtccctacaaaggacatgaactcatcattttttatggctgcatagtattccatggtgtatatgtgccacattttcttaatccagtctatcattgttggacatttgggttggttccaagtctttgctattgtgaatagtgccacaataaacatacgtgtgcatgtgtctttatagcagcatgatttatagtcctttgggtatatacccagtaatgggatggctgggtcaaatggtatttctagttctagatccctgaggaatcgccacactgacttccacaatggttgaactagtttacagtcccaccaacagtgtaaaagtgttcctatttctccacatcctctccagcacctgttgtttcctgactttttaatgattgccattctaagtggtgtgagatggtatctcattgtgtttttgatttgcatttctctgatagccagtgatggtgagcattttttcatgtgttttttggctgcataaatgtcttcttttgagaagtgtctgttcatgtcctttgcccactttttgatggggttgtttgtttttttcttgtaaatttgtttgagttcattgtagattctggatattagccctttgtcagatgagtaggttgcgaaaattttctcccattctgtaggttgcctgttcactctgatggtagtttcttttgctgtgcagaagctctttagtttaattagatccaatttgtcaattttggcttttgttgctattgcttttggtgttttagacatgaagtccttgcccatacctatgtcctgaatggtaatgcctaggttttcttctagggtttttatggttttaggtctaacgtttaagtctttaatccatcttgaattaatttttgtataaggtgtaaagaagggatccagtttcagctttctccatatggctagccagttttcccagcaccatttattgaatagggaatcctttccccattgcttgtttttctcaggtttgtcaaagatcagatagttgtagatatgcggcgttatttctgagggctctgttctgttccattgatctatatctctgttttggtaccagtaccatgctgttttggttactgtagccttgtagtatagtttgaagtcagrtagcatgatgcctccagctttgttcttttggcttaggattgacttggcaatgcgggctcttttttggttccatgtgaactttaaagtagttttttccaattctgtgaagaaagtcattggtagcttgatggggatggcattgaatctataaattaccttgtgcagtatggccattttcatgatattgattcttcctacccatgagcatggaatattcttccatttctttgtatcctcttttatttcmttgagcagtggtttgtagttctccttgaagaggtccttcacgtcccttgtaagttggattcctaggtattttattctctttgaagcaattgtgaatgggagttcactcatgatttgggtttctgtttgtctgttattggtgtataagaatgcttgtgatttttgtacattgattttgtatcctgagactttgctgaagttgcttatcagcttaaggagattttgggctgagacaatggggttttctagatatacaatcatgtcatctgcaaacaggggacaatttgacttcctcttttcctaattgaataccctttatttccttctcctgcctaattgccctggccagaacttccaacactatgttgaataggagtggtgagagagggcatccctgtcttgtgccagttttcaaagggaatgcttccagtttttgcccattcagtatgatattggctgtgggtttgtcatagatagctctttttattttgagatatgtcccatcaatacctaatttattgagagtttttagcaagaagagttgttgaattttgtcaaaggccttttctgcatctattgagataatcacgtggtttttgtctttggttctgtttatatgctggattacatttattgatttgcgtatattgaaccagccttgcatcccagggatgaagcccacttgatcatggtggataagctttttgatgtgctgctggattcggtttgccagtattttattgaggatttttgcatcaatgttcatcaaggatattgttctaaaattctcttttttggttgtgtctctgcccggctttggtatcaggatgatgctggcctcataaaatgagttagggaggattccctctttttctattgattggaatagtttcagaaggaatggtaccagttcctccttatacctctggtagtattcggctgtgaatccatctggtcctggactcttttwggttggtaaactattgattattgccacaatttcagagcctcttattggtctgttcagagattcaacttcttcctggtttagtcttcgaagggtgtatatgttgaggaatttatccatttcttctagattttctagtttatttgcgtagcggtgtttgtagtattctctgatgttagtttgtatttctgtgggatcgatggtgatatcccctttatcattttttattgcgtctatttaattcttctctcttttcttctttattagtcttgctagcggtctatcaattttgttgatcctttcaaaaaaccagctcctggattcattaattttttgaagggttttttgtgtctctatttccttcagttctgctctgattttagttatttcttgccttctgctagcttttgaatgtgtttgctcttgcttttctagttcttttaattgtgatgttagggtatcaattttggatctttcctgctttctcttgtgggcatttagtgctataaatttccctctacacactgctttgaatgtgtcccagagattctggtatgttgtgtctttgttctcattggtttcaaagaacatttttatttctgccttcatttcgttatgtacccagtagtcattcaggagcaggttgttcagtttccatgtagttgagcagttttgagtgagtttcttaatcctgagttctactttgattgcactatggtctgagagatagtttgttataatttcttatcttttacatttgctgaggagagctttacttccaactatgtggtcaattttggaataggtgtggtgtgatgctgaaaaaaaatgtatattctgttgatttggggtggagagttctgtagatgtctattaggtccgcttggtgcagagctgagttcaattcctgggtatccttgttaactttctatctcgttgatctgtctaatgttgacagggggtgttaaagtctcccattattattgtgtgggagtctaagtctctttgcaggtcactcaggacttgctttatgaatctgggtgctcctgtattgggtgcatatatatttaggatagttagctcttcttgttgaattgatccctttaccattatgtaatggccttctttgtctcttttgatctttgttagtttacagtctgttttatcagagactaggattgcaacccctgccttttttttgttttccatttgcttggtagatcttcctgcctccttttattttgagcctatgtgtgtctctgcacgtgagatgggtttcctgaatacagcacactgatgggtcttgactctttatccaatttgccagtctgtgtcttttaattggagcatttagtccatttacatttaaagttaatattgttatgtgtgaatttgatcctgtcattatgatgttagctggttattttgctcgttagttgatgtagttacttcctagcctcagtggtctttataatttggcattggcatgattttgcagtggctggtaccagctgttcctatccatgtttagtgcttccttcaggagctcttttagggcaggcctggaggtgacaaaatgtctcagcatttgcttgtctgtaaagtattttatttttccttcacttatgaagcttagtttggctggatatgaaattctgggttgaaaattcttttctttaagaatgttgaatattggcccccactctcttctggcttgtagagtttctgctgagagatccgctgttagtctgatgggcttccctttgtgggtaacccgacctttctctctggctgcccttaacattttttccttcatttcaactttgctgaatctgacaattatgtgccttggagttgctcttctcgaggagtatctttgtggcgttctctgtatttcctgaatctgaatgttggcctgccttgctagattggggaagttctcctggataatatcctgcagagtgttttccaacttggttccattctccctgtcactttcaggtacactaatcagacgtagatttggtcttttcacatagtcccatatttcttggaggctttgtttgtttctttttattcttttttctctaaacttcccttctcgcttcatttcattcattttgtcttccatcactgataccctttcttccagttgatcgcatcggctcttgaggcttctgcgttcttcaygtagttctcgagccttggctttcagctccgtcagctcctttaagcacttctctgtattggttattccagttatacattcgtctgaatttttttcaaagttttcaacttctttgcctttggtttgaatttcctcctgtagctcggagtagtttgatcgtctgaagtcttcttctctcaactcgtcaaagtcattctccgtccagctttgttccgttgctggtgaggagctgcattcctttggaggaggagaggcgctctgctttttagagtttccggtttttctgctctgttttttccccatctttgtggttttatgtacttttggtctttgatgatggtgatgtacagatgggtttttggtgtggatgtcctttctgtttgttagttttccttctaacagacaggactctcagctgcagttctgttggagtttgctagaggtccactccagaccctgtttgcctgggtaccagcagcggtggctgcagaacagtggatttttgtgaaccgcgaatactgctgtctgaacatttctctggaagttttgtctcagaggagtacccggccgtgtgaggtgtcagtctgcacctacgggggggtgcctcccagttagcttctcagggatcaggggtcagggacccacttgaggcagtctgcccgttctcagatctccagctgcgtgctgggagaaccactgctctcttcaaagctatcagacagggacatttaagtctgcagaggttactgctgtctttttgtttgtctgtgccctgcccccagaggtggggcctacagaggcaggcaggcctccttgagctgtggtgggctccacccagttcaagcttcctggctgctttgtttacctaagcaagcctgggcaatggcaggcgcccctcccccagcctcgctgccaccttgcagtttgatctcagactgctgtgctagcaatcagcgagactccgtgggcgtgggagcctccaagccatgtgcgggatataatctcctggtgcgccattttttaagcctgttggaaaagcgcagtattagggtgggagtgacccgattttccaggtgccatctgtcacccctttctttgactaggaaggggaactctcagggttttgttttttttttaaatctctcttgattatttttttgaatgcatgaactatgcttccaatagccagaactatacaaaaaacatatttaaataaatgccattcctctatactttcagtttctaccccaaccatctttttcaccctgtacttatccatcccctattggtaaccaatttcatcagtttctaggttaatcttgttgtgtttcttcttggaaaaatgctcagatagttgtatattttcttatttctcctgatctctttcacaaaaaaatatactgcatattctcttgttcaccttgccttttccatttaacagaatatcctggaaatcactccctattaattcacagagatcttcatttctcgtaacactgcatagtcttccatatgtggatttgcgtttattcaatcactgtgttatgaatgggcaattagattgtcttcaacaaccattatatgcttctaacggaactacatacaatgggtaactgtgtatatattaatatatatayatatattcttatttgttgaaggtatatatttagcataaatttctagagtgggattgctgagtcaggaggtaaacacataggtagctttgttagatattgctaaatgacccttcaaaaaatttgtatgaatttgcattttcatcaccaatatatgagagagtctgtcttcaacccattctcactaacagaatatgttgtcgtactttttattttttgccaatcttatakataacaaatggtttctcaacgtcatttttatttgcattcctataattatgagtcaagatggatatcttttcaaatgtatcttttgtgtgtgtgaattgtctattcatgtgttttgcccatttttctattaagattttgattttcttttcccttcaattatttagagttctttatatgttaggattatcacctctttatctgtgacatgtactgaaaatactttctcccagtttgtcttctgccttttgttttttgcttgtcgtgttttgtgtcatgcaaacgtgttgttatttttttaatctaaccaatttacaaatctttttttttttttttttgcctctggatacttacaaaatctttcttacatttgaagtatagaggaattcacccttgctttcttctaacacttgtctggtttcatttgcttacatttttatctctgatccatttggagtttattcttgttaaaaaaaatttggagttttatctttttcaggtggctatggaactgtactagcacctttttattgaaaaggccttgtccttatcatttgagctgtttcctttatcatatacaaattttccttatgtatttgcatctctttttggactttctatcccattcactggtgtatctgtctatttatctgctagatctgcactgttttaattatacagactttatagtatgtgttaatatctgatagggctggcctggcacggtggctcatgcctgtaatcccagcactttgggaggccgaggtgggcggatcacgaggtcaggaggtcgagaccatcctggctaacatggtgaaaccctgtctctattaaaaatgcaaaaaaaaaaaaattagcaaggcgtggtggtgggcgcctgtagtcccagctacttgggaggctgaagcaggagaatggcgtgaacccgggaggcggagcttgcagtgagtcgagatcacgccactgcactccagcctgggtgacagagcgagactccatctcaaaaaaaaaaaaaaaaaaagtctgatagggctaatgactcatagcttttctcttccatttttctcaatttattcttgcatgtttatttttccatacaaactacaggttatctaactccatgagaacttgttggcatttttaccattacattaccttatattacattacattaatgcgatctcatgtaatgtaatgagatcacattaaatttataaattaacctgggaagagttgacatatttctaatggtgaattgttctatcccagaacaagagcaatctttccatttgttcaagtctactcttgtgtcttgatagttttttaactttttctttataaaagttttgcacgtgaaccattaagtttatctcttttattttctttgttgtcattctaaatgaggctttgtctgtgattatattctctaagtggttattgttttgtgtatataaaggctattgatttctatatgttaatttatatcctgttattatatttaatatttttattatttgatataattttattactgattcttcaggtatgttttcacagtatctgcaagtgaagatgactttactttttatatgatttctcttatacaactatattggctgatacttccaaggcaatattaaatagtattgaaaatattatacccacatatgcatataaatatataatacatatattatatatattttcagcatgttaagaaagtattcatcatttcctactttcttcattgcttttatcaggagtggatactgaattgtgtcaaaagctttccagcatctgttaaaataattatattatttttctccctagattgatcaatataatgtctaataatggatttcctcatatgagcagacttgcatcctggaatgcatctcacttggtcatggtgtattattttcttagtgtatactaatcttaaataattatcaaagctctatggcagtgtcattcagaaacaatatcccctcggggacttactgaattgatttccgctgaatcagaattctgtgaagagtcacaggaatctgcttttaacaaattccatagaggtggtctttgtgcatgctgagaaccactggtctactatattgttcaatgtgaattttaatggaaattactgtaaaaaaatatttactttagcaaaggtcctgctccatgattcctttgaaaagctgctttgtatcttaaacttataaattctagatcatgatccagctgtaggagagtagatgatacagagaaattaaaaggtaaaatattttttagtttcagctgatacctgaatattcatttatccactcatacatttatttagctttttttagcactgtgaaaggatgagaaacaaaaatgtgtaagacccagttcctgtacaacagtagaataacttgaagattatataaatgtttgtaagatactaggcattatttagaaatgttttccaggaattttataggtctgaggggcttaaaaaaggaaatggatcagaaaagacttaaaaaaggaggtgattcttcagatgaagtgtctttccaatataacattaacaaatgggggaataaattgcaaaaacctcatttacatgaaacgttttagaaatgcatctcttacacatggtgtactagtataccaacatttcaactctcatcaaacacagctatacaacatcactcatatatatatgaggggagagctatctctaaatggaggcatctctatacataacctatgaatgaatttctttccaagatacccaaacttaatagaaacactgaataacatcagtagcaaaatagaaaccatcagtaataaatggaaacttcagtaaatgggagatgaactgccacccttctattagtatgcttcaaattctcttaaagacaaaaaaaaatgtatgctctctttctatgagaatttgtgatagtttggttccactccatttattcttggtatcagacttgcttatccaagacaactgctgtgtgggagaaagaccataaaaatcctgtgactaacactcacaacaggggtcatgattatgacttggcttagtatggaatgtatttcttcttatcatgtgaatggcccccatgtgattagagggatggcaatattttgaagtacaaacctggtgctgcttgctctgaagaaaattctaagtctaatgtagtaaggattcttctgtttcctaattttaatgatctaaagggaggagtggtttttcattgccaacatttttatttacccaaagtctgcagaatttaactgatgcttcacgctgaatatgctacaaatgatgtagcatcaggtggtttggcacacaccttgcatctgattcaaactgcagcaagtgtcaagcaggatagaagcaaatgtcacactgaagtcttggttaatctattccagctcagttttaaccatcactcttcagtagttaactcatcaaatcattaaaataaaatgttcatatatgaatagctttttggattgccttagcaaagggaagacagaaaacacttcaattaaaaaawawawatatataatatatatatatatatatatakatakagagagagagagagagagagagaaagccattcagactgacaatatgaaattcagatatcaaaaataaatcctggatgaattctgaaatagaaaacatatacatataatatacaatctattctgaacagtctaagtagtatgttttgagaaacaataagatttaatgtacrtttattgagcttggtcatattaattttaataatttctttttaaatttgcagttggtaatcagtggataaattacatatcattctgtggtcttagaacacatgcagagctcgaaggaaacctagtmactgagcttatctatgtccacagcaagttgttaattgctgatgataacactgttattattggtaagtacagtatatggtctataattgtattccttgccagttgacttaccccatgcaaaaatgtttgctgctattcctcctaagcatcctttgcatttgaaacagacagtaacaccataactaaaacatttctgaagccatcctcttctcttacatcctttctaacccagttgttgaaattgttataggtacagaataggtgtatatattcatggggtacatacgatgttttgatacagtcatacaatgtataacaatcacatcagggcaattgcagtacctatcacttcaagcatttatcatctctttgtgaactaaactatttttatctgtgaagaatcagaggtacagagcaattaaatggacttcgtgaaaattgcagaatccagaggcagctgtttaacccagcagtccaataatgtgccagatttcactaattctttattactyccttttttttttaatttttaaaactatttttgagatgggggtctcgctgtgtttcccaggctggtctcaaatgattcttctacctcagtctcccgtgtgctgggattacaggcccgagccaccacacccagctatccccttatttttatttacaatccaagtgcccagatttcagggattggtgggggataaatggggagggaaagtgtgtcataagtgagtaccttgtggtaattcgtatgtgtttataccacatccacctaaccattaccacagatctgaagttgtacaaaagtcgaaatcagaaggatggtaaaatattgctgcctctatgcattaccactatttttcctaacatgcatgttttccatgtcattaattaggatgtagagcagtccaactttgttgatgtgtatggatgaagtgggaattgtgtactaatgataggatgtagccctgcactaaggtctgcagtcatttcttgtcaaggatacacaggagacttttccaaaggcctcttcccactgacaaattcaggagagttactctcctaaataacttgtacattctacccaaattagattagcttgacaagagaggtagatgttcagcttcattcttttatatacatagaaagcttcattcttccatcattgaattattttgacttctaatattaatattatataaaatgagtattggaagtccaggatgatagagtataaataatcaaccaggtaaatgaggtaaccagtgtgggtcatgttatttagagagatgatgtgtcctactaatgggaattctgctcatctgtttcaaatgaaatgtagtttatcagctataataagatactttcctattattcaagaaactaaatgtcatggagtgttttgaaaattttggacaataaatatgctttctattctccactgagaaaagaaaacatatctcatatctgagaagaataaaactgtcttatctggaacatgatttgaatagaaaagaaacatagttctgaagccagaaactgtgtaaaccacagtgtggtgagatacatacacacacacacacacacacgcacacacacttttaatatttgtatagcacattaaaataatattgttcctttatctcctcgtctatagccagaaactgtgtaaaccacagtatggtgagatacacacacacacacacacacacacacacacacacacayacacacttttaatatttgtatagcacatttaaaaaatactgttcttttatctcctggcctatagggataaaagctctttaggagtttatttattcccccatttgccctaatactcaagatttcatttatttctcctgagctactctgacttgctcttcaaaagcaaatctcagaatactttggaattaaatttgacaatgacagtaagaaataaaaactattgatgtttgctgaaatggaaaaataaacaaagccacatatttcttcaccaagatttcagaagccttgaagtaaaaactgacagatgtaaatatttttttgaaaggtcattttgactttcagcctcgtttactttacatgaagtataaatacaaattagtttttggtaacagagctaacagttaaataaatttgttgaggtttttaattgacttattttctggaaaagtctctaaacactcaaagactccaatttattttgtttagcaatacttgatcaattttgcacacaattcttacacattctcttgaaactgaggatatggccctgggagtctaaagaggtcttacttgctagtccttggaggctggattccttttttccttccccaagtgccttagagaatcgatttctcccaaggaaaaaatccagagtttcttttgttctttttatctcggtggaaactcaagaataagcaggtttattgttactgttctaacacattcaccctatttaagttcctaacacagaaaacagtgtttaaaattctcagagacgagtttgagaagttaggttgagaatattttataggtgttaaggaagtatttaaacatttaaaggaggtttaagtaatgtatgattaatttttcttccatggcaaacttatgccagaatgattgaatagctgacataagaaaaatgaccatttatcttcattttactcctcatgaggaaatatttgttttctcacactgaagatctcttttgtgcatagctttaattgcctgtggccctgggtaaccctgctggtcatgaaatctgtgaccaaatccagttttcttacctatcttaattttagcctttaaccagacacacatatatttggtttccaaaacaaagccaagctccccttcaagtagattttaagcctatcctgatgactaagtgaaacggttgtttttaatgttcactaacccactgcaaagcacaatagagagatgcgaaacgtgagtaaaacagcgccactgccctcccagagatcactggctggaggagaggcagctactccttccatatgagagcagaaacactaggatggatgttgccaaaccagaacaagaaggttcaggggcaatcaacaagtgtgggtaggaggagaaactaagtcgagctcatgagtctcaggatttaaagagcaggcttcactgtggcagatgagaggctggagttgaagggctgccccagtaaagagggggatatttcctcatgtctgcaatttgcttttaaatggatcaaaacaaaaatataaattaacaatggatacagggatggagtggtataccaatgcctggttcttatttctagaaattatgatctagttggtctggtttggggccaggcatttgggtttttttggttttgtttttggcatcagtattttttaaaaagcttccttgttagctttcctaggtaatgctcatatgtggtcrgagctgagaacttctgacctggaggcaaaggaaatacaagtaggcagaaaagacagagtagcccagtgtgctcaatagaagaaccagttttccttcaaaacaaactaaaacggggtagagktsgtgcgttygtttcccattactgctgtaacaaatgaccacaaacttagtagcttaaaacaacacaaatttattatctgacacttcagtaggttagaaattcagcgtgagtcccacaggactaaaatcagagtgtgagcagggctgttgcattcttttagaggccgttagggagagtccatttccttgtttctagaggctgcctgcattccttggctcacagccccttcttccacctttaaagtcagcaacattctatctctgaaaatccccaaaagtctcaacccattcttctgtaatcataactcagtctgactccctttcacttttacagatcttatgattgtattgggtccacctgtataatccaggctactcactctatttttaaagttagctgattagcaaccttaattccatatacagccttagttcgcctttgccattgaacatatattcacagttttcggagatttgaacacggacattttggagagctgctattctgcataccacacaaggattcacaatttctaagtgagacacacaaaataagcacaaaccacaaaggaaagataaatccaactgcattaaaattcagaaatttcttcattaaaaggtactgtaaagagaataaaaagataaaccacaaactgaaatatttgcaacccatttaatacacagaacacataaagaactcctataaatcaataagaaaaaacaaatgtccaaagaaaaatgggcaaagaaattgtataggaacttcatcaaaaagaacatacccaagcctcataagcatgtgaaaaaatgttgcttctcattaacatgagacaaataagagtttttaaaaataccagactggcaaacagttaaaagttgggcaatctaagtattggcatggctgtggagcaatacagactcccctccactgctgttgggagtgtaagttggaaaacattctggtgttacctagtaaagtcatacaccctgcagcttagcaacccacgcctacatacagagcctaagaaactcacacatgtctataccaagaaacaaatactcagctatgtagagcagaattgtgcatcacagcaaaactctggaagcaacccaaacatccatcaatagcagaataaataaagaaatccctagtgtgttcattcaaggaaaagaaatgcattacaattatgtacagaaaaatctcaaagacataagactgaatgaaagaagcaaatctcaaaggactatctgatatatgattccacttatataaattaaaaacaagtcagaagtaaactctttttttgttgtttaggaaaacattcagagcatgatgaacacaaagttaaacatcaagtcttcctcttggggagggaagggtatgcatgggaaggtgcacaaagccttctgggatgtggtaatattgtttttggccagggtaataaattcagtgatgactattttattattgcttaagttttacacacatattttcatatagccttttgtattttgccatattcacaatttttagaatgttttctaatagcactcagaacaggtcatataaacaagaaggatgcttatagagtaaaagaccaaaattccccttattttcttctctctcttcactgaaaagcacctactattgttaacagttcagtgtgtatctttctagatctcttgttctgtcttcttyctcatatgttgtataaaaatagggtaatactacaactgttcttctgaatttgattttcagaatacaggaacaaatggagggagcatttacatccatcatatcttattatatctaatttattcattcatctaaaattttctcatttctttcctcacatgcctattaaatagcagccaacacacttatttaatgtggtggagagtcagttatctgggtaattccatgttggcccttaaaatacaagaacgacaccctctgtctaataattccagctcagaatgctggaaatgtattcctcacctcgggagtgtcggggcccactgtggtgggagaggaatgggggcgcgtgggagaatgtgtgtgcggagggggctttccaggctggctcacatcccaggttctcctgaccckaaacaaagcagtgatgtcagttcaatccagcagcccccgcctgacagcggcctctgctggctccaggggcacagtaaaagtcctaaagtagcaatatgggatcttcaatctttgagctcctacagttcacacatggggcgattaagccagagaggaggcttctttaaacaaatgctacattccatcaaatggtcggttcctatggcagcattctccggtgcagttattgtagagttaacaaggatctgataataatgccagtaataattaacatttgtagagcagcttgtaaatcattaagtgctttcacatggtcttacttaattcccacaatatccctacaaggtctatattattatctcaatttatgaaagattatattaaagctgagaaagattaagtgaattgcccaaattaatgttggggcaactgtcaagctcaaagatatagctgcaaattttatagcataaccacgatgtaagtctatgtataaaggatgatttggtgctaacaaaacaaagtgtttcaaaggttcccacttttcagcagcactccagtagcattctcacatttctgtagggtgctcgatcctttctctgttacccagggccaccatggggaaacactcacatccatagtcatcatagatttatatattaaccacatgacaatattctggcaacaggcagtaaagtctcttcaggaaagggcagcttttctcattcatctcaccatttgagctctggtagggctgctgtcaccttatagctctggctgctccagtcagagggccgccagggtgcctgttcaacctgacccttctgctccacgtctgaagaagcagtggagttgttgcagctagagcaagaggaacaagaagagtcagtcaggccctttctgtagtttgcaggacacctcaaggattcaaatgcatgaatctgcagagattaatgcaaaaaaacgtgatgaggttcctgaatacacagcagaggactgcagaaagcacaggttgaactaatagcaaaatatttgcccttcacatgtaaaagtcaacattctcagctcacttggatttaaaaaaaaaaatggactccttgaatgaaccaggtattgagctaataaagagaattaataattttaaaaaatagaatggaggaaagttgctacagaagctattggcatgctacacaagtgagggaggcaagaaagcagaaagcccaaagccacaaatgacaatctgtatttgagattatactctattaattatgaaggtactcttgagttttgacattcacagttatgtgactttgagttaaagcctacagagagcctgattcttaactccaaaagcaaagccatctttcctactgaactggtaggcatgccttttttcaagtgcttgatgattgtaacagttagaatcttttgtgccacaaggtagaaaactcaactagaagtgtgtgtgaaacaataaggaacaatgtagaaaataaggaaaatatattatttcacatgacagaaggtaagaatattcaaaggttggctaattcaatgacttaaagacccagaatctttcttcttttttaattgttatttttatgttttgtttagagatgaagtcttgctctttggcccaggctgaagtgcagtggtgcagttacagcccactgcaaatttgaaatcctaggctcaggcgatcctcctgcctcagcattccgagcagctgggactacaggcatgcgtcaccacactcagctaatttttaaaaactttttgtagagaccaggtctcgctatgttgtccaggctggtctcaaactcctggctttaagcgatcctcctgccttggcctctcaaagcactgggattacagacatgagccaccatgcctggctcttttttctacttagcattttctttaagcttttttgtttgttctctagtggttgtgaaatggctgcagcagctcctggaatcatgtcttcttccaacccttcaagccaagatatccaaaggatggaagagacagaatccattttttgtgtgtttatacaaaggggaaactctttctcagaagctttccttcatgtcacattggctagcaccatgtcaagagcccatttctaagccagtcactaataaaaataatgaaattaccatggctggcttagactgattaagattcacccctgggttagggagggccccacctccctaaaaacacatcttcccttgaaaacctggacaaaattacggttttgtttgcaaggatgaattgagttgggagggcaaccaacagtgtctgccacaacaggaaggttgttcagcctcactgtttctccttacaggctctgccaacataaatgaccgcagcatgctgggaaagcgtgacagtgaaatggctgtcattgtgcaagatacagagactgttccttcagtaatggatggaaaagagtaccaagctggccggtttgcccgaggacttcggctacagtgctttaggtcagtccgccaaagtgtgtctctctgatgcatttccactgcagcagtcgctgggacccagccccgctagccctgagcacatgggtcatcctaggttcttcttcatctaaaacagtgtgtcccagaatataggatatgtaccaccagtagtatgcgaaatgactttaggtggtacatgaatattttttattttaatagctttttattactgtcacgtgcagtagaaaaaactgcagtggtgcagttacagctcattgcatccttgaattcctaggctcaagcaatcctcctggctcagcattccgagtagctgggactacaggcccgtgtcaccacacccagctaatttttaaaaattttttgtagataccgtgtctcgctgtgctgcccaggctggtctcaaactcctggctttaagtgatcctcctgccttggcctctcaaagcactgggattacagacgtgagccaattaaatactagtccttaactgaattaggactagaccaggtcaaaccctccagcttccatttaagtttttaaaatcaaattaattccagtaatacaaggatataataaaaattattgaaggggtatgccagtgactgctggtgtaaaatttaaatgtggaaacttctgttttcaggtctaaaatgactccaggtgtcgaagatccctgatctttggcaagaagatgcaaattttaaactaatctgtggtgaagcagagagaatactgggctaggaagctgggctcgtttcagctgtgcgatcctaaataagtccattcaataaagtgttatttagaactttcaagggctgcgctgtaactgtccacgtcccctgttgtgttttctcaacacagtggtccctctagaaccttctagatcatgttgcttctctgctcactactgtccaatggcttcttatctcacaaggaacaagtaatataatctcgtctcctttcactgtttcccttgctccctgcagacactcatttccccaccggctgtggaacaccctgactactctcccaactctaggcctttgtaggaagtccacagttttatgattctagaactatatttgccataatgcaattttggtgaggactgtatagtgggatgcagcaggtggccccgatatagttaagatcagtgcgttatgccctttcgggaagggcactgcgctgcagcctgttgttttctttgtgttaaatggtcccttttggaaactggctcacttgcagatgggcgcttagtgagcacttaactcccggcaaaggcagaggccacttcgctcattcctaccaatccagacttcggcttccaagaccaacataagcctcagttgtagagacattctgctgtctctgtctaagtagctcaaaaaatccatccctcaaaatctatcaataccttctaacaacttttattgctgtatttattgcctttgttactacttgatttgccagtaagaagattttcaaaccattgataattcaattagcttctaatggtaatttgttttgtttagcagaggagaatttaaaaattggtaccctgctaattaacccattgattgcctactgcggcatacataaaagacaaatacttccttttgtaagctggaatgtatgttatatcttttcagttccgtaagaacttaagaattctctttaaagtcatgagtttctttataactttttaaatgtgtaataattatagaaggtagaggtttttgattacagcacatttttatgtacaaatttggcaaatacagaaaaccagtaagaaaattaaattcatctgtaataccatcaccttgtgataacagttttaacatttggtatatgtcattccacttttttctatacatagatattaatatattgtattccctttttaaaacaaaattagaattttgcaggcctacatgttttttattatttaaacaatgttacacacattttccatgtcatcgagtattcttctacaatatgttaatggctacattatattttattgtatgtgtatgccataattcctttaatccctcattgtttggcagatatttttgctgatataaaaaaatgggtatgtttgtagataccttcttgttcaccttctttattgtctcctttgatctcttattatatcactggcaatattttagagggcttattccttctatcttgactgagtttatttaatcttcaccaatttgttagatttcacatggaatttcaccattttaattcacattttttagaattaaaaatrtgtttattagccatgtataatttttttcataaattgcctagtttatttgtatcctttgcccattacgatggaaggtttaactttctttttttattatttttatacaattaaggagtacaggtacagttttgttacctggatacattgtgtaggggtgaagtctgggcttttagtgtaactgtcacccaaatagtgtacattgtacccattaggtgatttctcatccttcactccacctctacccacccaccttttggagtctccaacgtcagttattccactctgtacatccatgtgtatgtactgttttgctcccacttataagtgagaacacgcagtatttaactttctgttatttcatttaggataatggcttccaactccatgcatgttgctacaaaatacatgatttcattcttatttatggctgagtagttttctctggtgtgtgtgtgtgtgtgtgtgtgtgtgtgtgtgtgtgtgtgtgtgtgtgttttctttatgtaattgtctgctcaggacatttaggttgattccaacactgtgctattgtgaatagtgctgtgataaacatacaagtgcaggtgtcatttttaggacaacttaggtagatacccagttgtgggattgttgtattgaatgatagttctatatttagctctttgagaagtgtccatactgtctcctatagaggttatactaatttctgttatcaccaacagtgtatatgcattcccttttctccacatcctcaccaacagctgttgttttttgactttttaataatagtcattctgattggtgtgaaatggtatcttgtgtggttttaatttgcatttatctgataattaatgatgttcagcatttttttatgtttgttggctgcttgtgtgtcttcttttcaaaaatgtcttttccattgtcttttgcccactttttaatggggttgttgtttaactttcttttaatgatttataagtattttaaatatgtgtaggatgcttattcctttgtcatatgtgttgcaaattttgtttgcctgttggcttttagtcatctttggagaatttgggggaaatttttcaattcttattaatcaaatcaatctgtttttttcttttttttccccacctgcctttttctgtatgcttagaatagcttcctcagcctaagattaaacatttacttgtgtcttctcctggtgcttgtttggttttactttttacaattaacatctgcagtgtattttagtgtaagaagtgaggtcggggtcctgactctttttctcaactaaccagatgatctggaaccttacgatacgtagtaggactcttcgcctctcttatctgcagtccacctttaagatacactgaatcactatctgttctggcttctcgctagtctctctgttatgccatattgaaagtctgtttacttgcatgccagtgtgataccatgtaattattgtggctgtgcattttaagactactttttgccataccacttcttcaaattagtattctttttcaaaataatcttggttattcataaacattaattcttccacatggactttagaattgtttactcacgttctctcaagttcttactagttttataaaattggaattatagcggatttatagatgaagaaaagaactgacacctttataatattgagtcatcttgttgaagaacaaggtatggacttcaatttatatgaatattttattgttcttcaataaagctttgggtttttattattggtggggaggaagattattctacagtaaataattcatttttttaatgctgatcttatgctaactttgtttctaggtgctttcttttacttcgcatttttcaaattgtgttaaagaggcagttgttcttcaataattattttcactttgccccaatggcaaacacagataatatatttaaaagcaccacaaaaacattgcgtcaattttagcctctttttattaggaaacattcccaaagataaatattgtggcctagactacaaccatttttttcacttaaaaaatgcagtttcactccattttccatctggcctattttaaaatagaaatagagagacttatttcaatgtgaaatcaattctaaatagagacagaatcaaacatgcactaaatttcacagctataagctgaacagttcaagtcctagaaaattatccaaactttgcagatataaccatcactcaagagaaaccattgtccacacaattaggactcagaatcatttaaagtgatagatatgaggaacggaaagaacagaaataattttttgtggttttcctactgtcccactttttttgatgaataagcaaatattaaataattttcattaaatacatcaacataaaattaaactagttttctctcaaactttagtcctcaaaagaacatccagagtacttcatattatttttactctgcatttaatataaatttcttataattaaaatactgccagggaaaataatatattgcctattttagacttatttaaatactttttctacaaacaagcccttacctgatagtttggtggacacattggcttatctcttgctctaatttaaaagcaaagttacagaaaaactctttctgctcaattttcagcttcttaaatctggcccaaatcaaaggtattataataattgacttactgtcatcatttgtactgtcattcacatttgatgcagtaaaattgtgctttgggtctcaattagcagccaatgtctatgtgcaaacatctcttaaatctttttttaaaaaaagttattctygtgtagtctgaaggaggcacattatttgaagtggaaacagaactttgaggttataaaagtcaagaatcctagaaagcctatggtgccagatccattttaaaaaaatttttatacagtggaaaaagtgcagactaaaactaaaatgagtgtcctttaatatctacagacttgaactttttcgtgagttgataatgttggagaaaactgggaaaatattcatgcttaatagtgtatgttttggtacagcctttcttgcagtaatttgaatattctctgacccaggaattctaattctaaaatttcttctwatgaaataatcacagaaatgtacaaaatcacatatgatgaataaactgtgttcattgtaacactgtttataataatgaaaaattggaaattacccaaaagtccataatgaaataattggttcaataaatttcacgtgataggaaactctgcagccattaaaatgatgatgcaaatctacatttatttaaatacaaggagggtaacaatataatgatgtccagttgttaaagccggtggtcaattcttatctgaattggacagttctccttgacatacttctttgtgtggtttcaggattccacatcctctggcttttctccagcctcgctggttcctcctcctctcccttactgttgatatacacccggtcctcttctctgtctatactcacttatttggtgaactcagaaaaaaacattcagcctatgagcatgtgcatgaggacaattctcagatttatatctctaaacaagccttctctcccaaaccccagttccatttatctactgcctactcagcactgccacttgcatctttaatagatgtctcaacaggctcaaaatcgaattcctgatctcccacaaaccagctctacccacagaattccctatctcagctaaaggcgactacagctgtacattattatagttgctcaagacaaaaaccttgtagtcatctttgatgcctcactttttgacacaccctacattcactctatcagtaaaacctgytggctctatcttcatctccactgccacccaggcccaagccaccatcatacctcacctggattatgggagtagctcctaaatgggctccctgtttcaacccttgccccccagagtgtgttctcaatacagcagccgtattttaatatgtaagtcagattctgtcactcctctgcactgatgtctacactctccatttcacttaatataaaarccaaagccttacaaggccaattttcctattgctctttccaaatagcacaggtcttcttggtattatttcagcctatcaagtatgtgggaaaagggctttgccctcagtttgagttctaactccattactagtgtgcctcgagactttagtttcctatctacagaatgagaatcatctgtcccgcctaccacacaggattaaggtggaagtgctttttaatcctaaagccttctctaagtacaagggttattataattttcaaatatcacttctaaaacttgtcttgtttgcttgagaattttttgttatgtctagtccgctgtttatgtgtggtcaattcagacaatagtttcttttatgtcaggcactctgaggatatgagagtagctaggtcatggtctctcaaataatttgcatrtatatatttgcatatatagagatagatataatagacatatatcctgcaacaaactgctttatctcagttactcaatgtggaggtcacttgtatttcagggttgtccttggctatcttgatgacccaagtgaggacattcaggatccagtgagtgacaaattcttcaaggaggtgtgggtttcaacagcagctcgaaatgctacaatttatgacaaggtgaagttcacgtattcccctcctccgtttcttttcactgaatctcatcacaaaaagcatattgttatttctgcatattattggtacagggtattcttaataaacgtaaaaaagctaatacatgtccaggttgtaataaaatacctctttgtggaccctgaaaaacaaaggcaaaaagcattgtggattttggtttagaagaggctttagcagcrttccagtctctcctgtgatgcaggaatcccatcagcagcatccttagcacctggttacccagcctttgtacatgtctagtgacaaagagaagaggggcagatggcataaaaaaacaagccacagctgagtccagcctagctcaccccgttgctggtgttataaccttgtgtatagtgacttaactttctgagtttctttttcctctcctataaattgggaggaatattcacaagggtagttatgaggacaaagaatagtctagtgaatggttttagcacatagtgtatagtaaacagtattcatccttatgatgaatcttgttaatattaataacaagacatgtcatttgttggacagctctagttttagaaaggtgttttaaaaccggctccatttgatgcataccaaatgcattgcctgtgaagtctatcctttggttataataaagaatgtaaaagagttaagagttgcgtaacagtagaacagcttacttcgaaaagtagctagttgcccatcagggaaaactattcaagctgtgttctagcccagactaattgaccatctgtgagaagttggataagtctgtgttcttcttcatgacttccagggacagacgtgaacctctttaaaaaaaaaaattagggaaaatacgcaatttttctcttagagccccttccagcagagaaacttattattcttaatgaaacatgtctactgtctgtataaccttgtttcttttctttctttccttttttttttttttttaattgacatggagtctcaccctgttgcccaggctggagtgcagtggcatgatctcggctcactgcaatttctacctcctgggttcaagtgattcccctgcctcagcctcccgagtagctgggcctacaggtgcccaccagcacacccagctaatttttgtattatgatacaggctggtcttgaactcctgacctcaagtgatccgcctgccttggcctctcaaagtgctaggattacaggcatgacccaatgcgcctgacccctgtataaccttatttcatccttatttcatggaccgaaggccatgatcaaataggtcatgtgcatagagtcattaaaatgtaattttacaaatgcagtgcacagccttatttgggtcctggatttgggggaaaacatctataaaagacattttggggataacaggataaatctgaatatgaagcataacttaaatgacattatataattaattttcttaggtgtgagaatagtgctgtgattatataggcacatgtccttattcttaagacatacctgcagagaagtattcaggggtgaagtgttatgatatccaaaactcattttcaaccagcaaagtaagtgttacatattaacaattgataatgctatgtaaaggtacagatatgagcctctttcaagaaaagttagggaaaatataatatgcaatattcctcttagaccagaagctccagtgaaattcagggatgattattatccaaaaaaaattaaccttaatgtggggtaacattagtgtaatttcttgccactaaccatgattttttaaatggaagcagatctatctgtttgtagcagatctatctattgttggttataagataaccaactcttaaatcaggtctgtgctgtaacataagactaatartatgtttcatacaacagaggtcttgtctgttggaataattattttccataaaggccatgtgctcgcttttaaacttttcactcatttttctatttatgctctaatcaggttttccggtgccttcccaatgatgaagtacacaatttaattcagctgagagactttataaacaagcccrtattagctaaggaagatcccattcgagctgaggaggaactgaagaagatccgtggatttttggtgcaattccccttttatttcttgtctgaagaaagcctactgccttctgttggraccaaagaggccatagtgcccatggaggtttggacttaagagatattcattggcagctcaaagacttccaccctggagacmacactgcacacagtgacttcctggggatgtcatagccaaagccaggcctgacgcattctcgtatccaacccaaggaccttttggaatgactggggagggctgcagtcacattgatgtaaggactgtaaacatcagcaagactttataattccttctgcctaacttgtaaaaagggggctgcattcttgttggtagcatgtactctgttgagtaaaacacatattcaaattccgtataccaaaatccatttcctttgtaacaagaatttaccagtaactgtgatctaggttgccaaaagttgtctgaatctccttattcttctctgatcttcatttatgcagccaatgtctagctggacctgccctcatcttgcagttcatacaggcactgtttgagagattgtttattattagatgttgtaatgctgcttcaagattcttcatggttacatgggatgcccctgctcatctggtcctgaagtagtaacattcacccaaatgaggatatagtcattattccttttcagtcactgtacgaacacggcagactttagcctacacagtagactgtgttaggcacttctggtaacattgacactgtatcttgacaccactaagcaacaggaaggaataaattccaatattgagacagagatttatttcattttgctcccaaaggcactgacaacatgagtccttgtgattaggcccacctgatcaaatgtaaaaacatgcatgggatatttgattacgtaacaaccagctaaaactgagagcacacagccttcggaaacccccaaggtgtcgaggaggatcagatccagataagagaagatgattccttctagtcctgtaaaatttcctgtcatccttagctgctgggttgattgaaatttgatctctacatttcaaaatcaaactagtgaatacagtttgtctttcaagagaatcagaggcatcgtaactcctaccaagttagtaagtatgagtctaaccttgtttgacattcaggtcttctgctacattatcttctttgagaaaaattaattgattataaaatatgtgctacttcacttacattattaaatatgtattaacgcctctcaccagggcttccagtgaagttacaatgccctagtctgtgaattagtctggaaacgtgtttttccttttcggatgttagagtaccctttgataaactaaattttactaagctgaacaactctgacagtctaaagagctaatgtgggttaccaaaaggcctgtacctgtaaaacaaaatgcaggtgtaatgattatacatgtctatggattacctggacatactctcatttgggttgttcttcaaagaagcaagcagccgatccctgttttcataaagctaatacttcagttggaaaaattaaacaggagcacaaagtcagggataggggttagcagaagagagaaatagtgtcacatcaagggcaggatctcatagctagggaacatttcacaaataaggtgagattttgtaaccaataataaaaatgaatgtttttataagtaaataacttatttttcatatggctaaagatggtaaaatgacttcattctatagccattgtaaataagaatttgctattgatgaaagaagttcagattggcatttgaagtattgagtgtatgggatctctaaggatttcttagattttatatttaaatattttttaaaccttagaggagtcaacaaactggctcttgattttcagcaccctactctcatgaaaaaagcctgaaaggaccctttcccttataagtaatttaatccaatttctccccattttatagatgaggaaactgaggctcagatcagatgagaactcacttaaatccactcaatgtgtagatggtagagctgggactagcaacattgctgcagcccattgttggcctctctcttcactttatcattgcccaagaatgaggatatgcagtaaacagaattcaggcaagatacctytaagctgttttgaaccctctgatattttgtatttatgtgtttgtctgtctccccctactagaatgtaagctccatggggcagggacttcactgtattttgttcatagtgtatccccagagcctggaccagtgcttggcacataggagatggcaataaatgcttgtagaattaataaacaaggtgaaggagagagctaatgaaatgaaaatcttagtctcatataagaagtcttactactgctttctatggcaagttccttttctattgcatcttcccaaagacaagatgctcatctgcaaaggggtgataagatttacttggagggattttatggaaaattcagtgcaataattgcttttttttttttttttgcagtagcagtttacatagtacagcattctgcaaaaattgcatgaaatgtggacacaagatgtactgtatgacttaattacctgtcattctctgacaccattactacctactagaagttcaaataatttatctttaacattgcaatatctgataaactttttaaaatgtaaataattcaaagccttgaaaatctatcatgaatctgctcaacatttcaaagtgactattttgaaatgcctataaatgctatatacctgacatcctgctaatttctgtaataatttttgttttcaagagggaaaaattctagtattacaaaaaatgaatgatggaaagtggccatggtgtattaaagctattcagattggccacgttcagtcgtcggaggatagccttagcatagcaagtctggtgcgggcgtttgttctgaatctagtgtccagcccatgactcacccttcggtgggatgtttttaattcttacctggaatgcatcacagggaggcatagagagctggtcattagataattgtgtggcatactgtaaaacaaaatgtttattttcaaagcacttttgaaaggaaattttgtctgtaagtactcaaaatatggacagttaatttcttatgtaagaacttgggaaattataatatcatgaattaatacttttccagacaaaaacaacaagctgagaagtcattttgcggatataagactaggaaaaatagatttatgtatatagagcctgaactttttctgcatctcctcatttctttttttttctttttctttgttttcttttctcttttttttttttttttttttttttttttttgagactgggtcttgctctgtggcccaggctggcagtggtgtgatctcagctcactgcagcctctgcctcctgggctcaagcaatcctcccaccttagcctcctgagtagatgggactacaagtgcatgccactacacccagctaattttcgtattgtttgtacagatagcatttttccatcccaatgccaagcaggcggattgcttgagctccctcccctgtgctgggattgcaggcgtgagccaccgcactggcctcctcattccttattccttcagtctctatcccctaccacagcaccttcttgttatgtaaaaattatttcaaaagacaagaaaaagtattctggaaaaaaaatcaggccttatattagtctgctcaggctgccaaaacaagatgctctagactgggtgacttaaacaacagaaatttattttctgacaattccagagacaggaagttggaaatcaaggtgcctgtatggtaggtttctggtgaggactcttcctggcttgtcggccaccttcttaccgtgtgctcacatggcctgtttgtgtgagcacaggaggcagagggcaagctctctggtgtctcttcttccaaggccactaatcctataatgagcaccctactctcatgacgtcatctaacctgaaattactttccaaaggccccatttccaaataccatcacatcagagatatgggcttcatatgagctgggagggaagacacaaacatcattcagtctataataaatattcacttaactcatactttaaagtgactgacaaaatagaattttttcacataggtcattgttctttttaacttgcctgatctgatgtggcacctgagcattttctggtacctgtcaccctccgtagcaggggtgacaaggacctgtcatgtctccttagtcctctgctatttcttatacaaaaggagcaaatgctaaaggattttaagtgtgcttagtatatatgtgtatttccttggactattcattgaggtcaactactactgcaagtttggtgatctaaaatgagtttacccaggcctaggccttgagagattcttgaatctagaagtccactggaaaaggaattcatccgcctctatgaataagatgcaagtagaagaatcaatagatatgcatttttttaaaaaggggcaagtatcataatatgattcttactgtcaatttaattcatatataagatgttcctggttttcacttgagattggaaggattcattaaaggagtcaaaaattcccagcttaattttataggttattttatttttcctttataccattcataatttttaatttaaaagtaatcaaaccctggataaatgaaaatctatcactaatcattttattttattttattttattttttattttattttattttattttgagataaagtttcactcttgtcacctaggctggagtacagtggtacaatcttggctcactgcaacctctgcttcctgggttcaagccattctcctgcctcagcctcccgagtagctgggattacaggtgcctgccaccacacctggctaattttttttttgttgttgtttgtttgtatttttagtagagacggggtttcataatattggccaggctggtctcgaactccttacctcaggtgatccacccgccttggcctcccaaagtgctgagattacaggcatgagccactgtgcctggccacactaatcattttaaacctttacgttttaaaattaggttcaatggtagtccaaccaaaacatgggctcaatcagtcttccctatttccaagcaactgtcattcttcactttattctagataagtgcatttaagtgaatgtcattctagctctgtgtaatgctaagaaatacaacatcataccctcccaatgtatattccacttggattcttcacataaaatggactacaccaacagcactgatgctctgcattttaaaaattcataccaaattattccagttggagcacacacacactctgacacagaaagcaaatattggatgatgaacatccattcagaatatccagatattctggagagaactggagctcatagccttccctctagggcaggtttggcaaactaagtctgggcctcctgtttttgtaaataaaatgttattgaaacacagccacacccattcatttatatgccctcatgattgtatgatccataaatcctaaaatattactatcattaagacaaaacttgctgatccttcctacagaaagcagaagatatccagacagggtacctcaatcaggcagatttggaggagttttaatctcctccatcagtagagttttcaattctccctatcccaggccccaacagtttacaatgtgtttattataagaacatagccaaatcctttcaggaattaaaattacatggtttttggttctgaaagagaagtggtcggctaaagcaggtatctcccagacaagcactcatcaacatgcatggtggaacatgcttgtaactgaagtgtaatgcatatgaggagggataagcctaagtgttgtatttataattggaattgtgaaatcaagaaacttggtttccctgaattgtccttctgtgaagtgttggaaatgatacatgtatcccttcgtagcttcacagtcaatgctttctatatcccttaactactttttctttaaatatcaattaattgagcaatgaaaagtgtgaaatcagcagtgtgcctctatttgaaaataagattcctctttctgcatgtggggcttttggagccagtatgctgtatgtctcagatgaagacagcaatgtgtgcctctagagacctcctctgcacacaagcatgtgtccccacgaaggtccgttgtagattcagagtgcattacagaggcgtagctccctggcccctgcccaggcctctctcaccttaaggtgtgctgataccttgatgaggtgaatttattttaaaagaccaacatggcattcgataagcacatactgtgcagggcccagtcaggatgctggggttgcatcaatgaacaagtcacaccaggttctcctcctttgtggtactctccctttagcaaatggagactacaaagctatttccattctcaacataagaaaatgcatgaaataagatgcaattgggtggaagtgtaggaattttcccaagctagggagaatagcaaagactgataaatgctgaagacaccagagtatgaaccaggaagcaaccatggtatggaagacaccagagtatgaaccaggaagcaaaatattaccagtaccaatgacaataataatagttaagattttagtggctttgttggccacagcctcttctaggcacttcagattttagttcattgactacttttataactggctgtctgcaggtcagggggccaaacatactccagtgctctctgaaccccaagattgtcctctacctccacttaaagcccctgcagccttacatgtaacccccaggcccatgaggtgtaagtgtggaactaaccagcaagtagtagtgggaaaagcatgggcttcaacattactgagctcacctaaaatcttggccttgccaattgccagcactgggagctccttgagcagatgaacctctctaaggttttcagcagcatggtaataaggccatgggagacctagcaaaaagcacaatatttggcatatagtgggtgccttctaccaaatcagtgctagctgctgcaactgcctttcgttattctcttaaagtgagggcgtcttgaagagagaggacacacacaacccatgaccacatctttggtctggatgttaggtcatccagactaaactgccaaagaaactagaagagctactcagctgaacccagcccaaaacgctgacccacagaattataagcaaataaaattgtcactgtcttagccactaagttttagagtggtttgtgacactgcaatagatcattgatagagtcacgcttcttcagggtattctgtttttcctttttcacattctaattgctctacgatcttctgccttctggcttctagccactccacctaaactgatccatctctgtttttctagtctttagtaatatataagtgcaggaaaacagtctgttgcatgataagaatgacacccttcttgaagcgaaactgccatgatgatggatgtttgattcctgcatatcaaggtgttctgcagcaaggttcttaaataatacctgtagcatagatgataacccctcataaagatgcttatctcacctccctctagcccagatctctcccctaaactccagacatgcctgaagattagatatttctacctgctttcttcacgtgctcctcaaactcaacaacacagcctatccaaaatgacaaccatcatcagtactctcttccagtctgcggtcaatgctcccacagggctccttctgttgttccttgtattaaggaacagccccaccagccaccaactgccaaactggaaaataattatcattcttgattcccccctttctcttaccttctccatatcattagccaccaaatctatcaattccactacctcaatgtctcccaattgctttcaattatttttcctcccaatgccacttcctgctccaccttggtcaccatcacttcatctacattaactagtctgtcaagtctggtcactcccagatttattcactgcagtcagagatatttttaaaatgtaagtctggtcatatcttttccagtttaaattcctttgagagattttgttttagggtaaagtcctagaaaggttctgcaaggctctttatagactgccccctttttaatcctccagctgaatcacctcctgctgctgctcttcttttgagcaatactcagtttggctcctgtatatccctttcttctgactttcttaaagcctatttttttttctcctaagtagccttctttgac

SEQ ID NO: 93213 - DNA, 253861 bp, Homo sapiens
aaggtctcagccaggcgaaaaggctgggaatcaattctccaacagccacatatgatgcaagagtccactcgcaacaaagcctacgacacaccaaatatcagaaacgaaagtctctgagaacttgtgcaaataagaaacgtatttgcattggcaaggatataaaatttaagtaacaaatagaagaagacaggatcttctgcaagttacagacagtaatatttatggacatttctaagaaagcttgtaatgagtattttctacactcagaaacacttttttgagtctacgtaaagaaaacacttcaagagagataggaaaatggggtcttcccactctttatttatttattgagaaagactctcgctccattgcccaggctggagtgcaatggcacaatctcagctgactgcaacctccgcctcctgggttcaagcaattctcctgcctcagcctcccaagtagctgggattacaggcaccaccaccacgcccagctatttttttttttttttgtatttttagtagagatggggtttcgccatgttagccaggttggtctcgaactcctgatccacccgcctcagccttccaaagtgctgggattacaggtgtgagccactgtgcctacccaagtcttcccattctagctgaagaaagcataggcatgttagaagtatgaactgccactaaaaaaaaaaaggagaagaaaaaattccatcttgaatcagacccatggtctagtgagtctatgcttctttcacttcccccaccctgtaaagtcagggacagggattaagattttgtcatttcgacaaacccagaacctgccacagggcctgacacacagcaggtcctgcataaatgtttgctgaatgaatgcgttaaagatgggccctcgtctgtcaagaggtggaacatttgagttcatgtgggtgaagggcgcagggcggtgcacagcacaaagtcaatatggcctaagtcacagtgatcaccgtgaccctcaagcatctgggtttcttttataggaaaaataaagatctgcctatactgtaggtttttcttttcttttttcccccaaaagagaatagctatatgaaatggaactcttgcgagtttgggcctttcaagttcacatcccatcggtggttatataaagtctactgccattattctgaagcccgtctttgacaccaacccaaagtccttgaattgtcatcaataagactaccagaaagcacaggcgaattacacgttcagagaacaataagaaatgctcacatatcacaccctcttgatcatcactactttgctccacacaaacctcaaaggtggttccccaagactggtctctatgggaggaagggagagagagagagatgaagaaatataaaacataaaatacaaagaatctgagcccctgtaacttacagaaagcaccaaattgtcttttgtaggaaaatgatgtttaatgcatggtgaggcagaccctggcttgtggtgggcgaggagmctccccttggaggaggctcttggtgaaccacctctgggtgctcccttgcccagcctgctgccttgtttaggaatggatcttggttaacggcaaaggttatctttcatacttggggatactttccaagaggcacagctgcagcccctgaaactctgccccagcagtttatttccacatttttcaagtagcacagaaagtgccactatagaagagaaattctctacctgaaaccagcagaagctcaatgcaaataaagaatctggaaaggtcacagagggagtaaaaagaaggttctttcttctatggctatagggggtttattgttgctggtgcccaaactggaaagggaatcgcaggagattaataattgaaatgttgctattattggttttcgaaactatttgtgggttattctttccctggagtcatcatgtctgtaagcatctcagaagatagagggatttaacacactctgagaagatgcctactacagccagggactttacgtgcactagtttctaatggagttcctgcacagtccaataaagcccaaagtcgtatcactagattcaaactcaggtttctctgattcaagtatcatagcacattgtctgaaatcaaggataaaattaaggcaccttactcactactcaaatgtggcgagaagaaaagcaacatttatacttactcatttttaaaatataaaacctaaacacaggaacagatattttagggcatgtgtcatcaaactctgctaacccaagatgattcagaatctcatttcttggtagacagcttggtagataggcatcttcaggtccatctgatgatgaattgcagcagacagtttttggaagtctgtgaagtgttcctttacataagccaatagtaatcaacacagcatatctcagggagaggaaaacataaataacttggaatttaggctcctctcattcagaacccataatagagaccttggtggttggcctttgcactagatattgaaaaagcctcgcaaagcaagttgatggaggaaatacaatcacaaggcaaatgtttaaccttctaaagaaaataaacctttttataagaagttcagttccaaaccaccaaaaactaacatgctatttataaacctatccttcaagcaagccctggaagactgattctctttgccacccattaattggtattatcaaataccccttgtttcaaaaacagcatttctgtctaaatctctggcggttcagaacgctccattaatgtatctgggccttcacctggtattccaacttggtgcagcagcaccccattgaaacaattccctctcgtgtcgttatacttttcctgagaagaatcatgcacactctttaggagctcaaaacccacaaggaatccctcttcttatagaaatctacaggaaaagctctgctcgtttagcatgcacacagggagtccatgtgctctgattgagacaggggaaaaatcaggtttcctgaacccagaggatgtcaccacggcaggagaaaggaggtcatcagagtcttggcacactcatcacagtgagtgaatgcgggtcctagcaacctaatccttgattctagaagtcacctgtctgttttagagcatgtccaacaatctctttcaaaaacacccagatctgggcttttggcagactgatgtgggccagttgaggtgggatggggaggaagattagaaaaataattataaaggtgcacagataaacatccggaataaaagggtgcacagcgcaggaacaatgaagagggcacacggacaagatggagggaaactgagggctgaaagaggccaccgcggaggtcacctgagacagggaaggaaggctggcaaataaaaacagttcatgagacttttgagatccatgattattcttaaaccgtaacaccctacacacctgcagttctttatctggcgtaaggaactggaagaacaatgtagcaggaacggggagagccaagtctcagcctcgggggcatggcctaccttccatatggatttaaaatgaaaggagcaggaggagaacagtgcagttcccaagatggctttccacaaagttgacaaaatacaccccaactcacatacccggtccctagtaacagggaaaccagccgtttactatagttctgaattcaatgccaagttccttctctcaactcaccgggagtgtccagcagagggagtctcaaggaggtacttaataaagagaaaattgtttcattttaacactctagacagtgggagcattgactgtagccccctcctgtagacgcagatgaacaatgaacgcccgacatgggttctcccgcatgttcacatgtccaccggcatgttctattctgcgtggtggagtgatcagaaatttcgttttgttttgtcgaatggttaaatggaccttgtgttcttcagaatcaaagaggaaagcccctggaataacatctctctgttgccttctaaacagcccctttgtttctaagagagtctgaaaaaaaaatatttacagtctataggttatttacagcctcgttatccagggcctgactggtaactttattccggccagaaacctaattcatttggagccctgaaactaataacagattttcttttaagtttttttttttttaatcagcctcttataacagagataaaactattaatgccttccctgtctcactggccacaactgttctccggatttacaggaggattacattcccccctcgtgccctcctctgtgccacacaaaccctgtcccctctcatttgcgatttcatccacagaatatctgaacaaaaccgaaagaaagccgggggacccacgctaaaagtatgtgaaggctgcgatttcaatgatttcatgagacaaacatttacacgatgaaacgactgaaaaatcagacacacttgggtttaaaatttctcctactacaagcacacaaaaacacatcgaagtgtaaaaacttagttgattctgggttgctttctggctggaagctgacagaacggactgaagagaaacgaaagacagtgtgcgaggcagacctactgcttttctgccttgcgttcttttctttcttgctaaaggcagtcaaatggggaaaaataccccgatgccaggtgaaggtgcacaacacagatcgacccagaccgagccagaaaaacgtctccgccgctcccccggctggaaaacccaaagtccacgtccccttccacacgctaatgaggggagattttcgcctatttcattgttctgcctggctctgacatggacttttcatctctctcctctctccccacctagccccgtgcattccgattccacagcccccccaaaatcggaggctcgcggagaataaaggagcgtggggtgggcgcggaaagaaatgggaaggggcgcggggcggagagcgaagtggaaaggaggtgctccgaaaggtaatgtgggggggcggtggaagctaagccgcatcaccttcatttatcgcaaataaataaaaagcacagtcaccggtccgccttccccggcgtccctgccctccccgggcagccgcccaccctcgcacacgccccctcccctcctgcgcccccggcccctctccccgccctggaagcaagaccctgccggcgccgggtcccggtcatcttccgggcgagggagggggtcgcggccccctcgggccccgggtgggggctggggcaggcgccgggggctgcgggcgcggggccgcgggcagaacaaagctgcgggggccgcggagggcggcgggcgcggggtcggcggggccgggcgccccttaccttcgtacacgggggccatcggggccggggtgtccgcggttcatggcaacggggacgggaaagcggcgcgcgagctcggcccccccagcctcagtcggaatctgccatcttgagcctgtgtctccgctctcggcgcagccgaggccgcccgcgcccgcatcaccgcctcccgtggccggcgccgggggagggggccgggcgcgccgccgccgccgccgccgccgctgccgcccgggcccggcgcggggggctcggggctcggggctcggggcggccgggcgggcggagcggccgaggccgaggcgccgagcggccgcggcccccgagcggatccgcggaggggcgggagccgggggcagcgcgcggccagggccggcggggctcagctcagcatggctgggcgcgggggctccgcaaaagttgctggcggaggggggcggcgggcgggggcgggggcggggcgcggggccgggagagccacagggagtccgcgcgcaatcgagcgccgatggcacggatgcgaggcggggaaggccgaaccgaagggcagagccgcgccggcggcccgaggggaccgcgctgggaggggctgccgcgcagcgcggggggactgggcgcagggcgggccccgggtagtgggtgagagggccggcctggacccggcgggcgcacggctccgagyccagcgcagccgagccggtctgcagaggggcccccagaactttgtgtgtgtgtgtgcacgcgcgcgcgtgtgtgcccaggtgcgagggtkcgcgcgtgtgctggcggggagggaaccgacccgaaagagagccccacgctggcaaagtggctcgcccatctcacagccggttggcgctcgcggaggtaggagtggaatgaatgaatgaaggagtgggcgcgcgccgtgctccggaggagggcgggtgagtggaggagcttcggaaagccacacgaggtcagaggcaccgaagccctgccgtgcacgccgcggaaatgcagcccccggggtggtcgctgggttcctgccggagtctggcttccacgccaccctgatcttctcctcctcgcgtctacactgtcycgagggccgccactccatcacttgaatgggagctcacaactctctgggtcctcgcttttctcagcgctctctcctatcagggcttccgctaaacactctccagactctccccagccgggagcctctccaggtttgcttctccagctgcctcccggatgcttggataggatgccctgccatcccctccaacttaggaagacttgttgagtctcctcttaggcactgtttttaaaactgtgggtcgtgacacagtaatagatcataaaataaatgcagcggaaggcaaccagctttcaaaaagaacgaaatggaatccaatagaaaatattagagtccattgcccttagtaagggcaactattgtttcataaaccttttgtttcgattataggtactggacaagtgtactggaccatgatgtcaattttatttccgtctgtgaatcgtgggtttaaaaaagttgaaaagctatctgtgtaaaataatgatctctaacactgtataactttcttaaaaacaacctcgtgattttctcactacttcttatcctttccggtctccatcctccgttcccatccttcagtccttcccaaaaaaggcaagctctttcacacttttttagtggtacatcacgacaccttcctctgtgtgatcttgtactctgcggtcttccttgcccccataatcaatgctacacttcctatcccttctcttaacctaatgccattcacgtttgcagaatcctagactactgttgctaaaaggacctcagaggtcatctgggccagccctgcccttttagagttgaagaaatggagtccagagaagtaaaatctgttgcccaatgtcacacagtattgaagcttaggaataggtctcgtggctcccactctagtgttttttgctccacaccggtcatttatctccttcccttctatyctccctgcaatctttaactttagtcttggcccaggtcatcctaaatattgccatcttcataatacgtggttctggccatgccacgctcctggctaacatcctctaaggactcaacctctgcaggtggggctgagtgccttggcttttcatcaaggcaggcgagtcctgacttagctttctaaggacatgagttcagcaagtcactgcttctctagccaaactggtttacttgtagcccagtgccagcttcacccatctctgtcactgtgcctttgcccaagcggtcactttcccacccactttcccagaggggtaccttctccatcttctctctttaagcagattctacctgtgcctggctcacctcctmcacaaaacagcccgagatagcgtgggagtaagtcagacctaggttcaaatcctagctcttccacttaactatgtgatcttggtcaaaatgcttaacctctctgagcctcagtgtctgtattttgattatgagaaggagaacaatagtaatgttctccttttgcatctgtaaatctctatcatagccttcaccacacaggtatgtaactccctgttaatacataccctacatgcatgtctctctgcccctttctagtgctggccattagaacttgctgccataatggcagtgtagctacttatgtctgtggagcacatgaaatgtggctagtatgactgaggaactgaatttttaattttaataaccatgggtggttagtggctaccattttggacaaggtgtctctagactgtaagctcagtaaggacagaaaccatgtttttcttgttttggattgtatgtccaataactgcattgcctaacgcatggtgagtactgcacacatatttgttgaatggatgatagctgcaatttgttgcatgctcccttgtgtccagcacaacactacaaactcgataaaaggcatttcatatagtcctcatcacagcctctgaggctgggttagattagagagagagttttatatagagggcagacacatagtaggggttcaataaaagttattattattctaactcctccctctgaccagccccactgacttttgtctcatctttccttaggctcacagaacatttcctgcctgttgctcacactctgttgtccacagcatacccgcaccctagatggctgactcttgtcttctgtgtaggtaccctgtgttcataactggattggcagcgtcttggagcaaggccctgctttataggactgcccctgaattcagcactgaccagtgttcagtaactgcctctaagtccatcccagctgctgtctagcagtgagtgattctaggcagtcttaaaatgaatatcacttgtgtcaaccgaaaacattttacaggtagtctcctccccataagaagggaacaatcttgggcaaggaaatagagtcccatggaaggggaacaagatggagccatacagacagaggtccaccttctcttcagaccaccatgactgaagctgtatccatgagatgcaaaacatgcattcaattgagctagcgaagttcgtatgatataacggaaaaatattcttgaaatgagcttagattttccttcatgaattggcagactgagtatactaattgtctcctttccttccggtgactgcagtcaagtggcagcaaggtataaacctaacagtgaaatgtcactgaaggagagcatgggagctgggaggagagaggatctgtgacagaacctggggagtaccagtatttgagacatgggaagaggaaaaagagctccccatggacaagagggcagagaagttggaggacagccaggacgggggattcctcaacatcccagcaaggtcaacagtgctgcatgctattgagaggcccacgtcagatgaaagcagaaaagcagctgggtgctgtggctcacgcctgtaatcccagcactttgggaggctgaggcaggcagatcacctgaggtcaagagtttgagaccagcctggccaacatgatgaaactccatctctactaaaaacacaaaaaaaattagccagacgtggcggtgggcacctgtaatcccagctacttgggaggctgagataggataatcgcttgaacccaggaggcagaggttgcagtgagccgagttytagtgccattgcactctagcctaggcaacaagagctaaattccatctcaaaaaaaaaaaaaaaaaaaaaaaggcagaaaggcatcaattggatttagcaacaagagttgcattagtgactttggtgaaactagtttggagggaaatacaggtttcttaaattctacctgaatatgtgtcctgttttatgggtggagatagtagaaggatggggagggctaaggaggtaccagaaaagagcaccagagattgctccaagcagagagggccttaccagtcatgggcctgagacaatgagaggggtctgggagctgtcccatttggctagagatagtgtgcattgtattttatttatttaataagcacaytagcagtcagtgttctaaggagtttaatcaatcatttaaaaaaatcacttttttttttttttaacagtacatggaactctaggttgccaaaataccatttaacttcagggtgcattgaagaacaataataaaggcaagaaaactggaaaggatttagtaaccatttataccagttacctctccttaatttgcctttctacaaaatggtgcaagtcatatctttctcaggagttggtagagtgaacatgggggagctttgacctcatttcaagttcattttgcttacaggacatggaacaaagggtcttttttttttcatgtatgcctatagttgtgaaactgcacaacatcacaatatcttcaaggccacaggatagagataaccctctttttggtgtatgcatttaggtgtgtatgtctctcttactctcagggtattcttagcatgatgtctgtgtggcttgtatcttattctcacttggtgtgtgttgctcttattttcctgacagctctttattttccatgtgtgagcctgtgcctgtggtttatctctggaggatgtgcctgagggaggtaggtcactatctcaagttctgtcttttgatatcacacctctcttttggtctcttgctgtatctctattttcctctctttctgactgtgtgtctaattttctttttctctgtatctttctatcttttccacacattctttatttcttcttcctctccctttattttaattctgtttcttaacaagtcataatagagacctatttttgtttggattattcttaagaaattaccttgtctttctgctttaaacctttgatcggtttcaatgatacagtttgtaacagagtagtatttaataacaaaactctttaactgaaagcttcagtaacaagacattacactcacagagaatttaaaagagtagacatttcattcaaatgaggaacaatagagctgtggctttaagggcaaaggggagagcgaggcttggcagggtgaagggaatctgattgtggaaatggcagtcttggagaaattacactggcaaaatcaggggaatagggaaacatcattcatttttctgcttttgctcctagaagaaaaatgatcagacacctgaacaggggtgcaggaaaagcaaagcgatgccataagagcattgagcagaaaggaaatatggcaaaaaaaaaaaaaatgcaatcagcctatgaatgaaaagaagctgtaatgtagatgcacagaaggtagggcgattttgttggaggttgcgggaatggcagattaggatggatttgcacatgagaagcagttcagagaagcaacccaaccctgcagagaaatttctgtgattatgggaggtaggtaatagcttggttttcctgacctgcagtccaggctgaacttggacagactaggtagaaatggtgcagaaagaagcttggggtggaggcagaaataaaggtagactgaggagagctcttttaaaagcctgcaggtcctgttaagcctacctcagccatgaatcagtggacctgtgcatttctgtacagtgtgaagtttcaattgtaaggtttcctcccactgacatgaaagagcttgctcctatctggcaacccctggaggggcttgactgtcacggcagagggcagttaggactgactctttgctctgaggttgccagtggcttcttagattgcaaatcgcatgccctttcttagcccctcccctgcttgatctctaagcaaacatgagttagttagacactgttaatcacctcactcttcttgaatcactcccctcccttcacatccttcacatgcatgcttgtttagttttttttgttttttttttttttgtwttttttcccaaaattcctagtccttcctcctttcacatgcttgtttaggtttttgtttttgtttttgttttcaatactcctagcctgccttcctgccttcctgcctgcctgcctgcctgccttcccccttccctccctccctcccttctttctctttctttctttccttctttcgtttgttctttctttcattctttctctctctctctctcttccttccttccttccttcctttctttcttcctttctttttttcctgagaaaatcaattcatcaaatgttcagctacagcttactatgtgctagattctgtagcaggacctgggagtataaaagggaataagccatagccctggctttcaaggagctcaagttcaaagaaaaaccaccaagcaaggagcatgatacaatataatgagtgcagcagtaaaaaggatgcacatggtcaaaagatagtacagagggacaaatggcaaggagtgtgtttggggcaggggaggtggcacgtctgtgcctggcactgcgagttctggcaggtgacagcaaataggatagaaagatatgaatgtctaggatatgtaagaaattataatattgctaaacatgcaaagcaaggccgagacagtggtcaggaatgacgctggagattgtatgccaagctgaagaacttatactttattctgaatgcaccagatgtggggaaaaatgaattcaattttgaacatgttgagtctaaagtacctatgagatattcagatagggatgctcagttgccaggtgggtgtacaggactggagctcagccaagggtttttaataggagatagagattgttttgagtcatcagtaagtgtataatgcgtggctgatccataggaggtgagatcacacagggagaggttacatggcagcatttctcaaagtgtggtccttgggctgcctgcatcgaaggggctttctaaggatgcagactcctcaggcagaaccccaaacccactgactcaggaatctctgggggtggcacctggaaatctgcattttgaatttactccctaggggatacatttacacaaagcagttccataactacaggtgtggagagagaggctaagaggctaaaggagggaactaagaagagagagacctgatcatttaggggccgtgtccttctcccttcaccctgtttcttgatggactggacctaagctctcttctgttccctttctgcttgttctcttggcaagctgatctctagatctctgaggctggtatttgaattgacatagtctcattagctcttgtcccacatttccacctgctttccagacactgctaccaaatggaactcatctcctcccaaacctccttctggtaaacaataaccacctcctagtccttcagctccagccattgcaggtcaactgccaggacccattgtttckttgttgttgttgttgttgttttttgtgtgatagcttttcacattcttccattcctcttcctttctactgccagtacctgattgagcctatccctacctcctccttggactgctgcgctatttttttaacagatgtccctgactccagtctctccctcgtctttaattcacataactgattgttgacaacattggcttcctgcgcactgcataccattgctcagagatgttcggagtcaccatattactgcacaacaaccttcatcaccttaacctgacacctaaatcccatcatgatctgcccaaaatccccttcccaatctcatctcccactcttgcatctcgtgcatcctaagcaatagctgcacagctttgtctttgtacatgccagcctctgcccagagtgtcctgaactccacgtcttccccatcctttaagacccagttcacatgctatttccttcatgaagcctttcctattccccagcccacatccccagaggtcatttatcctttattctccccaaagcatattttaggtctgtttctgctgcattcattttttcctatctagtattagagggttttttttttgtttgtttgttttttgtttttttaatgtctcgcctttccctctatgggagcaatgaaagagggactgaccatcaggaacattaggtccatcacttttaactggatgatgataagggaaatgatttcatttctctgcacctcagttttctcatctatagagtgagataataatgtctgcctcatcagtagaaattattcatgtgaaggaaggggaagataaactatacaaggcaacaaaacaccgtagtgtcaggtatgaaggagacacttaataaatctgtactgaatccatgagaaagggtatacttctagacagctttgaaccgttctgggaatataataattaagtgatagaatgcaaggaagaatttagttttgggattacctgtttttattttagtgaaaagtttcacagatagaccttttacttccaacaacttcaaggcttaattttattttttaagcctagggttcttttttctttctttctttttattttattttttcatataatcctgaagcttttcactctatgtggaagacacacgtggttgcctgctgcctatctctggtgccttcttcctcagttgtagaactctgattttatttaggcagtactgtacctgcccaagaaagtaaattatgattggtttaagtcagttgcagcaaatcagtcatgtttccagtggtggtcatgtggcccaatgagataaaaggtaaaacttggagacttctgagaaagtgtctcctttctcataaaggtgtgttccatgggaagaggtggtccatttcctttccctcttttcagccatatcctagtaggatgggatgctttaggtgggatcaattagagtgatgtcttgcaagtaaggaagtaaactggctttggaaccactgacctccagccttattgagaggagagctgtctttatgaagacacctttagcaaggatcccattacctacagctaacagcatcttagtcatttttaggaagaatttagttttgtgatttccttatgtgttttatcacagtctgtgtatagatcttttaaaaataattcaacagcttcaaagtgtaagttaagaaaaaaacaaataatcttttgtcatagaattctgaggattttcgtttgtatgtatgagatgaatttgaatttttaaagaatttcttttggaatatggcaatatcttcagcttgcattccacttgccctaggtggtacacttcatcaactttcagaagctgctgattggttttgcttatcttttctttaggagacatatactgcctggactgcctggctgatgtgagctagtttgtctggttgagttggatgtttaaatagaaggcagaacaacaacaggtaagatttttaaaaatatcctttaatttctttgggctctattgacattattacattcattacaaacttctggatgttaagtcctgtgtttaatagccagagaggggaaggtggtgggcagctgggagagtggtgactaacaagatggcaccaccgggttcctgagtttgagggttgggtaaagccagggcaacgactgggatggccaaggagagcaagcagtagaaactcaggtccaaagggcattaggcgtgaaacctaacctgaccaccctatttcatattgcaacttgcccctctacccatgctgtcctctactgcaccccattttcccttacctggtgttcttaaccttttttctttttcctgtggatttcttctgcagtctggtgaagcctgggattgccctctcagaataatgtttttaaatgtattgaataaaaacacataagactacaaaagaagctaattatattgagatacagttactaaatgtgtatttctttattgatacaattttgagaaacagttactaaatgtgtgtttctttattgatacattaaataacaagatttaaccacaggtccaatagctacaaaatagtgatgaatgtaaacaacagttcaagaaatctgcaacaattgtcaatctgatacaaaatgtctgtgatttcaattggtaacaaagttataggtattgctgtggcttctgaggttgttagcctacagtcaggtttgaaggtttaagattaatgaaaataaacgtgccatttttccccctatccaagttcacagatcccctgaattctatccatgaagatgctatgagtctggaactccaggataagaatccctgctcttatcttattctgctatatctgcatagtatttattctcttctaacatcatttattatttacttatttttaaagttcatttttatggtctgattctttctattagaatgtaagtttcacaaagtcattgtctgttttgttcactgatacatttcaagtgtctagaacagtgccttgtacttacttgtggctcaataaatacttgttacatgagtaagtccagaatgcaccagcatctgagtctagacagaggagccaggcccatggtccttctgaatgtggggcaccatgcagctgcacccatcaaactgcccaccagccaattctcttgtactttggagggagccagactgctatgtggaggtggacttggagacactgagttctgcccatggcaccattgggattggatgtgtggaggagaagaggaaaggcttagggctgggaatgaaaaatgcacatggcacatggaatggccgtgccctagggttggcctgccccagactggggccaggtgttagacaacagttaatacaaaatatgtttagacaaatagatcgggcctggactggggagggcctttagtgcccagcagaagtatttacatctatttccaaaagcaatagagaagcactgaatatttttgagcaggagtccaagttggtagaatgaaagaagggctggaaataagggctataagattttgagtktaagtgcccaccttataaatcattagcaaaagcagaatataaccytttctccaattctgtatgggtgacacccaccagtctggtaaatggaggtcgttagtgtgatggggtgtcattctcactttgtttagcacccccactagatatacatattcactttttgccttttttataataatttgagaagttatagaaaatgcttatacatttaatatgtttaatctctctctctctctctctctctctctctttctttctccctttctccacagggtcttgctctgttgcccaggctggagtgcacttgcagtagcataatcacaattcactgcagcctcaacctcccaggctcaatcattcttcctgcctcagcccccaaagtagctgggactacaggcatgcaccaccatggctggctaagttttaaaacttttttgtagagacatggtctctctgtgttgcccaggctggtctaggactcctgggctcaagcaatcctcccacctcagcctcccaaagtgctgagattacaggtgcaaactatctcacccagcctttaatctttttattagtgagatatctgacccaacggctaggatctgatggtctttttagtatggcctcaaatcactgtatcctgtaagcatttttttttttttttgagctggagtctctgttgcccaggctggagtgcaatggcacaatctcagctcactgcaacttctgcctcctggattcaagtgattctcctgcctcagcctcccgagtagctgggatcacaggtgcctgccaccacacccggctaatttttgcatttttactagggatgcggttttgccatgttggccaggctggtcttaaactcctgacctcaagtgatctcccctcctcggcctcccaaagtgctgggattacaggcgtgagccaccgcacccggcctaaacatattttcttctagagtgtttttaggtctgcacacggagtcctaggtcaatgccaacaccaactcacactgagccctaactatggaatcggagcaacatcattatttaggcccatggacaaaataccaaagtaatctgtttctatgttccattatttcctcctctccatacattatacatacaacaatttccctttatcacacgtacctgtgactacgtgggaatcattctatcccaaattgctgcagcacaatctgaggcttactaaatatttgcctcagccataaagctgatagagcattagtttaaaatgcaagtagggaccatgaggatcttttgggtttcatgttgaaacattcaagctgctcttcctactacggctattactactaaatgcattatatgatttttgaaaactagaacaatccaagtctggctaattttttaaaattcccatttctttcactttcccaactgttgtctattcaccctttattctacctttaaagcaagaaaaactgaaataattatttggaaagttttttcacttctgtcaaaacaacaaaacctatatcgtttgagtgattagtcaaggacagttgacaaaaggacagtagtcaaaaagaaaaatggctccctaaactcttagagaaaagaaatcaagcttgcattgtgatcaaactaaatgaatgtacatagtaataagcaaaaattcaaatggcagaccatgtttttcttgcacctatgaattcattctgatggataagatagatggcttaggactccatattacatttgtatgaattaatagatattaggggaatgtgtaataagtgactgcatgattgactgatacaggttttggatttttacttttatttttctgagacagggtctcactgtgtcacccaggctggagtgcagtggtgcaatcttggttcactgcaacctctgcctcccaggcttaagcaatcctgccacctcagcctcctgagtagctgggactacaggcacccaccaccacacccagctaatttttgtatgtttttgtagagatggagtttcaccatgttgtccatgctggtctcgaactcttgagcccaagccatcctcctgccttggcctcccaaagtgctgggattacaggcatgaaccactgtgcctgggcttaggttttggatcttatatctgattatccacaaaaaagaacccagaaacactaatatagtggaagccattgcctcagttaggtaacactagttgtggtgacagataaatgctaacggtagcctaacacaatgaaagtttatttctcgttctgacaacagtcagcataggggtttagtgagtggccttccacatagtaattcagggacttaggcgtcccctacctgtgagtgggagcctcggaggccttcacttccagctggcagatagaaggagagaatggaggatacccccacgggagatttttacgggccaggcctaggtgtggagtgctggttccctttgcactctatgggccacaactcagtgacatggctacctctaaccaaaggcaggctgggaaatgatcacatatgatgcagctactaaaaataatgtctgagttatacccattggccaaggggaagtgtccgtgatatattcgtgagaggattaagtttcagagtatgttgtattgtgtaatatttataaaaagaaatgtgaaaatccctaactatagtgcatgtctttgtataatcctagtgaaaggtgcaggcggctgtataacccaggccccgcacatctattaccacggatttgggtatggaggcagtggcagagacatgaaattattaactttttctttacatatctttggaatgttttgttttttttttttttttcatttcttgcagtgatctcatacttactttggaattaaatttttaggtataattttaaagtatgggtggtagtttttgtgaaatttagaaaaaagaagtgaagaagaatgtgtttgtgcatctccacactgttatatttttttcctgtgggaagatatttttcgaagtggagcagagcttgtgtgtgttccagggtatgctatatcccatagaaagcacacctcaagactgattccatgtttagcaagttatctccacattaaaactttaatttatcagtttcgtgcatatcatatcatgcacataagtgccctgaacctgaatattcctgtcctaaaaggatatacttctcattctaaatcaatatattgatattctgatttgggaaagataaagccagtctggggttttataggaatagatcagctcatcagatcctgataactcttgagtaaactggtaaaatagagttaccaaaaccacaaggctaagacctggactcctggctttacagagattcatccaatatccaccccttccaaggagagccagccagcttcacccatggtcggcttggtggtttgtttactggcctgcattatcacctacctacttgtctttattctctctgcaggtcccagaggtttgtcttttatgtcaaatttttctgtagaacttcacccagcatctagatacagtttattgacaatgaaaacaaaacaaacagacatagaacacagtgatgggaatacaggtggttattcttgagggactgcatgaagcacagttggacaaatagccagtcctctttatctgcagggatgagggcagggacagaaatcagactccctgtctgcttttactcataggagactgagtttgcttttcaytgggtcctagacttccaagtcaaccctactacatccaagtcatcaaaggatgaatgagggaggagagaagggtatactttcatccctgtcctccaaaagagatatcctggaaaatgcacttttaaagtcataastatcatttgaggcccaggtaagagaacatcaataggaaacaaagcaagatggtaaaggaaaagaagagcaataagaatgcttggtgcgaagtagggtcatgtggctgtttgtctgcagcctgcctgattcatggctaactagacaaaatgttcagaccaggtcaccagtttttagatatgtaattgaatggttatctactatgggaatggtataaactaaaaatattataaaacatctctctagaaatcctgtgtcattaatacaatttaaaaagtactaactgggccaggtgcagtgggtcacacctgtaatcccagcactttggggaaggctgtggcgggcagagcacttgaggtcaggagttcaagaccagcctggccaacatagtgaaaccttgtctctactaaaagtacaaaaaaatttagctggacatggtggcgcactcttgtagtcccagctactcaagaggccaagccaggagaatcacttgaagctgggaggtggaggttgcagtgagccaagatccaccactgcactccagcctggatgacagagcgagaatccattaaaaaaaaaaagtatttattgaacacctactctgtgccaaacaccgttttactgagtggcaaacaacagtgaacacctttgtagtgaaaggcaagacagagacccagaaaaaacaaacaagggagtgtagtttgtgatactggggccaaatgaaagactcttgttataaatttgatggacttttaggggatgggaagatcacaatctgctgaaagagtcaaagaaagcttacatgttgagccaggcatttagggatggatttgatttacaaaagcagagaggaaaaggaaacatatttcatatgagattgaatagcataataatgaaaacatttacaaagtgctttacagtttgcagagcattttcgcattcatgattcagagtgaaaataagccaagcttttcagagccaagtgttgagaccaatctgacttagtagaaagtaatcattccttcttacctctctctcctgtcttccctttcctgatcagggttcacggtttcatattgacttcttaatccaaagcccttttataggggatttcttctacaaagaagtggcaaagagaatgagaaggctgcatttcttaaagaaaatgcatcttaatgcttgtatgggtgtgtgtatggtgcacgtgcatgtatatgtgtttgctaacagttggcacaagacactttcttttttttttttggtctgtttatttgagatggagtttcactctgctgcccaggctggagtgcagtggcatgatctcggctcgctgcaacctctgcctcccgggtttaagcaattctcctacctcagctcccaagtagctaggattacaggcatgcaccaccatgctggctaatttttgtattttcagtagagatgaggtttcaccatgttggccaggctggtctcaaactcctgacctcaagcaatccatctaccttggcctcccaaagtgctggtattacaggcatcagccaccacacccagccaacactttctatatgggatgaacaagacattttgtgctttataatcccagtgtagatatcttctggactttgaagaacttcccttttctagccaatcttctgtcttctccctttcttttttttttttattatactttaagttttaaggtacatgtgcacattgtgcaggttagttacatatgtatacatgtgccatgctgatgcactgcacccactaactcgtcatctagcattaggtatgtctcccaatgctatccctcccccctccccccaccccacaacagtccccagagtgtgatattccccttcctgtgtccatgtgatctcattgttcaattcccacctatgagtgagaatatgcggtgtttggttttttgttcttgtgatagtttactgagaatgatgttttccagtttcatccatgtccctacaaaggacatgaactcatcattttttatggctgcatagtattccatggtgtatatgtgccacattttcttaatccagtctatcattgttggacatttgtgttggttccaagtctttgctattgtgaataatgccgcaataaacatacgtgtgcatgtgtctttatagcagcatgatttatagtcctttgggtatatacccagtaatgggatggctgggtcaaatggtatttccagttctagatccctgaggaatcgccacactgacttccacaatggttgaactagtttacagtcccaccaacagtgtaaaagtgttcctatttctccacatcctctccagcacctgttgtttcctgactttttaatgattgccattctaactggtgtgagatggtatctcattgtggttttgatttgcatttctctgatggccagtgatgatgagcattttttcatgtgttttttggctgcataaatgtctccttttgagaagtgtctgttcatgtccttcgcccactttttgatggggttgtttgtttttttcttgtaaatttgtttgagttcattgtagattctggatattagccctttgtcagatgagtaggttgcgaaaattttctcccattttgtaggttgcctgttcactctgatggtagtttcttttgctgtgcagaagctctttagtttaattagatcccatttgtcaattttgtcttttgttgccattgcttttggtgttttagacatgaagtccttgcccatgcctatgtcctgaatggtaatgcctaggttttcttctagggtttttatggttttaggtctaacgtttaagtctttaatccatcttgaattgatttttgtataaggtgtaaggaagggatccagtttcagctttccctttcttaactcaaagtagacctgttcctcctcactgtttcaccaccccgcctccctttcacacctctcctggttctgtccactcctctgcctacgtaaccaggccctactaccacccttctgttttcaggccaagccctacctccttcacaagctcttctccagttacaaatgcaactgattatcatttgcacccctcttcatctctgcagtagttcttaatttcgtggggggcatattatatacccttaagaatgtgatgaatgccttggaccctggacacatatacacaaaaaatatgtgtctaatctcaggggatcatgttcccctgaaaacattgcttttctagatcacatttgtttagaacaaaccatatacttcactgccttaaaatatacttttatatcattttgcctaatatatatcttcataattagactaaccttgaggagaaagctgttgtagaattttttggtatcctcatagaacttggttaaatgtagagcacatagcggtatttaatggaaaaggaatgaataaaccaactagggttcatctatgcaatggcatagcattcagtgataaaaataagctatcaagccacagaaagacatggaggggccttaaatgcatactgcactgtgaaacaagccaatccaaaaaggctgcatactgtgtgattccaactatgatattctggcataggcaagactatggagacatgaagaagacagtggtttcccaggatctgggggagacagaggggatgaacacgtggagcacagatgattttcaggccagtgaaactatcctgtctggtactgcaatggtggatgcatgtcattaaacatttgtcaaaactcataaaatgtacaacacaaagagtgaaccttgatgtaaactatggtcttgagttaatgataacatatcaatattggctcattgattgtcataaatgtaccacattaatgtaagatgttaatgatagaggaaactggaaggagggccaggtttatatggaaatgctgttttctgctcatttttctaaaaatgtaaaacagctcttaaaaaataaagtctattaatctaaaaaaagaagagaagtttccgattttggctgcagcctctaatgaccattgggataaagaagaggcaatgccttaatacaatgcatgtattttaactttttgaaaattgtatccgtcattgttaagctcagttaaacttgcgcttgacatgtcgacacaatgtccatttttaaatgaactaacagaattggtaagatatgctctcatgatagagactcagccaattctaatgtcaatgaaaggctccacatttaatgtacacgtttcaacatgaagaaaatccattaaaatataattagcgagttttacacataaatagaaagaaggcctacctagaccttgctgccatttaaaagagttctttcttctttgtctgtttttgtatttttcacagaagctttgaggaagagccataactacctggagcagaatgattatttggagccacagaaaatcattttagggagcagtgggtccaggttcagtgttgtgtgttcaactcggaaagaacacagttgggtggctgaccgggttacttctcccctgtggctctgcttgcattggtcattgaggtcaggcaggggtttggccacagtgttagccattggccctgcattgatcctcacatagtaacatcttgtttggttattaaagtgactgaattgttggaatgaagcattgcaaagtcttgttattccatccatcttcacaaagactataaactaacttcaccatgtagtgactcagctggttggctagaaagtaccttgtaagatggcctattctgccaacatttcctatcccaaacaaatctcccaactctcaccaactctttacattcctgtgtagtctttagggtgaggggctgggagtgggatggaggaaaaggtagacgaatgaagtaaagggtcagtgcacaggcagtaagtactgctgaccactgtaatgtccactcacagctgagatacagtgttcaaacttccctcaaaaaagccacactgccctcagagtgactccttggaccccagccatggatctggccacagcattcatttgattccatgcattacctccttgaataattataaaaattatgttttccaaatagaacaaagagatgcttcctgaaattcttctccttggaacactcatgatatgcattcaaagtgcttagcctgggggtcgccattgtgtacacacaataaatcttagtgtatcaagaattcaggcagtcatgaagctcaaatgacaagaatttttatttttattttttttaacagacagaagtcagggagggcagtcattgcttagacaatgagattcaagcaagtgctgttctaaatctctgagctctgtaggggagaagatggatgaagcaggcagcttgaagagggagacacgccagccagaaggaaaagaaagaagccggtgaagcaggaagagaagaaaacacgaaagggtaggaagatgagaaatggatgccaaggagagggagaaagagattgtcagcaagggaggcgaaccgaggagaaaacagggagattcccgcatgggtggagccaagtttccactgtgctgtgagcagaggaagccaggtgtattgttcctgaaactacgttattaactgcctaacatatggctcacaaggtacacgtggaagcgagagcaggaaacaaaatgcaagtcagctgggctaacgctgaaaaatagtgatctgtgtcagttttgagaagtgtgagaatagaaaccttctatgcaggagatcagcatctttgtctgtttcctacaccgaggctcaaagagaacatttgctcccaaaccatggtagttctgtttcagataaagttgtctcataccaaccataattcatgttcctgatcgtgaccctgaagcacaagaacccaaggaagcttcggaattttcaaagaaaaatgaattacgtagagtggtgtgaccagcaaatgcagtttgaattttaagtgtgtattctaattttttagaagattctgattccgtgtgtgaaagattgaattaccctccattttctaggatgtggcccatttgccagccagtctggacctcagatcttagttctggttctgtaacttcagttgcctgccagacatttccatctgggagccctgtcctcactctgaaacattctcagaaccagcctccttctccacctgccgtcagacattagcaccattcctctcccattgtcacctttgattgtctcttctttacttccatacactgcttttttttttttttttttccgacagtctcactctgccacccagagtatagtggtgcaatccctggtcactgcagcttccacttcctgggctcaagcagtcctctcaccttagcctcccgagaagctgacaccacaggtgcacgccatcaagcccagctaattttttttttttttgagacagtctcactttgttgcccaggctggagtgtartggcacaatctcggctcactgcaaactctgcttcccgggttcaagcaattctcctgcctcagcctcccccaagtagctgggactataggcgcacgctgccatgctggctaattttttgtattctagtagagatggggtttcagcgtgttgcccaggttggtcttgaacttctgagctcaggcaatctgcctgcctcggcctcccaagtgctaggactacaccatgcctggcctaatttttaaatttttttgtagagatgggtttttgtcatgttgctcaggctagtcttgaacttctgagctcaaaagatacacccccctttggcttcccaaagtgctggaattacaggcatgagccaccacgcccagcccaatatgctgccaaatttttcttcaaatgatttcctagttccttccttgccattcttgctgccctgaattaagcccaggtcctcatttattggcttcccacttgactccttctattttagccagcacacatgttgtagaacaacttccttaatgtggctttcacttggcttctgactcagagtgtatgaggtctcctaatttcctagggcagtaggcctggccctaccccacaagcctcattaccgttttatctgcccatatcccatcaccctctatccacatcttgttatccagtggagagtttccacttctaggttccaagccagaaatgtgtggatcattctgtcttccctcacttccttaaacaacccgtcggcaagtcccacagactggatctccagagtttccctgtagctcttttctccatgctcaccaccctagtttagggcaatgccaccctttattgagactctggaagaacctcctgacagttcctgctcccctctggccccgtcaatccattttctacacagtggcccagaatgtttaaaaatgcaaatcaggttgtatcatgcctccagtggcttctcattgcacctagggtaaaatccaagatccttatagtagcttccaaggtcctgcatggcttatcctctccctccctcctcgaagacctcaatgcacctgactgaactgatctcagcacgtttccacctctggccaggctctctacctaatgaccctcctccctgctttttgatccattccacctctcatctcctaggtcttggcttaaatatcttcagagaagcccttctggacttccttcagtagtgtcattcccacttcccgccactattcttattacctgtttatttccttcatacctttttatcatttgcaatgattgtgtttgtttcctcatcttttttctgcctcccccagacctgaagctccgaaagaccccggagtgtttgtcttgttaaccatcgtttctccagctgtccacgcaatggtcaatatgttagctattataattactattttaatattactgtttcttgatgatttcagactctttggatagaatattctcccttctatctgagagtgtttgtgaccttctcatatttcctcatgtcctctggaatcctgacctaaatttttagtcttttcctatcagttatcaattgcttacttgttgttttcatgtttaaaaactcattcaactccatccaaactttcttcttcttcttacaaaatagtttatagctaactatatttccttactctcatttgttccttccctgtattcagtgtctccccatcaatatcttttattactccagaataatttcagaaacagtttgagacagttttaaaaataatgccgctggcattttactagggatgacattaaccttatcagttagtttgagggaaatcagtatctttgcaatatcaaaactcttcctaatcaaggacagaccacatttttccatttatgtgtttttaaataaaataatgttttctttgtattggctttttaacattattgttaaattccccttcaacatttaactgtttcactacaatatgtctaaatctaggtctgttttttattaatttgggctaacatatgatgagctttgatctacaaatgcaggtcttgcttcaacttaaaaatattttcttttctaatatctttaaatagctcttctgttctttttttctctctccttyaaaactagatttctatcacctgtctttctatgtctagaccttgtttctgatagttttgatctctttgtcctttttttttcttttttgtgaggcaggttcttgctctgtcacccaggctggtgtgcagtggcacaactcagctcactgcaacctctgcctcccaggctcaaacaatccttctacctcagcctcccaagtagctgggaccacaggcacttgctaccatgcccagctaatctttgtccttttcttttgcattacagaatacagtcctatgcttagctttcttttcactgattgaattatcttccattgccagttgtaaccactgtggttgctaagtttatttacaattcttccatgtcattattattattatttgatacagagtctccttttgtcacccaggctagagtgcagtggcctgatatctgctctctgcaacctctgcctcccaggttcaagcgattcttctgcctcagcctcccaagtaggtgggactacagatgcacgccactgtgtctggctaatttttgtatttttagtagaratggggttttaccacattggccaggttggtctcaaactcctgacctcagatgatccacccaccttggcctcccaaagtgctgggattacaggtgtgagccaccaygtccagtcacattattttcttaactgtgtcaactctctcatatcactttgttggcttatctcattcttaccttttatttcatggagtctgagatttttatctgtccctccatcaaatgtagtttaaatattgttttaagtgttgttcaaatgtatttccattttctacagtaacattttttctttaaaatattcaattttaacacttcttgagtgctaygtgtatccattttctcgttacagaatagttgcataggttacacgtgatatagtttggctgcatccctaaccaaatctcatcttgaactgtagctcccataatccctacatgttgttggagggacccagtgggaggtcattgaatcatgggggtgtgttttttccattctgttctcgtgatagtgaataagtctctagagatctgatggttttataaaggccagttcccggctgttcgcagtggctcatgcctgtaattccagcactttgggaggctgaagtgggtagattacctgaggttaggagttcaagaccaacctggccaacatggtgaagccccatgtctgctgaaaatacaaaaattagctgggtgtggtggcgtgtgcctgtaatcacagctactccagaggctgaggcaggagaatcacttgaacctaggaggtggagttgcagtgagctgagatcactccactgcactccagtctgggtgacagagtgagacttggtctcaaaagaaaagaagaagaagaagaggaagaggaagaagaaagaagaaagaagaaggtggtggcagttcccctgcacatgctctcttgcctgctgccatgtaagatgtgctcctcctttgccctctgccatgattgtgatgcctccccagccatgtggaactgtgagtccaataaacctctttttctttacaaattacccagtctctggtatttcttcatagcagtatgaaaatgaactaaacagtaaattggtactggtaaagtggggtactgctgtaaatatacctgaaaatgtggaagtgactttggaactgggtaacagacagaggttggaacagtttggaaggctcagacgaagacaggaaaatatgagaaagtttggaacttcctagagacttgttgaatggctttgactaaaatgctgatagtgatatggacaataaagtacaggctgaggtggtctcagacggagatgaggaacttgttgggaactggagcaaaggtgactcttgttatgctttggcaaatagactggcagcattttgcccctgccctagagatctgtggaactttgaacttgagagagacgatttagggtatgtggtggaagaaatttctaagcagaaaagtattcaagaggaagcagagcatgaaagtttggaaaattttcagcctgatgatgcaatagaaaagaaaaacccattttctggagagaaattcaagcctgctgcagaaatttgcataagtaaggagcccaaygttagtcaccaagacaatggggaaaatgtctccagggtatgtcagagacctttgcagcagcccctcccctcacaggcccagaggtctagggggaaaaaatggtttcctgggccaggcccaggcccccactgtgtgcagcctaggaacttggtgctgtgagtcccagccactccagctgtggctaaaaggggccaaggtaccactwggacttgtggcttcagagggtgcaagtcccaaatcttagcagcttttacatggtttgagcctgcaggtgcaaaaaagtcaagaattgaggttggggaacctccacttagatttcagaggatgaatggaaatgtctggatgtccaggtggaagtttgctgcaggagcagagctctcatggagaacctctgctagggcagtgcagaaaagaaatgtgggtttggaacccccacatggagtcccctctagggcactgcctagtggagctgtgagaagaaggccaccatcctccagaccccagaatggtagatccactgacagcctgcaccatacaccaggaaaagctgcagacactcaactgggaaagcagccagaaggggggctatacccagcaaagccacagaggcagagctgcccagggctgtgggagcccaagcttgtgtcagcatgccctggatgtgagacatggagtaaaaggagatcattttgtaactttaaggtttaatgattgccctattggatttcagacttggatggggcctgtagctcctttgttttatggccaatttctcccatttgaaatggatgtatttacccaatgcctgtatccccattgtatctaggaaataactaacttgcctttgattttacaggctcataggcagaagagatttgccttgtctcagatgaaacttaggacttggacttttgggttaatgctggaataagttaagactttgtgggactgttgggaaggcatgattgtgttttaaaatgtgaggaaatgagatgtgggaggggccaggggcagaattatatggtttggctgtgtccccacccaaatctcatcttgaattgtagctcctgtgtgtcatgggagggacacagtgggaggtaattgaaacatgggggtgggtttttcctgtgctattttcatgatagtaagtctcatgagatatgatggttctataaacggcagttcccctacatatactcacttgcctgccaccatgtaagacatgcctttgctcctcctttgctttccaccataattgtgaggcctcccasccatgtgaaactgtgagtccattaaacctctttttctttataagttactcagtcttggtatttcttcatagcagtatgaaaatggactaatacaacatgtttgtttttccctcttaatatattttggaatgaggaaagatctctcttgactatgcattcccccaaaagtaatgtgaatggatttcacagcttacctgaagtcaattagaataatccttttccatcttgaattggaggatggaatgagataagttcagtgatccatcaggcagatgggtgtagcagggatcctggtggtgctgggggtgtcctaacagcaatcctgatcacagccatcagtggcgctagccaggtgccaggcctgatttggaacattgcatgtgtgtttccttgtttaatcctcacaatcactctatgaggtatatatattatcatcattcccactacatagatgaggaaactgagggctcagttaagaaagttatccaagctaataattagcagaataagcattcaaacccagactatctgactccagaattcatggtcttaacttttatgttatattgcctcacttgctcctgggcctggggctccagtgccacagcccccaaggtaggagtgcttcctgttcctcagtgggctcaacctgagggttcagtgggatggaccttccactttcatcccatgacacacaactctttgaagtgagttgaattgtgagtcttccttctagttcctccttgtcttaatatctagaatgaaagtctagaacacatccctagattttctttctctctctttccttccttctttccttccctccctccctccctcccttctttttctctttctttctttctttctttctttctttctttctttctttctttctttcttctctctctctctctctctttctttctttctttctttctttcttgtctttctttctttcttcttttttttttttgaaacagcctgctgcccaggctggagtgcagtggctcgatctcagctcactgcaacctctgcctctgggttcaagcaattctcctgcttcagcctcccgagtagctgggactacaggtgtgcrccaccatgcttagcaaatttttgctttttttttttttttttttgagatggagtctcgctctttcacccaggccagactgcagtggcgctctcttggctcactgcaagctccgcctcctgggttcacaccattctcctgcctcagcctcccaagtagctgggactacaggcgcccgccaccacgcctggctaatttttttttgtatttttagtagagacggggtttcaccatgttgaccagactggtcttgaactcctgacctcaagtgatccacctgcctcagcctcccaaaatgctgggattacaggcatgagccactgtgcctggcctatgttattttattttattttattttattttattttattttagagacagggtctcactctgtcactcagtctggagtgcagtggcacaatcttggctcactgcaatctccacttcctggattcaagtgattctcatgcctcagcctctcgagtaactgggattacaggcgcgctctaccatacccagctaatttttgtatttttagtagagacagggttttgccatgttgcccaggctggtcttgaactcctgacctcaagtgacccagccgtcttggcctcccaaagtgctgggattgcaggcatgagccaccgtgcctggcctgtttttattttggtatttttaggagtttctaggagctggggattgaacacctatgctctgttcccctttttccaggtctctccctctgccctgtctccctctctgtctcctgcttcctgaaacactcttctgccttgcctgccattctgcttcattatctccagggtctctggctgtgccctccccatcctccctctcatctgtctgcaccttgattcccccttggctccattctcagttgttcttttctgtctccgccctccttggtgacctcacacactctaaagctttcaccgccatccacactggtgtgtggtccctggcctcagcccagatgtctcccaaacttcctttgaacagtgattrtctgccgaatgcttctacctagggggttcacaaactggacagcacacactcccatatggaacactgcactggtcaccttttctcattgaatgtgccttccacttgctggggagtcatcctggattcctgcctctggtctggccactctgcagtccaactgccctccctgctgtgggcagatgatctctcccttcctcgagtcctccaaagcctccagcgccagctcttccatgtggtctcagaggtcatcagggatttgatcacttttcacctcattgaactttgctctttgctggattctgtttcctgctctgccacccaggctggagtgcagtggcacgatcatagctcactgtatccttgaattcctgggctcaagtgatcctccagcctcagcctcctccagcctcagcctcctgagcagctgtgattacagaggtgtcccaccacacctagttaattttttttttttttagatggagtctcgctctgtcaccaggctggagtgtagtggcgcaatctcggctcactgcaacctccgcctcccgggttcaagtgattctcctgcctcagcctcccaagtagctgggactacaggtgcccaccatcatgccckgctaattttttgtatttttagtagagacagggtttcaccatgttggccaggatggtctcgatctcttgacttcgtgatccacccacctcagcctcccaaagtgctgggattacaggcgtgagccaccgcgctcagccaatttttttcttttttttaaagacagggtcttgttgtgttgcccaggctggtctcaaactcttggcctcaagcgatcctcgtgcctaaacctcccatgtattttcccagctttctgcacagcttggagttccctgtgtttattttccatggccttgcccctgtctgctggtaaatggccttctggggaggggaataatctctgctctttagcatttgctgacatctgtggtgtaaatattcccatcaccgccaatctcaaactactaacatgacttcattgaatgtggagttgggtagagatgttcaatagccaccattagacagtatttccaccttacagatacaatagacctaaaacaaaccctcagccaggtgtggtagcttatacctgtaatcccagtattttgggaggctgaggcaggtggattgcttgagcccaggagattgagaccagcctaggcaacatggcaaaatcccatctctacaaaaaaaaaaaatgcaaaaattagccagatgtggtggtgcatgcctgtagtcccagatacttgggaggctgaggtaggagaatcacttgagcctgggaggcagagattgtggtgagctgagatcacaccactgccctccagcttgggtgacagagtgagaccctgtctcaaaaaaacaaaaacaaaaccctcaagggcatagataatagtaaatagtagtaaaataattagggagtgatatatttttagcatttattatctttagtattttgtattttagtatttataacctttatttttaatataatttatttaattgtaaacttacataatttaattattaataatgaccacatgtaacagcttgctggcaaaattcctgaacacttagcgagcagccctcctgagctggtttgagctagctccagcgtgctcctggctccccttcctagagatccctcatctccaccgacatctggtcaatacttatccttcccttaagtcagctctgctcacagtgggagtgtgtccctctgccactccatcactgctctccccacattgcaatgatctatttacacacctgtctcacctcctattccatgaacttcttgagggcagaggctgtgtctcatttatctttgtaatcccagtatagtgcctggaacatagtacacatttggtgaattatgatttaaagaattgatggtgccttttctgttagcactattcttttctcatctatctctatttctaatcactttgggaaatgctcttggctgcatgatgaaacagagtgccaggtcttcataaaaaaaaaaaaaaaaaagcttgttgattgggtaaactcaccaagctgactagagcagttttaagtataaattgtttactcatatactgcctgtggctatagaatgcaaattaatcactttggcaaagtgttgtattagagttctccagagagacaggaccaataggagataggtagatagatagatagatagatagatagaaccaataggagatagatgatagatagatagatagatagatagatagatdatagatagatagatagatagatagatagatagatagaaccaataggaaatagataggtagatagatagacacaaccaataggagattagatagatagatagatagatagatagatagatagatagatagacagacagaaccaacaggagatagatacataggtaaatagatgataggtagatagagatagagagttatagatatatgagaagggatttatttggggaattggctcacaaactatggaggctgagaagtcccatgataggttatctacaagctggagactcagtgatgctgacagcatggctcagtccccgtctaaaggcctcggaacctcagaaccaggggagctcatgctgtaactctcagtccgaggctgaaggcttgagaacttgagggggtctgctggtacaagttccagagtccaaaggccagagatcttggaattctgatgtccaagagcaggagaaaaagggtgtcccagctccgagagtgagtgtggattcacctgcctttttgttctatccaggtccaaagctgaatgggtggtgcccgtccatgttgagggtgaatcttctccactcagtccaccaactcacatgccagtctcttctgaaaacaccctcacagacacacccagaaagaatgcttcaccagctatctaggcatccsttgagccaatcaaggtgacacctaaaattaaccatcatagtgataatttaaggcattaaggacatcatttcatgtcctgcagctctttaagcccaggcttggtcattttcaataagtggaaattaacttttttttttttttgagacagggtctcgctctgtcacccaggctggagtacagtggtgtgatctcggctcactgcaacctctgtttcacgggctcaatcaattctccaacctcagcctcccaaatagctaggattacaggcatgagccaccaatgcctgactttttttttctttttggtagagatggggttttgccatgttgcccaggctggtctcaaacttgtgagctcaaaacaatcctcccactttggccttccaaaagggattacagaggtgagccactgtgcccggcctggaaattaccattctaagtcatctttgtgactgctgtgactgccaggaaatcagagtagtccaccaggaagagttatctcttgggctgaacagaacagtggttgagtgtctctggtgtgacaggtgctatattcgccatggggatagatgaatggaaaggaatttgtaaaggtattgacaatgttttttgagtttttaaacaggatgcttgtcattttaatgacacagactctaatttctaagcatttttagagggatgcatatttttgtatactattaactgcatagtcttctttcttagaatgcctaatttaccagacattgacagaactttagctcaagcctcactaagaagacgtagcagtgcacgctctgggattattttatacttcactaggatgacttatttatagaacagaatctttttgctttcctacaagattcaacagttctattaagcaacagcaaaagaaacagctacttctccagagcagacttcaatcttaagcaagatttatatttcaaaaataaatatttaaaagcaaatcataacagagctaaaaccaacaataccacatatacccaaactatgccagtgagtctgggtccatatcttgtaggaattatatgtttctgaaaacctagagagattttattctctccctaaagaaaagtttaaggtcttattctatccatacacacacacatcagactgaaaagcaaaatcagaagactgagttcacctgaatttaattcaaattcgaggaagtagcatttgaaatagcttattttttgactggattcaacctgaagtatattgtgatttctcaatatctccttccacagggaaacattatttcttgcctatgatgggtacaaatctatatatactctgcacatacagtcactctttgtcacacttgataatgggtcacatttgtggtgaacagatgtttcctgagagtctgagactcatgagcaaagccgtggtgtgggtaagagggatgagctgttctcactggatgcttcaaaaggggctgtgcttacaattagtctgaaagccaaattatccttattgaagaaggacaaaatggcatgggcaagctcttatctcctgtcttaggacagatgctgcttatgaaaattgtctgtacctgtctttgatgattctggactagaaatggttccctggcatgactgggtgtcttagaaaggacactgtggagttaacttctggaaggaaagtctaacatgatctgcaggctcaataacagataaagggaaaaaagaagggaaagaagacaaaaggaaaggagtttttcactctgacaagaaccacatgagtgactaaccctaaagatggaaatagaaaatgacctttggtgagggatattttctgaacattcaaagctggatttgactgctttataacatttcaaatggcatggaatgtactctgttgtgaatgagaaatgccccctttaaaatgagcaaagccttaagttagtctacatgacagtgactctggccaggtagaatatttcaaccctgcacttcctggcctgtaccctttcgagcaattgcatttcataaatttcaggagcatgcctgaagcagatggttgagacatgggaaggatcataaatccgggcctcaatgtcttccagctcccaaattcaaggctctgaaatgctggccttggcacaacttggcatccatgccatggaacagtcttccacaggtggtagttcagtatcttatgtttagttcttattgccgtccttgaaaagcagcagtatataggaatggtaaaagacctctctttttcttgtgtgccataaaaatagctagatagaaactctttccagagcaaagaaaagtaggttgaaatgttctacactttgtggttgaggctgaattccgactgagcaaatacacacaaatgaggggagacaatatcaaccccacaatgttggggtgaactcctcggtgacagatgaagaaacaaacactctcagtgcagttatcctcatatcagatgctttaccctgaaccaaacgtttttccagaaatttttttctctgttaccaaagtaatacacattcattctagatttttggaagttcagacaaacataaggaagaaaatctcctttgcttttcctgtacatgtacacgtggaaaaacgtcctttgccttgggtcgtgttttgtggattatgcctaattaaagacagtactcttcttagagaccagtatcaaaatgagttgaggggacttgcaagaaggaatgaatggaatgtattcatttctccacattcctatccccagtttttggggaaaggtggtgagcccctgtgtcttgcattgataacacgagaagtacctgagagtttcctgcgagaaatgagcagtcactgtacctcatctaaagtgctttgaagccaagcacggtgactcacgcctgtaatcccagcactttgggaggctgaggcaggtgtatcacttgaggtcaggagttcaaggccagcctggccatcatggcaaaacccggtctctactaaaaatacaaaaattagccaggtgtggtggtgggtgcctgtaatcccagctactcaggagactgaggcaggagaatcgcttgaaccggggtggcggaggttgcagtgagccaagaccatgccactgcactccagcctggacaacagagcaaaactcggtctcaaataaataaaataaaataaataaaataaaataaaataaaataaaataaaataaaatagtgctttgaatgcttgagaagaacctggtgggtcactcagttcatcctctgaggaggcgctcattcctgtttgaggataagagtggagaagaacattttggggaagccctggacctttcgtattcggcctttcagagaccttccagtactgggtcactgatgtcccttcaggatgtgagtaacctccactgactactgcagacctctgatcacttcctttagtgtaactcgctctgcacagccacaaaagatgggctgctgcctggctgaggaaacacccttctggtcaaggggctgaagaaaatctgttgtccgcttgactgaggacgacttcctgacaaatgtttcacatggaagaataggtccaggtttccataggtttgtccaaaggtttggttatgttatatcctgcttcttttgaatgataacatccatcatagagttataggctgtggtcacctgttctcggacctttggttgggtccctgaatcacatgtaactgtttttctgtaatcatcatcaaatccaccttacctgtggctctagaactcagcaactctagaacacagggctgttagttttccagatcttctttgtaactatgttaagcattaagaaatactaggttcagggatgacaggcatacaatgtgtatgtatctttttctgccaaaatgaggtgtgaatcagttagcacatttgagacctggtacccaaaacagccaggatgaatgaggtgaagaaggcacagtgggagccctcaggtgccacttcctctccactctacaaaatcagaagtctctgttgcttgcatgttatgtggatgtggttttcatttttctggcccttttggattggctttcttttggaccgtttgtgtggcattgatgctgccttcccccagcacggcctttgcttctgcctctcctaaatgaagcaccccactgtccagatggtaccatctcttcattacagaaaaatcatctaagtagaaagaagtagcgtttgagccacattgctatgtagtgttgggaggaacagtctctatcgaccctcagctcacttcctgatcaactcagcctatggctcagacaattggtttgttttccacgaaggtttaaagtgtggagtacatggttccaaccctcaccctctcactcagtttttctgggaaaattagctggcatgatacatttcagattcaaaaagctggactctgggatgccctccccaagatggcagagctttgggatgaaaacagtgtcaggtaaggagttaagtagccttatcttggcctaagttcactgaactgaccaagcttgattgtatccagttggtcaagtggacactcaacatgactttgctggaatcacaaggtggttgttgccattggaggaaagaacagatgtggaaggcctcatacaaggtgggaaaatatagttctctggagttccaatgagagagttccaaggcctcactgaattagggccttggggaaatatgacacagattctagagctgagcaacaagasaaagcatgtctaatgagaaagtgagctccccagaattggaggatttcaagcagagaccaggtacctaggtgccaggggtgctatgaaggtagaagactggactaggtgcccagagtctctgtgtggtgatcaaacttttccaaagattgtagttcttggcactgacctggagtcctcaacagcttctgcatccttggtctcaacttgggtctggtgtcctggtccctaggtggtgagctccctgagcacagggcactggtcttgtccatcatcctcccctagcacctgtctctgtgcctttcaccttaagggtgttctacaagtgtttcctaaaggggtggtggcatgctggctcctccaaccccagctgtgagctgaaatactgtctcaaatccaaactgtctacatgatactgataagaaacaggattckaatctcaattttgctacccaaggattttgatgtaagagaatgtaaatttaaaaccaacattaggactgtgagtttgagactaaaactctggccttgctgttccatggccttaggagaagcacaggcatcaggacagatggaaagagagagagcgagacagacagacagacaaacagggtgctctgcaaagcagccagtgggcagaggagcctccatggagctcctagaacttatcttagcaattttccaagtttctaggcagcctgaccaagtaggaagaataatttggtcaattccatgaagaggttccctcttttgaaatgyatgattctaatccgcagctctttcatcaaagcaaaggcagtgaataacacagcccaaactgattttgttggtaaacaccacccaactgttttcttattagtttaccttggcaatacctctctatgatgtaattatgtgaggtttcagagccatatttacttccatcccacacacaccttatgttacctcatcttccactgccatattgagagaaaggaacacttctcagttcctgcagaaacttgaagaatcctattgggagataaggcagacattgactccaaatagttgggtggtggtgaagtgcaagtatgagaccagggcttccgtaggaggaggtcacttcagaggaggaggagaggggaagaggaaacccccaggcagccagtgaccaggaaagcagtaaagtgatggctaattattgtgaaagaaccaagttggaaacagttcacatcaatcctcagagagggttggacaattctggccaatttggtacacctgtcaaggaaagatggtgatatggtttggctctgtgtccccacccaaatctcatctcgaattgtaatccccacttgtcaagggagggatctggtgggaggtgattgcatcgtgggagcagtttctcccatgttgctgtcatgatagtgagtgagttctcatgagatctgatggttttataaggggctcttcccactttacatgctctttttctctctcctgccgccttgtgaagaaggcgcctgttttcccttctgccatgattgtaagtttcctgaggctaccccagccatgcagaactgtgaattaattgaattgcctttgtttataaattacccagtctcaagtagtatctctagagccgtgtgaaaatcggctaatacagatgggaagtcagggtctctcctgggggacagaggagcgtgcttgagacagaataggaagaaattcatacagaatcgaaagagttgctgacatgctgctgcccaaatacagcagcttcttcagacctcaggtgtcccccagaggtgccatctttgaatctaatgtgtagattcttattcagttggtctgggtagggtgtgggctttagaattttaaargatctccctggtgcttctaatgcacaggtagggttgagaagcacactgttctcaaagagtggtcccagaccagcagcatcagcatcacctgggaaattggaagaaatgcaaattctagggccccaacccagaattactgaatcagaaactctggcaatggtgcccatcaaactgtgttgtatttaacgagttctgcaggtgattccgatatttgctgaagttgaactactgcaatagagatgtttgaatctcaggatgctcccatccctgcccctgctccctgccttccttagttctccaagaaatcctgtctctgactcccccatccaggcttggaaccctggaggcttcctcgtagggctgcgtagagcaggtggggagggcaactccasagccctagtcacctgtgagctgcgtagacaagagaattttccagcaagtagaagtcaagtgtcctggggaaggtctgatttgcagagtcagggtttagttcaatgattgggcttcctggactccctcctctccttgtccttcccaatcagttgccaagcccccagctgtttcattaagaaatatctgaatcctcctccaccgatcactgtccattttctcactagtctcatgcttcagccctacttcctagattctggtagggatctcccagtgggtctcccttgctgctgtctccccccgtcccagccccccatcagctgtctttctcgacagcacttggcgcccatcccttcctcttccaccctgcttcccatgtgagcttgacacatgcacgctgcccacctgtacatgcatgcacacgtgcctgctccacaagacgccgccagcaagtcctgtggcctgtcctgtgggcaaagtccatgatcctcagcctggtatccagagacccccctgccggcccctccctaccacttcaaccttatctctcaccatcctgcttcatgaatcttgtgctccagccaaactggtatactggtaaaaccccgataagataagcaagtaaaattagagcccataaacccggaacaggtacaggcagccacggggtgtccagaggacgcagctttagtaacttcaagtgctcaggggtgggaatgggtacactccagtctttgagttaaatagcatgaaagtgagatgatgtggagaactgaactaattactcaaggactcaagaactcactgctctctctgcacctcttcttttctttatggtatttcactcattatatccttcttagaaaatctaggttgagaaatgattttatggttatttcaataaactgatatattttatagaaaatgagccaggttcttggattatggaaacaaaccttaatttatgtcaagtgttcttgcagaaagagtggtgccacctaccttcataacctgaagagcaccattgttacctgatggcagctacctaaaacacaggcagtagtacattcattcatttcagaaacatttcgtgatcacctactgagtgacaagcaggcattctcccagtcactggggatacattgttgaaccagatataactcttcttctcaaaaagcttacatctagagtgttggtagaggcaagctcactgagtaggattggggtgctgtggcaggacacggatcgacaatggatcatctctgggaggccctggagggttccttgaggaggtggtggctactctaagtcctgaaaatgcacagaaaggagcctgccttgttaggagagggtgaaggtataggatggcacagggcctgttgtaactcaggtgggtgcaggtacaagtcagactggggttcagtacagagaccaccagtacagacagggatggaactaggatcagtaaagacagggacttggctaaatgttcaaggtaygaaggtgttggccaggctgttctctaactcctgacctcaagtgatccacctgctttggcctcccaaagtgctaggattataggtatgagccaccacgcccagcctccctcactcagttcttatttctatactgccattctaggtggagactggtaccataccacctgctgacatattcccttggaggcagctgctgccaaaacttaggattatcttctacttgagggtttaccattattgggcctgtgcctgggtcgcagtgccccctttgcagacagagtgaatatttctgatttacattgttcattggagtgtggagaattgagccttgattcaagtagaaaccacgttctcagagggtccagctgggctggtgagatgaataccacacatagacggctccaatggcttcatggagctgggggaaggctcctggtggcacatgtagagcagacccctggtagcaactcagcctcctggagagagagttgggaatactgggtcagatgccatcataccagcatctcagaggctagtccctctccatccctgatccctgaactagctactgggccttggctttttagcagagggctgcaattgccaccctccagcctgttctagtggcttgtttcctatacaggaattggtgaattgaggacatacccagaatgggaccccacctgtggcaggaatgctatatgctttccaaacctctttccttttcctcctgggctggctccatttctcagcctcctttgcaattaggggtggtcatgtttccaaagagtgtgtacaccacctccaggcctggcctgtaaaattcttcctcatatcatcttctctgttttccacttgycagctggttgtggatgatccagcagaggcatctgaggttccagtggacgacagggttacaagatggaaaaagcctgaattcctgagtcactgcatggaaggctgcctactgaacacacacatttgggctgttacatgagtgacagacacacttctgtagtgtgaagctcttgagatttgggggcccctcattacaacacttatgctattcattctttcccccaactctsttcttttgtttgtttgttttttgtttgagatgcagtctcactctgtcgcccaggctggagtgcagtggcactaycttggctcactgcaacctccgcctcccaggttcaagcgattctcctgcctcagcctccctagtaactgggattacaggtgcacgccaccatgcccggctaatttttgtatttttagtagagatgggttttcaccatgttggccaggctggtctgaaactcctgacctcaagtgatccacctgccttggcctcctaaagtgctggaattgcaggtatgagccaccactctcagcctccccaactcagctcttatttctatattgccatactaggtggagattggggccctaccacctgctgacatatttccttggaggcatctgctgccagaacttcgaattatcttctgcttgagagtttctattattgggcctgtgcctgggtcacagtgccccctttgctctgtagtgggacttcctggtcctgacaacttgcctgaaatgccatttgtgatcttgctgtcaaactctggattctaacttttgctttctgagcatgctgtctgtctccttatgcctgctcccactctcactcccagtgactaggaggtgaaaaatgactgttccaggcaccaacttgcctgaaagctctaagacttgccttaaggcagtcaagccgtctgctgactctccacttttgcaaggagaactacgtctagtcatcaacatgtagccgcatccagccatgaggaggggcgggagagatttgacaacatctcaggaagtgctaacatctgacaagctgagatcatgggtgtcataaattgatagagaggctgaaatgagaaggagataggatgggccatgtgtggttagcaacatcaagagcaacttgtagttgacaacctcattgctcatcttctgctgacacatacagccaaagtctgaatggtggcattgcttcaactcccctgctgtgtgatgggggcacctgattgatgttgacacgccaatgttgggctatcatcggaggaggtctgtattaattttaacaatgaaaatagacgggttacagttaccytaaatagcatcaagtcaccccacttcataaagcccttcaatggctttcctttccttttggaaggaagtagtgcatttttcacatggtccactgggtcttagatgtcctgaccctaccttatctctcctgtgtaggccagtcctaccctttcttctgcttaatgcctcccagccatgctggtgttttctacattcttcatgcgcacccagcacagtgccaggcaccctgtacaaattcaataaataattcttggattaatgaataagaggtcaatcaggagatggctgcaatctaatgagaaaccatggagctgatatttgggtgggtgtctctaaatctaagccctaagaaaccttgctcgttcactgttctagtgtcttcccattgcctagaacagtctcccatgcccagtagatgccaaggcatttgttgaatcaacgaaatgaagtagaatgaatggataaaaggagtagtgaccagaatgagggagacttcataggcaggaccagcagggcttgctgactaactggattttgagatgagggggctgagagaagtcaaggatgatcccaagtttctggcttggggctgaagggaggaaggtacaatttactgagacgggggagatgggatgaggttaatggagaaaggaggctgcggcaatgagtctagctttagatttttcgagtctgtagcatctgtaggctggttgtcagaggatgtccagtgggcagctggatatattggtctgaaactcaggaatgacaattgggctggagagaatagatttgggagtgaacagcctgtgatgttaacaaaagccaagtgagtggatgagattgcaatgtgataggtggtgtggttgtacaatgatgtataaaatatggtccctgccctcaagactaatacaaaatcaagatatgacatagaccttaaaactgtttatgagcccatccatatctccatagcaaccttgaagcagagcgatagctctgcccttatcacaggcaggggaaacacacagatggctgctgtctcccacaagtctcccactgcaggagatgtttcctcttccccgtgggacccacaatgagtggcacctgcaaattccactcttctagccagtccaaacccgagtcttcttccacgtctcagccatggggccgaagagagggagggggacgtcagaatcagccctttctgtccaaacccccttttctctaggtcttgtctctctacaccctccactttgccaaagccaggaaggaggtggccgtaatgaccacattgccactttcccttggtctttctgtggcacgaatgctgtacgtcgtttcctgcttcctgcaactgtccgccagtggcttcagtggaaacaatcacagacctcgtgtattgagtgctccctgtgagccagagctccactaatcaggccacacgaggaattcattttcctctcaaccatcctaggcagtgtggacagttatcaccacttcacaaatgagaaaccgaggctcagagagatcattttgggttctaagattgtctaagctagagtatggaaggggtaggatttgaacacaggtcatttgaaaacaaaaagctgcatccttaagcagtaaaataaggttcctcagctaatggtcctgttgtctgcttgctctctcttatactctttctctctctctctctctggttatatctgttgaatctttttccaggcatctctttggtattgccctgtaaggctgctcttcttggtgttggttcccccaccctcaactccgtgcttcccttctcagcactctacctgttctctgtagcccacttttatccctatggctttgccccatccacaagcaaatggctctcaaaatgaaaattatttccctacttcagatttttctcctgacctctacagatctggccatctcccgagcatcttaatctgtggggccgcaagaggcctcgtgctcagcgtgcagaacactgaagccacgatagcttcctaacacttgcttccttccccgagtccctgtcgtactgtatggcactatcatgggctcactcaacagagccggacattcaggggtgatccttgacgtccccctcttcttcatccccacactcaatcagcaaccaaatactatggattctgccttcctagtggtcttaaaaaccagccctctcttgctcatttccacatccactgccttattcaggctgtcatcccccacctagctgacccgcagcctcctggctggtcctcatgtcaggtagaaagcatccaatctgcctcctgagtgatatttctagaagccaatctgatcacgttgctgctcaattttacctcctgctctggctttccctgaccctagcatgaaagatgaacttcttggtatggcccgcagtgccttgcatatctccccgtcctccccactcaccccagtttcccatgcctttgagcaagcgtcagccatgctccctccgacaagcacatctatcctactctcttctgcttggtgaattcatctgcacagtctaagctcaaatgtcattagattcaaaccttttgccgatctcctgtcctcctgtttgtgtcygctctgtgccctgcatgtatttgtgtgccatcataactataagacggacggaacttaggtgattatatgtctatttccttatcctggaaggtgagctccttgttggagagatgtggggcttatacactgggattctcatctactgccaggtccccagtgattattcaataagtgttttctagaagaaggactgaaggaacagaggagtcctcctaacctgatctcccgctctcagaaatggaacagagtccctaaaaggatcatattgaagagactggactgcattgggggtagccaaggttttcatgcttccaaagggcccctaatatcttttgtaaggaggtgaagcagaccccaagctcataccacccgtcctctttcttccctctagccactctgcaccctggaggtaaacatcagaataaacgatatcataaccgtgggctggctcggtgaactatgagtattctaaaccaagatgtgatcttagatttagtgggaaaaaaacactgcatgtaaagccaaaagattcgggcttgagcctggcctctaggttgtgttacatgtatgacctcaggtggtcgtgggacatctctgagctccggttttatcaacctgggaatgaaaagtattggtcacttacttcctggggttgctctgaggctgagtaaagttagagaatttcttggtacttgtatggtgctgaggaagctccattgtccctttacccagcatccttcatggcaaagagaatgtgcctgctgacacctctttcagcctctgtttcagcctctgcctcagtccttgccagagacgtcaggcttagcacagagcagctgggagccttcagcagagaaggaaggcaccrcttagacatctgcacgggcagtttttaaacatagggaacatgaaggaaataccacagaatttatggagtgaaagctttaaaaagaaacacaagtctgaagtcaaaacagttgactcaattctaggggagatgtctgcctggaagtaggagtgggggaaaaagacttggagtgagtggagacagggtaagcaaagctctgtggggagccctacaaagtggggcaagtgggcacctccccgcatggctcgagacggaaagtcggtcctgcctgtacacagggtagcacttaccagcattttggaaacacacatctttgggcccagctgttccacttttaagaatgtcgcttgagatagcctcatgcaagggcacaataatatatacaaggatgtccactgaagcctcattagaagttgagaaaacttggaaacaactcgaatgctgtttagcagaggataggctaaacaaattacaacacgtctgtacagtggactgaagcagcaaacggcgttatgtctctaaatatgaacaggaaacatattcattatacaataagtgagaaagaccagttgcaggatggcacaggtatgatgatcttgtttccataaaaactaaaaatatacatatgcctgtgcatgcatggaaaaatacaagaggataggaattaatttgtgaccagagtttgtcagtgggagttgggattataggatattttctgtacagttgtgtagagttgattttttcttttctttctttttcttttccttttcttttttttttttttttttgagacagagtcttgccgtatcatccaggctgaagtgcaatggcgtgatcttggctcactgcaccctctgcctcctgggttcaaatgattctcctgcctcagcctccaaagtagctgggattacaggcacctgccatcatgcctggcaaatttttgtatttttagtagagacagggttttgccatgttggtcagctggtcttgaactcctaacctctggtgatccacctgcctcggcctcccaaaatgctgcgattacagacatgagccactgcgcccagcctgagttgatttttttttaatagacatattagtaaaagaaaaatatacagaaaatagtgaaattacgggaaatatggcaactgtctgaccttcatcctagaaaaaccctgatcagtgtccctgtattgcatcacaggtaccaaaattgtaatacatccttcatcatgctactgtcccagtaaaaaccccgagcatctctcatttcttcccttccactccatcctggctaatttactgtccacaattcacagagtattgtctccactctgcgcagccacagaatggrtgtggtaacgtctccatggcatttatggtttctacaaatcacaaatcacatatgaagggctccaagaatattagaggaatgagccagttaactcagcgcccatgggggagctggcaactccccaagaaagctggacatctccaagctggccaccaacattctatagcctctccatgagcagggtgggagctgtgctgggtgcacagtgccatgtccacaggttgatgtgaggggcacgttctaaatcaagtgcctgagaagggcttcggagacctagatcctatccctaaacaactatgggacagtgtaccggtcactttccctttctgggtttctgttttcacctctgtaaaaaagagtaaggcttggtcagtgtttctcaaagcactctccttggaaaactacatctggkatatgttataaatgtccctgaagaggcctttgtggtaaaatacacttgagaaatgcagctctctgcatcgtgctcttggagatttccaatgcatattagcaggttagagtctctgaggtctggcagtaaataaacttacttatcaatgcttataccagcaattctcatgtttatttcaccttggcatcctttaagatattttttttctgagcatcttggttatacatacactgagttaagtgttatccacagtcactgctcgctccctgaatccgtgaccacgatgagtcaccctccatgccaccccctccatgctgccgggccatcatcctgcagtgttcctgtggctgaacatggattatttcaggtgacccctggaaaaaacgaagctctgttttgtgagagagaatgggttagcctctcagtacagatcccgatggaatgggatgaaggagaggtagcctactgaaaaaggagaggggtggggagtctaaaagggcttgaaatgcagccaggagcagccagatggggtggtgcagttgggggacactaagtaggagtgacatggagggacactaataagcagggaactacagaggaataattttcataatacgtctgttaaaaacagggaggcagggcaaatggtcagaaggaaaggaaggttcttggcacctgtgcggttcactatcttatttgtggctgtaactcatctcttcccctggatttaaataccaaatttatgttgatggcttccacgtttgaatataatctttcgaggaagagcatgggctttagagtcatacagcccatgcctcagtttcttcctctgtaacttggggctaaccataagatttacccgctaggtgtgtgtatgaggattaaatgagttgacacataggaaagctcctagaataactagtgtgtagtaagcactcaaatgacatgatcatgatcaattgttattattcatattttcagccatcagtgctctctggctcgacacctccactcagatgtctccagggcatctcaggcttaacaaaactgaatcagaattcttgattttcccaacaatacctcacctttcccagactccctgtttcaatgaatggcacctgatatacctgtagctcaagtttggaacctgagggtcaggtgtggtcctcctttccccttccctttcatatgcaccccaccaggaacttctgcagagcatgaacccacccccaaaatatatttcaagtccatctacttcttcccacctccctctctcctctagccaagcatcccttctctctgggtgaaggcagcagccttctgtgtgccctccctgtcttttctctcactcctttccagggaatctgcacctgtgaccacagccttctgtaacaaatgtacctgtgaccatcctaagacctgtgggggcacagaaaaggaagcccatagctacccctgctggcttttggtgtccatttgcatgaagtgtctttttccacccctttactttaagtttacatgagtccttawgtgtcaggtgagtctcctgaaggcagcagatagttagttggtgagttcttatccattctgcagttctgtatcttttaagtgcagcatttaggccatttacattcagtgttaatattgaaatgtgaggtaccattgcattcatcgggctctttgttgcctgtgtacttctttgtttgttttttgcttttgttttttaacttgtatttttgttttataggtcctgtgtgatttatgctttaaagaggttctgttttgatgtgtttccaggatttgtttcaagatttagaactccttttaccagttcttgtagtggtggcttggtaatgacgaattctctcaggatttgtttgtctgaaaatgactgtatctttccttcatatatggtgcttagtttcactggatacaaaattcttggctgataattggtttgttgaggagccggaagacagggccccaatcccttccagcttgtaggttttctgctgagaaatctgctgttcatctgattggttttcctttacaggttacctggttcttctgtctcacagctcttaagattctttcctttgtctcaactctggataacctgatgacaatgtgctgaggcaaagatctttttacaatgaatttcccatgtgttctttgtacttcttgtatttggatgtctaggtctctagatggctgcagaagttttccttgattcttcccccaaatatgttttccaagcttttagaattctcttcttcctcaggaacaccaattattcttaggtttggtcatttaacataatcccagacttcttggaggctttgttcatattttcttattcttttttctttgtctttgttgaattgggttaatttgaagaccttgtctttgagctctgattttctttcttctacttgttcaattctattgctgagactttccagagcatttcacatttctaaaagtgtgtccaaagtttcctgaattttcaattattttttctttaagctatttcattgaatatttctcccattcaatattgggggattgtgttgggagaggagggtctccctttcccacttcygcaaatggggcactcacagtatttggagtgtcttctgggtcctgcaggagcagtctggttccttcagagagtctgtgggtccttttgggattgctggttttttcttgcagttgatctggagctaaaattcaccatggaagcctccagatgctgctctgtctgaagctgcaatctagtcctgccacccagccactatgatcccctccatctctctgtccactttagtcagataagctcaaagctagaacaaaggacccatatatgagcctacggatctgccttcaaacacttgagaagccctccaactcaccatgagaacactgaccccaatcgggatctttgctttgctccaacagccagacactcagacaggtcctcagacccagcaactaatggacttggtgggatggttgtcctcaaagcagccagcattttgatcaggctggcgtctggtcctgtatttttctgggatattcagaatctcttgacatgtatcttcacttaattgtgaatttaaaaaattatagatggatgtagatatagatatagatatagacatagagatagatatagatagacattttggagaagagtctctctttgaagacttcctctcagagtacaagtccgtggttacaaccattttgtttctcagcaaacatggggaagtttgcttttcttctctgaggaagttaatataaatgtttattgacagtgcagtcatcaaggaataaagttgctgattcattcctttacactgaaaccctttgttgtgccctcctcttccttcctctttatagggagacactctgagaaagagcacattgtgggggcccactccatgtgatgtttgcttggttgcctgttcccttttctacctgcagagcacggttcccataagggcggcgagatcagcctcctgtctcatctggaagaccaccactctggggtctcagaggaatgatggaagccttggggtttctaaaattggaagtgaatggccccatggtgayggtggccctgtcagtggctctcttggccctcctgaaatggtaagtgcagccagccctagggactgtgacagcgtcagcyrtctcaccctggagccttgctggtgccatggcggggtatgtgggagtgtgtttttcttcttttctaatctagcgggagtgagtattaacacagcttcagaattaaaagcaaacagccaggttaatcttttgctaaaatgcatgagattgaagtgtcaggaaaggctggtgattcagtgactgagaacgctacacataattaagtttgaaagagatggaaaaagaaacaaattggaaaggcattaggtttgggtagaagcatttccttgaaccccgtcatatctcctcacctcatttttctaaaatcctctgtccttgttggatttacagtgaattcagcctcttggttcatattacattcaaaacaaaacaagacgtaggagctgtttggcaaatgtgggcctctttgcaggaagtcattgagggggatttctgtagggttaaggacaaagtggtagatctaatttctcatagttgatagagggagatggattctgatgaacatagtgtgtgcagctcctacaaaatttgagaccctgaaaggatctcaaacttgaactccgagttgctcccctgtggttttgttaattcaacagcaaattttcctaagsctgactctggtgtctgtaggtcgaaggcctcataatatgctacatttatgcatattcgccctgtcagttaaacttattagagttacccattcaatcaaaagcacctggatttagatggctctggcttttgagggcaaagtgagtggaaaaaataatggagractggagtccgaacagaattttaatttatgttttcagtagtaataaagccttctctagattaataactgggaaagcactttgaaaagcatcaagcattatgcaaatgtgaggtattattcttttggaatttgcatagctgagagtggaattcacgtttgatgttctatgatgatgaaattacttcttggaaattggctctgaaacccagcctcagtcccagtgctgtttttctttttaactggtttaattttttttttgaacttttttatctcattgtagcttaccttggattgaaactggccacatgtaaaaccaagagcaaatggtagctccttccctacccccagcccccaataatccatctcaatgtgtttttatgctccgggaagcccgaagcacagtgtctgacatgcagaaagtgcttagtcgatgtcagccactataattaaccatctatcatctatgtaacctaaaagaaaataagtctttagtggtttaggtttatttttaatttcttactaatgtgcttattcatattaatctcatcaatagctatgctctgactgtggttctcaaagcggacacttttttacacttttgtttcagtctttgttgtgtctgagcctccagctcagtgcctgccatgtaggaacaccacaccattcagcagggcagctatgtgtttgctgtctattcttgggccatattaataacctggttcaaagatgcagrgattaagataaatgtaccaagcagaagtggtaaacaggaagtgagagctgacttctatttgttattgcaaaaatatttattaacctgttaatgtgtgcccagtctggaggaggccctggtacaaggtcaggaagcaggagatctggagaaggtgcccaaggcaggggagacacagaggttctgggggtgagctggatgtctagagaggatactgcaggaggagcagaggcagcaggagagaggtcacggccctggctctggtgcttttgggtccatcccttgattcagtgcaaggggaaccacccttgggctttcaacccttctgttccgggtgagactctagtcagccactaagcaacagccaccagcttgaatgaggcaaggcccccttcctgcttcattgtcttgaaaggatatgtgtggaagagacaggggtgcttttcctccagtgagaggattcacaggcaaggaaagatggaggtgtagagacacttgcaggagaaactggcagggggagtggattaaacattgcagcacattagtctttgctttaagtgttacatgtgccatccagccaggtgagatggcagcagagaacctaaaccctgagaaggtgaaatcaaatgggctgggcgcggtggctcatgcctrtaatcccagcactttgggaggccaaggcagacagatcacttgaggtcagaagttcgagaccagcctggccaacatggtgaaactccatctctactaaaaatacaaaaattagctgggcatggcagcaggtgtctgtaatcccagctacttgggaggctgaggcaggagaatcgcttcaacctgggaggcacaggctgcagtgatctgagatcatgccacttccctccagcctgggtgacaaagaaagactctgtttcaaacaaaacaaaacaaaacaaaacagaaggatgggaggatggagggaatcatggtggacaggaggcaggactagactgcagctccagacaaagcagcatctggaagcttccatggtgaattttagctccagatcaactgcaagaataaatcagcaattctgaggggacccacagaccctctgaaggaagcggattgctcctgtagggcccagaagacaccccaaatactgtgagtgccccaactgcggaagtgggaaagggagaccctcctctcccaacacactcccccaatttgagtgggagaaatattcaatgaaatagatagcttaaagaaaaaacaatagaaaattcaggaaactttggacacacttttagaaatgtgaaatgctctggaaagtctcagcaatagaacaagtagaagaaggaaattcagagctcaaagacaaggtctttgaattaactgaatcyaacaaagacaaagaaaaaaaataaaaaaatatgaacaaagcctccaagaagtctgggattatgttaaatgaccaaacctaagaataattggtgttcctgaggaagaagagaattctaaaagcttgcaaaacatatttgggggaataatcaaggaaaagttccccagtctagctagagacctagacatccaaatacaagaagcacaaagaacacgtgggaaattcatcgcaaaaagatctttgcctaggcacattgtcatcaggttatccagagttgagacaaaggaaagaatcttaagagttgtgagacagaagaaccaggtaacctataaaggaaaacctatcagatgaactgaagatttctcagctgaaaccctacaagctagaagggattggggccctgtcttccagcttctcaaacaaatcaattatcagccaagaatgttgtatccagtgaaactaagcatcatgtatgaaggaaagatacagtcgttttcagacaaacaaatgctgagagaattgccattactaggccaccactacaagaactggtaaaaggagctccaaatcttgaaacaaatcctggaaacacatcaaaacagaacctctttaaagcataaatcacacaggacccataaaacaaaaatacgagctaaaaagcaaaagcaaaaaacaacaacaacaaaaaaaaccaaagtacagaggcaacaaagagcccaatgaatgcaatggtacctcacatttcaatactaacactgaatgtaaatggcctaaatgctccacttaaaagatacagaactgcagaatggataagaactcaccaaccaactatctgctgccttcaggagactcacctaacacataaggactcacataaacttaaaggggtagaaaaaggcatttcatgcaaatggacaccaaaagcgagtagagcaacggtagctattctcatatcagacaaaacaaatcgtaaagcaacagcagttaaaagagacaaagaggggccgggcgtggtggctcatgcctgtaatctcagcactttggatcacaaggtcaggagttcgtgaccagtgtggccaacacagtgaaaccccgtctctactaaaaatacaaaaaaaaaaaaaaaaaaaaaaaaaattagaggggtgtggtggtaggtgcctgtagtcccagctacttgggaggctgaggcaggcgaatcacttaaatctgggaggtggaggttgcagtgagctgagattgcaccactgcactctagcctgtgtgacacagcaagactctttctcaaaaaaataaaaaaaagagagagacaaagagggacattatagaatggtaaaaggccttgtccaacagtaaaatatcacagtcttaaacatatatgcacctaaaactggagcttccaaatttacaaaacaattaaaataggcctaagaaatgtggtagacagcaacacaataatagtggcagatttcaatattccaccgacagcaccagacaggttagcaagacagaaagtcagcaaagaaacaatggatttaaactataccttggaacaaatggacctaacagatatatacagaacatttcatccaataaccgcagaatacacattctattcaacatcatatggaactttctccaagatcgaccatatgataggccataaaacaagcctcwataaatttaagaaaattgaaattgtatcaagcactctctcagaccacaacagaataaaactggaaatcatctccaaaaggaactttcaaaaccatgcaaacacatggaaattgttaaataacctgcttctgaatgagcattgggtaaaaaacaaaatcaagatggaaattaaaaaattcttctaactgaatgacaataatgacaaaacctatcaaaacctctgggatatagctaaggcagtgctaagaggaaagttcatagccctaaacacctacatcaaaaagtctgaaagagcacaaacggacaatctaaggtcacacctcaaggaactagagaaatagaaacaaactgaacccaaacccagtagaagaaaggaaataaccaagatcagagcagaactaaatgaaattgaaacacatacacacacacaaaataaaagataaattaaacaaaaaactggttctttgaaaagataaataaaattgatagaccattagcaagattaaccaagaaaggaagagagaaaacccaaataacgtcactgagaaatgcaacaggaggtattacaactgacaccactaaaatacaaaagatcattcaaggctactatgaacacctttacgcacataaactaaaaaacctagttgagatggataaattcctggaaaaatacaatcctcctagcttaaatcaggaagcattagataccctgaacagaccaatacaagcagtgagattgaaatggtaattaaaaaattaccaacaaaaaaaagtccaggaccataaggattcacagcagaatttaccagacattcaaagaagaattggtaccaatacttttgacactattccacaagacagagaaagaaggaaccctccctaactcattctatgaagccagtatcaccccaataccaaaactaggaaaggacacaaccaaaaaagaaaactacagaccaatatccttgatgaacatagatactaaaattctttttttttttttttttctgagacagagtcttgctctgtcgcccaggctggagtgcagtggcgcgatctcggctcactgcaagctctgcctcccgggttcatgccattctcctgcctcagcctccggagtagctggcactacaggygcccgccaccacgctggctaattttttgtattttttttagtagagatggggtttcaccatgttagccaggattatcttgatctcctgacctcgtggtccacccacctcggcctcccaaagtgctgggatttcaggcgtgagccaacacgcctggccaatactaaaattcttaatgaaatactagctaaccaaatccaacaacatatcaaaaagataatccaccatgatcaagttggtttcataacagagatgaagggatggtttaacatacaaaagtcaataaatgtgatacgccacataaacaaaattaaaagcaaaaatcatgtgataatagatgcagaaaaagcatttgacaaaatctggcatccctttatgattaaaattcttagcaaagtcagcatacaagggacataccttaatgtaataaaagccatctatcacaaacccacagccaacctaatactgaatggggaaaagttgaaagcattccctctgagaattggaacaagacaaggatgtccactctcaccactcctcttcaacatagtactggaagtcctagccagagcaatcagacaagagaaagaaataaagggcatctgaattgctaaagaggaagtcaaactgtcactgtttgctgacaatacaatcgtttaccttgaaaaccctcaggcctcctccagaaagctcctagaactgataaaagaattcagtagtttccagatgcaagattaacatccacacatcagtagctctcctatacaccaacagtgaccaagcagagaatcaaatcaagaagtcaaccccttttacaatagctgcaaaaataaataaataaataaataaataaataaataaataaataaataaataaaatacttaggaacatacctaaccaaagagttgaaaagcctctacagggaaaactacaaaatgctgctgaaagaaatcatagatgacacaaacaaatggaaacacattccatgttcatggatgagtagaatcagtattgtgaaaatgatcatactgccaaaagcaatctacaaattcaatgcagtctgcatcaaaataccaccatcattcttcacagaattagaaaaaacaattctaaaattcatacagaactgaaaaagagcctgcatagctaaagcaagactaagcaaaaagaacaaatctggaggcctcacattaccttatttcaaactatactataagcccatcatcacccaaacagcatggtactggtataaaaataggcacatagaccaatggaaccaaatagagaaccacaaataaacccaaatacttagtcaactgatcttcaacaaagcaaacaaaaacataaagtgaggaaaggacacctttatcaacaaatggtactgggataattggctagccacatgtaggagaatgaaactggattctcatttctcactttattcaaaaatcaacccaagatgagttaaagacttaaacctaagacctgaaactatacaaattctaggtataacactgtaacaacccttctagacattggcttaggcaaggatttcatgaccaaaaacccgaaagcaaatgcaataaaaacaaagataaagagccgggacctaattaaactaaagagcttctgcatagcaaaaggaacagtcagcagagtaaacagacaacccagagtgggaagaaatcttcacaatctatacatctgaccaaggactcacattcagactctacaatgaactcaaacaaatcagtaagaaaaaaacaatcccatcaaaaagtgggctaagaacatgaatagacagttctcaaaagaagatatataaatgaccaacaaacatgaaaaaatgctcaacaacactaacgaccagggaaatgcaaatcaaaaccacaatgcaataccacattacttctgcaagaatggccataatcaaaaaataagaaaacagtagatgttggcgaggatgtggtgatcagggaacacttccaccctgctgrtggggatgtaaactagtacagccactatggaaaacagtgtagggattccctaaagaaccaaaagtagaactacctaccatttgatccagcaattccgctactgggtatctacccaaaggaaaagaagtctttatttgaaaaagatacttgaatatgcatgttcatagcagcacaatccacaattgcaaaatcatggaaccaacccaaatgcccatcaatcaacaagtggataaagaaactgtggtatatgtatatgatggaatactatgcagccataaaaaggaacgacttaacagcatttgcagtgacctggatgagattggagactattattctaagtgaaataactcaggaatggaaaaccaaacaccgtatgttctcactgatacgtgggatctaagctatgaggatccaaaggcataagaatgatacaatggactttggggacttggagggaagtatgagaggtaggcaagggataaaagattgcaaatatggtgcagtgtgtactatttgggtgatgggtgcaccaaaatctcagaaatcaccactaaagaacttactcatgtaaccaaatgccacctgtgccccaacaacttatggaaaaataaaaaaacaaaaacaaaacaaaacaaaaaagcaaaaggcacaccaaggttgcttcttgtgctctcaaccagcctgtgagttctctaagggtgagggccaggtctcctatctcattacagttctggaatcttctgccaatggcagggatgctctgctagcatgtggttgaaggtggtaaagtcaagaagtccacaaccatcagccccgccccaggactcactgtgggtctcctgctccttcagcgggccccctgtcgctctctcccccacaaaccctaaggcctcctccagaaagctcctagaactgataaaagaattcagcagtttcttttatcctgggctggggtcagagcgacgctgtctgggtgctgtgaatggtcctttgttgctgcatgaggcctcctctttccttcaactccaagctcaggggtgcttcctcagggaagtgttttctgtttccaaaggcactgaggagccccctctcagcattgcttttatcccatctctgtccctcacaatgcctggcacatagttggtgcctaacaaatgctgactgaaggctaattccaacctctaagctctgcctggtgctttcttcctgtggttcttctcttggccttcacagttccatacagatctaaattctcttgcccatgtgacccactccctttcctgaaagcttgctgtgttttcagtttgtgtcaatttgccatgcactgttccagttgttgaagatggactgtttttgtatcctttcttatcctgtagagcagacaccatgccatgtacttaatgcacacttattaattattaggtgtatgcgtgaatttggaaaaaagacaaaaaaaatctttcatttaaaaagacactgttttaaactaggcacagtacactttgatcgttttcccraaaccgcgttggacaccatttttccatgatgatcatttgatttaaaccgaccagtgtgtggctgagctctgtgaactggggcatcaggggatcagggctgcaccaccagggctggagatggagctggggatagagactgtattagctggaagtacatggagcacatgctaagacgattaacacacaagataacacattttaaaaactaattttttcccatataaaatggtttaaaattcttacttctggaggagatttgatggacaagaaatgagttgtacgagttgaacgttgctcgaggcaaccgtaagtcctagcgtatttaatctttcaagcaacacctaaggactggcagctgggttcctgtggggaggataaagattgctttattctttaagatccagtgtaaagaaatagcccagatagcaatagtggatttctttctgggatggggttgtgggtgatttcttttcccttcttttagtctttctgcatcttttgtatttctttaatgagtgtgaatatttagcaaaaaagagaaattttactaaaaagagtgggaaactgctcccttctagtggtraaggggaaagcagtttcatgctttaggcgtgaggtttcaggactgtagtctaattatttcttccagtggagtagaatgtctgaaaggatttggagtaacagggctgatgaagyggcaaggaaggtgagtagctatctaggcaagtatgtgaacacagcctggaagggcttgtagtaccaagctgctcttaaagctcaggtaccaagacccagaggtacataatcaattcgacatcaaaaataggaattcaggctgggtgtggtggcttatgcccaaaatcccagggctttgggagggcaaagtgggaggatcacttgagcccaggagtttgagaccagcctgggcaacaaagagagwccctgcttctaccaaaaaaaaaaaaaaaaaamcaaatcaaaaattagccaggtgtggtggtgcgagtctgtaatctcagctacttgggaggctgaggtcggaggatctcttgagcccaggaggttgaggatacaatgagctgtgattgcaccactacactcgcactccagcctgggtgacagggcaagatcctgtctgtagtcccagctacttgggaggctgaggcaggagaatcacttgaacccgggaggcagaggttgcaatgagccgagatcacaccactgcactccagcctgggcaacaagagtgaaactctgtctcaaaaaaaaaaaaaaaaaagagatttcagatagagagtgagttagtgttctgatcaagtctcattctaagaccagtttaaattgaaatgtgattggtgattattaagatttaagactatcacagattattaagacttaagtttaccactatgcstggaagttcctttcccagagagtttcttctacatgtaagaactggactctaattctagacccacatctactccagactatatttagaaggcaccattgggatggaatatgggagccaagatgagaaatctgaagaggaagaagccatgtaggtattccctggcacaatgggaggtgagctccggaaaaggcatcccgcctccagcatgtggggactgaagatcaatttgcccaccatttcccaacttcggttcctaaaagtgtttaggaaattaagtctaaatcaagcccttcttggagattcatagaatatcaaaggccctgaaaggttctttaataaagaaacctgttcagcttyatttaacccagtgttttcgcagcgtctttgctaaagtactgctgcatatggccgtggtgggttgggcaactagacccgctgagatggtcccttgaaaacggcggtcggatgcattggtagctgcacaaccagtggaaatggaggggccacaaaacggaggaataagacattcaaattgcccctttgcaagctctgaggttccagggttgacgtattgtttccttcagggcacagaaaatatggagtctagcgaacagaagcagggcccatgcgtaggggtggtccaggtttacaccaaagaaaatgartactactcacagctgtctggcaaggtggcaagagagcgcctcggaggtcgtgagtgtccctcaccatccataggaatgccacaaaagcccttgctgccaggcatgagcagctggtacagaaggccaccgagtgccttcccgatctggactccgtgacttctatgcccactggcgctcttgcatgggtcagtctgtgctgccgctcaggaaaagcaagtcaggtgccataccagcgacccaatggcggctgctgcttcttctgcctgggcacctcatcatccccagcagtagttcctaggtgtgagcgtggcaaggagcccagaaatacagaagsagcgtttaggggcctcacggtagcttcatgcctgactcttttctctcctcttccggcctggcctctaggcctttctggatcgccagccagtcagactctacttcgagaagcagaaggtcttgggctgggtcttgaaatgcagggaagaattgacttggcagaggagaggaaagagaaaatttcaggtggggaagtaccccaggcaaagacaacattagtgtttgtaacatttgctggaacaaaacattaggagtgtgaataatggacacagtttagaaatacattttaaaggcatggataattttcagtgcctccaagcatctagagagggatacatctatttcccttttttttttttttatctttttgtatttttgtctaggatatgatgggtacttcgatttaataactcagtgatgagcttggagataaaattgagcctgctgtgaaaactaggtctgtggcttccttgaggaccatttctacagaatattattttttttgttttctctctcttaaatggttatacacaatatccctatccttctcctcactttattgattttccagaatgagagtacgaggtatgactataaagtaacgtgactgaytattttagcatacactccaatacttatacagccaaatgaattttatgaccttcggaggcattttcctgataggctaaacccttactgcagatatgccactatcagaaaacacattcttagcactttttgtgggaatggcacttggtgcttagatgtggtcctttgaaagccctcaacgcaacacatctttgtggagaatagattgattttttttaaaaaacagtccatattttggcaaatagatgattaaacagagtaatattatttgcaattttaaaaatgtgattataaaacaatacacagcttgcagaagaggtgtatgaaccagttctggaagcctgggaattttgctgaggggccacgctcactggcatacgagttggtttttggttttggttttgttttttaaagaaaacaatagcaacagtcttaatatttatggtcataccttctctcgtctagtaaggaattcaggcttctggtagcatctgttttgggggcagagatgaaagaagaatcttatttgttgtataaacaaagcaaaacatcagattgatgtgtgtccattactgagctgcgtgagtgggtgctcagcgatgccttcccgggaaggaagtgactctcccagaaataaaatgattgaatgaactcttcccctaaccctagtgccataataacaacaaacctaacaactatcgcttgccactgaagggaagtacgcggtctatgggaaccctggtagccttatatggacttgttttttggttgccggaataacatgcatctggacatgggaatgagactggcgagaaagggagggggcagatgttcacactggtattcattggtgcttcaattactaagagccacatctttcctggtttaccagaaataggtgctgttgcacaacttcctggtggatagggtaggggggtgttagctgataggggagttccctggagccctcgactctctctgttgctttcagcctcagccctcagtgcagagtttggccctggcccgcgctgtggggccctcctaaacctcccctatgtccttgcaaaggtgtgcttcttaggtttcgcttgagcagtcagccagttcctcaacacaatctcagaaagaggccggccccttttttcccctcgaagatatctagaaaaaactgtgtcagagatgatctgaaagcaaagccaagctctaccaatagtggcttccaccaatgccttgtttccctgagcactgcacacagaccccctgggagagccagcgccataccccgaaaccagcagctgcctccacattctgatctgaaaggtgccctaaagtcctcgcatgtgcttccctccttcctgcactgacatgcctgttccctccaagctgcacagcgcagtccctgttgcctgaatgctctcccttcttggtttaactgaactcctgcctaaccttcaaaatcttgtctaaatgtcactcttccataaaggtctcctccatcaggccagccctcaaccagccctgcctcctgtggacttgcttcctatctctctggctatctcggcacttactactttactttatttatttatttatttatttatttatttatttatttatttagagatggagtctcactctgtcatccaggctggagtgcagtggcatagtctcagctcactgcaacctccgcctcccgggttcaagtgattctcctgcctcagcctcctgagtagctggggctacaggtgcgtgccaccayacccagctaatttttgtatctttagtagaggtggggtttcatcatgttggccagtctggtctcgaactcctgacctcaggtgatccgcccacctcggcctcacaaagtgctgggattacaggcatgagccacagygcccggcccactttattttatagcttatgcatgtgacctatcttcttggcttgactgtaagtccctaagaggagggcccacatcttaagccagtgagtgccctctacatagtagctgctcagtaaatgctaatgatcatgattatgcctctggtaaccgagatagcagcactgtttccaaatgattactgtgacaatgtgtgtgtgtgtgtgcatgcctgtgtatggaagagggtagaatcagtctccccctaattgcacactagtggtagtgtgttcttagcacctggcagaatgccttgcacaaggcttattgaaaagggaaataaatcttgattcatgcaatcgtcgaatgctgaaggttttctaggctgtgagctggttctacctcattggtgtgctatggataacattcccatgaattcagatagatagaggaattgccccatttgaaattgaagagcaagactgyaaaaggaggggatgatggaatgcaggacccagccacttagaatacgtggtacatgggggtatatagagcactcaaagtctgagtggggtatcctgacaccagactaggggacaggaggcatccaacccccagcagaggcattgaagaacagacactttctccttcactgttctattgagcacaaatccccacagtttgaagcaatggtatctcaactcttccctaccatccactgttgatgtgatttttccccatagatcctatgttctgttgtcccagcaacaatgtatatttaagtaatgattgattaattttcccattttaattattcaaaggcaagctaattggaaaactctgccagttgagaatagctgatcaatgagataaccagcattagtgtaccaaattataattccactccaaagcaaagaaactcgacattttccttaacctgcaccaccatcgcgttgtcaataaatgcacgatttacattaggctctttgaaatattgaaaatatctcatgtaccctcttcctaccttcacaaatcagtaggcacctgggaaccccaggctgtaaagcagtgaagagggagtgtagtcagttgtacatttaaggattttaactccatccgtacacagagagtgagcaaaattggtagcatcatctcatgatctaagagcgtacctaaggagataattgggaggttctcaggagaagtgtggcattgtggaaatcagccaggcctttacagtgtagggacagacacacctctttccctgggtgtccttgggccagccactccctccttgctcatttcctcattggtgagagagggctgggacacctgcctctcagcattggcacattttcccccagccccccaggctatgctgggaatcagcctcacatctttcttggctctcaccctaatgttaaccctccacagtctggccagtcttgactcccaagtgttcctctctctatctgctttgcttctgctgcagttgaggacttcaaaatcactccttggctggaaatagccttcccacgggtctccctgccttctatcttgtgctcccctaatttgtcctgcaactgcagccaccggctcactgctcctctgcataaaaccctttcctggtcctcctgtctaaggaagtgagtgttcctggcctggctcctgaagccccctctgacctggtcccctgcccctctgcaggtttaactcccctcgcttctcacctggtgcctggctcccaggtgctcacagctcctcccacacaccatgcagttcagtgccaatttctttccttctacttgcatgtccttcccccttcatttgggtgagaacttctccaggagcctcttctgcatctcctaggttcttgccccaatgtacctggtaccttccctctctctcatcacttacctggctccccaagggcaggattggtccttcctcakctttagctgagcactcagcattgtgccaggggcactcaacacacttctgttgagtaataggcacgcagttacttgttgaaccaaactgcgttagaagagatgatctataggattttgtgtggcatatgcattgttctttgccgctatgggtatcatcatagagaatttccattaatttctggccgtgtgccactgcaaccagctttcaccctgacttgtcatataacaaaatatcattaaattgaactctagttttttttttttttttttkagacagggtcttactctgttgcccaggctggagtacagtggcacaatcacagctcactgcagcctcaacctccccaggctcggggaattctcccaccccagccccatgagtagctgggastacaagcgagcactaccaccccaggctattttttgtatttttttgtagagacggggtttctccatgttgcccaggctgggaactctggatcttaataaaatatttttttctttagaagtcaggctaggctgggctgtgggttgaagttcatctctgtgctatttatgaaggaagggattgctaaccaaaatcattgtgcaaaggtgacagctcaaccaatttaggaaaataaactactcccgagcacttcggcagcttgctagtttatcaacgatcccttgaaaacgcactaaaaacacttcactctttctgcctttccacactttctataatggcccagggcttaggctttggaatcagatctcctggattcaaactctggctagccttgtgaccttaagcaatagatgtcaggtctccgtgtctcagtttccccatgtgtaaaatagggatactaatagtacctacctcttagcatgttgggaggattacatgagtaagaacataaggtggacttagagcagtgcatggcacagctcagggtcaataaacattagctcttagtgttatctgataactgcacgcttatattcaacaaaaactgcatagacgctgggcagctagatcttggtttttattttgtttatctagttattttgtaaacctcattctgaattctcacctgatccccaggaatgcactgcagtgaaaagtgaggagaggcgtacttcaaacaagtgacctcattttgaataatcctggacttataccactaggtagcttttgaccttgaacaagtaaaattaggttttaaaaatgcgtatcagacttagtaagctgaagtgtcttcgggggtgttggggatggtcaccaatggtgtggtggggacagagccatagtgcggcaggtttagaaatgatggggaaggagggcagatgaaaagaagactgtgggcttttctttgaagaaggtcagagatgtcagccacctctctgggcttgatcacttttccatacggtcaagcggagatagtcattctctccctgtctccttgaaagggagtatgagggtttgtgagcaataamccttacaccaacatatattgctattagtcyattgatggcatctgtttacctctcagttgtaggtgcttcaaaattaaagaaaatctatttcttgaaaagtgcacaataaatcaagctttaaactcaatttgttttccagaaatttttcaaattttcccatgacaaaatttacatttattttctgattttaacagtaagagtaccattctaattttcatckggtctttgcttcattggttgacatttgccttgcccttggacttgagaacttgaagtatcaatgaggcatagcacatcagtaaataagccccgctaagccatactctattctcgcctgttgaccagatcttttgtttcctgctcactctcatccaagcccttacccacatcattttcaatgatggtgtcactgcaaatgtttctttgcaggttcaattctctcctatcataaaacaaacaactgagccagccaactaaccaaccaaccaaccaaccaaccaatcaaccaaccaactcactaaccrcctcttctttgactccaccccaggcaccactccacttatccttctcttcccagcctagtgacttgaaagaggactttgtatttgctcactttctcacctcctatttacccccgacccctgcaataaggtctctgttccattctctactgaaacggctttcttcaaggccaccattaagtctctagtacctaaactgaattaacagtttctaatccttctctttctttggcactttgcaatatttgttgtttgtttgtttgtttgttttgaaataggatcttgctctgtcacccatgctgaagtgcagtggtgcaatcatagctcactgcagcctcaaacttctgacctcaagtgatcctttcacctcagcctctcaagtagctagaactatagacatgtgccaccatgcccagttaatttttaaattttttgtagagtgaggtcttgctatatttcccaggctggtctcaagctcttggcctcaagtgaccctcctacctcagcctcccaagtagctgggactataggtgcatgcaaccatccctggctaattttatgttttacttatttatttatttatttatttatttatttgtaaagacaggattttgctatgttgcccaggctggtcttaaacgcctgagstcaaatgatcctcccacctcggccttccaaagtactgggattacaggcatgagccaccatgcctggccgctttgcaacatttgattctgttaattttgggtatatgtcaaagctgtcagtyacgtaggggtagaaaaaaagttgtgcatcattgattataatgccagggccccattttacagatgtgaatatggaggtccagagaagttatgtgatctgatgtgtattagtcagctactgttgcaataatgctgtgtaacaaaccaccccaagctcattggcaaatgacaatgtttatttttctcatggtctgtatgttcactggagtagctctgttccagtctgacagtggggtttagatctgctccacatgtttgtaatgggacccaggctgaagagaatattagggaagtgctgctcctgacaggtcacagggatgcaagaaatgtaaaatgaaacagtaatatctcttgaggcctcaacctggaagctgctaagataatttctgcccacattctattggctaagcaatccacatgcccaaggttaacattaatggggcagggaagaagactctgtccactgtagygggaggcactgcacagtcatggagcaaggggcattgatgtagaattttgatacagatggggcatgaagcatcaggagcagtgattcactctacctcatgctccaagattacacagctggattctgatctttggcaaaatagaatctaggggccacaagtcacaagacaaaataaaaccataacaaaaaaataaataaatgaacaaaaacttaacgtgaatggacatattaacttttattgtaagtgaaaacagtgactctctgggggaaaaaaaacaacaggccaggcatgatggcttacacctataattcttttgggaggctcactttgggaggctgaggtaggaggatcacttgagcacaggawttctcgagaccagcctgggcaatataggaagtctccgtctctacagaaaatacaacaattagccaggtgcggtgacatgcatctgtggtcccagctactcaagaggctggggtgagaggatcagttgagcccaggatgtggatgttgtagtgagccaagatcgcaccactgcacttccaacagcaaagaccctgttcccccmaaaaaaacacaaaaaacaaaaaacaacaaaaaaaaaacaacccaccaaaaaacagaaacaacagatagtgatgcagaattttcccactgagacactgacatggtgggtcatggtgatcttgcttatgaagtgataacctagcttcaagagtgttgaagcagggtccagagctcagtgtaggggccaggttggtcctgggccgaacctggggaygtacctaggaatttctagccaaataagcaatagagggaagggtctgactgatgacggagcatgagcacactctagraagggcaaagaattgatctgggggatgggatggggcggggccctaagatttcaactccaccctggaaaagcaggacttaggggaggcatgtctgaagttcagaagaccaggggaaacctgaatgcagaaagcgcagcttgttcaccatgtcctgaaatacagcaaccaggggacactcttgtagattgtgagctgtattgcttaggacaaattcattgttctatgctgggcagtaaatttatggatgttgttatgccaagaaaggaatatggctgaaaacataaattgctccagaattgttttaaatattctcatgggtgctggaagtcctctgggttattaaggaaaaaatttgtttatttcttgcccttccggaaaccaccctttggtgctggctagtggctgtcagaagaaagggtgtatccatgtatcacaagggctattacacatcgtgaatttaacttgagttctcaaagataaaaagagacacttgtcttgcctccacgctccttctcgtcctgcacatttgtccactcacctccagtaagttgctctggaatctgaacagggaggtttcttgcaatccagaatcagccacaaaatcccatttccttttttcctataaaaaagatgtgctgactgaaacaactaaaatatagactagttagtgtaataacaataagtagcaaaaacaaaatagaaaaacaaagcacaacatgaaaaaagaagtttttgaattagtgtcttctttcatcaaggtcagtttctctccatctcacatcctctgtgaccctagggtggtgtggaagatccttccccacccacacccacacatggggtattatttgggccttttccagggacttctgtcagttctgatggtctttgcactgggctgagtagtgtcccctcgcccccaaattcatgtccattaaaacctctgaatgtgacctgatttggaaatagggtctttacagcggtaatcaagttaagatgaggtcctactggatgacggtggtccctaatccagtgactggcatccttataagaagagtgaaatttggatgctgagatggacagagggaggacgacatgtagatatagtcacacaggcgagaacactgtgatgaccaaggcggagattagagggatgcatctacaagccaaagaccatggattgccagcaactaccaggagatggacagaggcaaggaaggrgctcccttcgtgtcttcagagggagcatggccctgctgatgtcttgacctcagaattctgaactccagaatgatgagaggataatttctgttgttttaagccacccggtttgtggcaatttgttagagaagccctgggtaactagtctggtctccttgctcccrttggtcttactgagccaaagcatcccattggccttactgagccaaagcatcccattgcatcatgtttgttactgtaaccctcaaatctttttcttgacctaactcttagcaagtttagccactggcctttgatcatctcttagctgcaataatcttcacttgacagacaagccagaggcctggctggaggctcaggcccttcattcagacagctcaggaggcctggactgtggctgggccagttcctgtggccgggctctaagtctcagtttccccatctgtataatgcacacaacagggatgttggtagagattacaggacatgatgtttataaagtgtgtttataattttattttgtgggtcagtacaatgcctgacccatagcaagtgcttaataataaatgttagctattattaaacatacagttttctgaaatctttaaatccatttttatccaccccagggtgaagtttccctgatttttcttttccagtaaaagcatggcagatcctatctactctcttagtgatgcacaatgacatctgggctagtgcctgacacagagtaggcactaaatatatttttatggaataaagaatggamcaactacattgtttcaatatctaatcaaaggaggaaatagcttacagattttatgaggcttagtaaccagcttgatacactcaaggtgaaactttggaaaaggatgtaatttcaccacatttgttcacaatagggcacaggtgatgtggtagacagcctccaagagggccctctggatccttgccctggaattcacacccttgcatagctccctcccccattgtaccagggtcagttagcatgaccagtggaatacagcagaggtgatggtgttatcacttccaagattagattattggagactggggtttccatcttgggctcgctctctcccttggattgcttactttggggaagtcagcagccatgttgagcagccctatagggagaggctcatatggcaaagccagctacagctccataagcaagcatggacaccattctccagcttgaccctgaacccaaagcacctagctgatctgctcgcagactcctgaccctcagaatctgtgagataatgaatgtttgttgtcttcagtcacttaggtctgggggcaatttgtgacacagcagtagataactaatataggtgctgagataggaatggctgggaccaggcagggtcaggactgaggactctaataatggaagggattataagttgcagggagcaggcaagaggccaaacccagaaaagtggtctgttcggaaggtcaggcaggttctgtgggtctccacctgtggctgtgttccagaacccagagaggtgagagccagaagcaaacacactgaggaacaacgggcactgagattcagggctcttggactagaactcttgccttttgactttgtcctgtacaatttccagctagacccacaattgatcattatagctaagagatgatcaaaggtcagtggctaaacttgctaagaattaggtcaagacaaagatctgggggattacaggaacaaacatgatgcaaggggattataaatatttttttgaaactcttaacaatattcttttgttactttgagttacccaagctctttaaactgtctgccaagctcaaaggcaaaattggtatttcccaggccttttggacgggtcatagtgcaatagaaaggtggaaatattgsctgggtttatgaagacataacttcttatccaattggcaaacattttttaaatgcctactcggctgggtacaaaagaacctagaattattctgagcacccactaccagtactcaatgcccctgtgtaccaaccttggctactccaatacacacacacacacacacacacacacacacacacacacacacacacacacacagttggccaaagaagcaacctgtctgctctgcacaagccaggtcttcactttactgaagccccagctgacccctctgggctcaaactttactgaagtgaagacctggtctgtgcagaggagataatgacagatttatctgtccttatttcaagtcttgaagccctgttgacttagtggctaatctgatcaactgatttgaaccctggggatagcgtcctgtaagatggcatctgccttttcacaggggactcagagccctcaacccacagacttgaacaaacaggggcttttcgcatcccccgtcttacagataggttggattctgggcaactggctgctctgcaaatgtaaagtgagaaacagtagggcctggtaatggtgagcacagactccagagccagacagcctgggttcgaatctcagctgtgctactcactagcagtgtgaccttgggccagttacttaatctctctgagcctcagtgttcccatctgcaaaacggagataataataacagcatgttccacacagaatttggggaggagtaaatgagctcatgtgtgggaagcactcagccgggctcctggctcacaggaagcatcctgtaactgtttccttttattacgcaggatccagaggcaggggcagccccagctgacccctctgggctctaatttaactatctgttggggttcaccggaggcagatgtccctctttcaccacaagtctcaggggttctttaaggacttcataaaaacaaaggattaactgcagatgactaagcccacatgatggaaacagaatcaggtacagtaaataatgaacgtagacaggattagattcctacaaayaatacattgtgttctcctgctcttcattggcaatcatccccagtagggaatcagtggaactctttgagtggccaaggaaaacatctccatgtgcccaggatagcctgggtgggctcctggaggaggcaacccttgagcagaaagccgaagagcaatctggcctttgcaaatggagaaagagtggatgcatcagcagagaggagagtgggctgggacaagggtgagagaaggaagcaagcacctaggcccaaaatttaagaaggccctcactctcagggttgtacaagagcaggggtggcacttgtacagccctgagagtgaggacctccttaaattttgtaccctaggtttgttcttgcctctcctttgtcttggccctagagaaaagcctgggaaaaagcccagaacggtgaaacgacatggcgtaactaggaacgtgtgagtcatgcaagattgcccaagcctaatttagggacagagatgacttacagtgaggctagcagtcaagctgtggccggatcaccaaagaccctaggtgccaaataaaggaggttagtgcttgaactgaaagtgacagggagccaaggaagaattctgagcagggctgcaacatgatgagatttgcatatgagcaagcttcttctggcattggtgtggaggactgattggaggatgataggagaagctagaggctgggaggccagttcaggaccctactgaaaactctatgcccaagggagagacgacgacctgatatagggcagtgccagttaggagtaagaatgaagaactcactcaagacatgtgttgaaggcagagttgacagaacttggtgattgactgcagatgaggatcaaaggaaagacccaaagatagcatgaagtttcaaagatggtcatcaatttagaagccaagggggtttattagacaagataacaagcatgtgaaggcagtgatttcagcttccccaagtccaaggtaaacccttagttctcctgttttctgtaggataagctctctggaggctaggatgtatcttattcatttttgtatgatatctactctgtaagtatctttgaactgcattaagtggctttcacacctccgcatcctgctcattggctttcaagtggccttaggggtgttactattgtttgaatgtttgtctcctccaaaaatcatgttgaaatttaatccccgatgtggtagtgttgagaggtgaggcctgtaagaggtgactgggtcatgagggcaaagctatcataaatggactctgtgcagagtccccaccagcaagaaggccctcaccagatgcaactccttaaccttggacttctcagcttccataactgtaagaaataaattctttttctttataaattatctaggttcaggtattgtgttataagcaacagaaaacaaactaagacaggtatcaaagtccttttaaagatggctgtgtagctgggatcagaccaacacagcaatgtgttcaaactcccattctaaacacacagaacctggggctctgacttggccccacggtcttgagttgaagcctgaagtgtgactggatgtcaggcgtgggctgccctggggctttgggaagtagtgaaagggataaggtgaaggtcaagcagagtgggggatgtcaggaggctggggaggcttgggctgccaggtgaagtgggcctcatgaaagacaatttgagatcagaatgtcagacagagagcaggctagaaggcagctggcttctgagctgcagcctagaaaggctgattcagcagtgctaggaggaagtgggaggttttgtcgtcccagaagccatatctggagcaaggggaagtactaagaccacagggtagcatttggagccatacactgggactaacttcctctgacctaggcaacgacagactgcccctgtggtcaaccagagcccccagatccttttctgtgagctacaatgaagccaggcctcattcttcttgaacttgagaagtttagaaaatatctgctttgccttcactagcctccattttcataaaaataaagcgagtgaaaaaagcaagtctgagcgctttgaaacattaattaaagacaccacagtttccttatttaactgagggttgctacctcatctgggattattagcaaagcagagagcctttgttgtgctcgacaaagtgattaattcagactcgaggtgaattttggctttctcaacttcttttgatgtgctaagatcccccaatgaggacaacgtcatcaattacttaagccattaccttgagatcacaattatcggggaggcccagtctactaattggcagacagagagacagaaatggactacagggttgtggcttcaacccttaattgttctagggggagcgagagtcctttaaaatgttttgtggcaatgctcctgctaatctggggtgatcgagttgtttttccaccaggcaaaatgcagcctgggtgacctgcgtctctagaaccaagaaactgcctgtgattccactgacttggcgttctcatgggccaggacacagaactcagaactgagggatgagtgtgtcaatggaagagggatgaggttcataaaattggaaaggagagctttatttctcataaagggttgcggccttcgggtggccattccgacaggctaggaagatattttgatggaggggaaaagggaatgggaatttatgcagagcagggaggccaaatatacatattcaataagctatgggaggagtcatgaatatttatgaaaggagaaacatgtgcatgcgcaattgagcgtcatgcgccttcatgggtcccatgtagaaaaaatggcagccttagcataatctgagggtggagttttcgagcctctgacttcaaaaagtgaagcaaaggacaggaaaaccctcactgagcatcctccatacaatggccagaatcactccataatcggtggtctcgtatcaggcaaaagaaaggggcagcatcaggtggcaggttgatgtcagcggtggaggcttttaacatcagacgctttcagggcgttatggcgtcaacaccaatggaggctttgaaaaggccgctttctatttagcccttaggggagaaagcataatcatggctagtgagggaggggtagaaggagtgtgtctgactccccatcccatcatggccaagaactcagttttcaagtttactctggggaccccttggccaagagatggtccattcagtcagttgggggcttaggattttatttttagtttacaagttctagaagcaaacatcctactcaagaggcaaattctccagcccctggaagctgtctttgggcttccgtgggatgctacatctgggcttactgtcccctgacacataaggaattcaaggaccagatacaagaggctgctttttacattttaaaatatataatcatataatattctgtttaaatagatttatctttgttcatttaactaagccattactctttttttttctctccatcctataaaagagtttttgggggaaggttttatgctgcatggatatatgtcattggtttttctggtgaaaggtggaggaactttgtctggttaaatttagtcaaataaccaatacttaaacaaacaaaagccacccctgaagtgtttcataaatatcagtcacttcaagagttttatgatgtacgtcagttgctttgttctgttttcacaatagaaacacacgttgtgtgtgttttcggatggtggcactactgtttgctgtaccttcatcattcttctttaattctcactgggacagaagggcaagacactttcccagggtcagaatcctgggattggctggctggattttcttttcttcttaatttttttttttttttttaagagacagggtctctctctgtcacccaagctggagtgcagtggcttgatcatagcttactgcagcctctaattcctgggctcaagtgatcctcctgcctcagcctcccaagtaggtgggtctacaggcacacaccaccacacctggcaatttttaaaaattttttttgtagaggtggggtcttgctatgttgcccaggctggtctcgaactcttggcctcaagcaattctcctgccttggccccccaaaacactgggattatgggtgtgagctaccacgcctggccttgggctgaattttcttgggggtgggatgggcattttaaagcactcttgagaaagtagaacacactccattttaaggcagtttctttgcagtgcttcttcgtacacatcaacccyatgctcactctgccccatggcctccaggtgacccatctgttccaaggcagcagcctttccagtgccttcacctgctatggtgccacaacatggctctcgtttattgtgccagctttgacacctctgttctcagtttaatgatttttctggggatgggtccttcttggagggtcctgctttgtttttgtttttttccagattaactttgggggacataataagtggagaccatttatcgttttttaaggctcaacaaatatccaatagtcagacagaagagtgatcaaaatagaaagcatgtatttaaactgggactgacaggtgacaggggatgcctcwtagccacaatgatcataatgtaaatgcttaattaactgtttgtcagtagccattgaatgtctgtctggtccactaggctgtaagtgccacagagcaagggcatgtaggcatggtccctgcagcatcctggtacccggaactcagcactcccccagcaccatgcttggtatctgctctctggccatggttttgaactatcagctgagcccaagcaaccttgcagaccacattttgaytatgtcttcctcggaccatccttgagagtcaygtcttcttggcagtgtcccatagactgtgaatggtgagtgagatcactttagaaggtacacggactttaaaaawctttcattataaagcatttatttattttttaatttttaattttaattttttattttgagaaggagttttgctctcgttgcccaggctggagtgcaatggcgtgatcttggctcaccacaacctccccctcctgggttcaagtgactcacctgcctcagcctcctgagtagctgggattacaggcatgcgccagaattaaccatgcccggttaattttgtatttttaatagaggtggagtttctccatgttggtcaggctggtctcaaactcccaacctcaggtgatccgcctgcctctgcctcccaaagtgctgggattacaggcgtgagccaccgtgcccggcccaaagcattcattttttatcgttagttttttttttttttttttttgagacggagtctcactctgtcaccccaggctggctggagtgcagtggcatgatctctgttcactgcaagctccgcctcccgggttcacaccattcttctgccttagcctcccaagtagctgggactacaggcrcccaccaacacacctggctaattttttgtatttttagtagagacagggtttcactgtgttagccaggatggtctcaatcttcttacctcgtgatccgcccacctcagcctcctaaagtgctgggattacaggcataagccaccgtgcctggcctatcattagtttttaatttatgtaagtgatactgattttcacttatgatcacgacataaaatttccttttaaaatgaattcatttcaatttatctaaaagaaattgggaaataagtaaatgtacaggcaacttgcagatatggccaaaattataaaggggctatacaaataactgaatttagaagattaaggccttaatactcgttgagacttactgactcaactggctttcttgccctgaaaagttaggataaaaatggagaagttagttaactctctgaattacaataaccatcaactagatacctttttaaaagaattgtaatactttctttataaaacgttatctttggccaggcatggtggctsacacctgtaatcccagcactttgggaggccgaggtgggtggatcacttgaggttaggagttcgagaccagcctggccaacatggtaaaaccctacctctactaaaaatacaaaaattagctgagcacaatagtgcacgcctgtagtcctagctatccgggaggctgaggcatgaggcttgaacctgggaggtggaggttgcagtgaactgagattgtgccactgcactccagcctggacaacagaggaagactctgtctcaaaaacaacaacaacaaaactaaagaatatgtattcttggctgtttcagtggtagggctaccaaagcctggttcagtgctgcccaaggcagaggctgggtactgggtgagctctcggctggccttcccccaccccaccccctgcaactgtaccatgtactgttcagttctgtagaaacaggaagctcagggtaactcacagtccccaccccagacacttcttcttttcaggcacacttcaaaataaaatcaggatctacatacactataagttggygtggtagctgaatattggccccctaaaatgtcgatgtcctagcctctggaacttgtgaatgcaaccttagatggcagaactgattttgaagatgtgattaagttgaagatcatgaaaggggttaagtattctggattgtttgggtgggccctaaatgtaatcatgaggtccttataaaaaggacacaggagttgtcagagcgagagaaggcagtgtgaggactggaagcagaactggaaggttatgaccatgacccagggagacaagaaggggacaccccctgccatctccagaaggaaccagccctgtggacaccctgcctgtaaaccagtgaggttgattttggacttctggcctccagagctgtcagagaataaatttgtgttgttttaaatccctcagcttgtggctacttgttataacaaaaatagaaaattaatacagttgggaaatataagtttacctaaaaatattccttcgcagccgggggcggtggctcatgcctgtaatcccggcactttgggaggctgaggtgggcggatcacctgaggtcaggagttcgagaccagcctggttaatatggtgaaaccccgtctctactaaaaacacaaaaaatagctgggcgtggtggcacatgcctgtaatcccagctacttgggaggctgaggcaggagaattgcttgagcccgggaggcgaaggttgcagtgagctgagatcatgccattgtactccagcctgggcaacaagagtgaaactctgtctcaaaaaaaaaaaaaaaaattcttcacttctgacaggattctgcatttgatctattatgtaagacacttactatacatatagacagggtctcgctctgttgcccaggctggagtgcagtggtgcgatcatagctcactgtaaccttgaactccagggctcaagcagtcctcctgcctcagtctcccaagtagttagtactacaggcatgcaccaccacacctggctaatttttttttctttttagaattttttttttttttttttggatctcactttgttgcccaggctggtctgaactcctgacctcaagtgatccttgacctcctttgccttggcctcccaaagtgctaggattacaggagcgagccactgtgcctggcctgtttaaaataattctaatggcaaaggattcaattaacaagtctcaaaatggatgtaagttttgcacaggtattcacatggctgaagtaccaaacatggtatcatgaattaagtgcgtaacatctgacaacggtaacacatgctatttttgtattattgtgaactcatggattcaaaatatatttgatgtgttttggtccattgcaattattattttatggagcaaattgtccatgtatcagtcttgctggcctgaagtcaaggtgtcaggcaggctggttccttctgggggatccaggggaatattggtttcttgcctccttggttcacggttgctttactttaatctctgcttccaggcatcacgttgcccaaagtaaatgaggtggggatgtataatcctccaactgggagggacagtcatgtcttaacccattatgcaatctactgtgtctcaagtgtttctgacttgagaagttggtggattgtggttgcaatggtgatgtagagatgattgggagacaacagatttagtgggtaaattaaaatcagatttagattaactgtaaaatgcctaacagacattcaaagcatccatcaagttggaagttgggtaaggaggactggagctcagtggagaaaatggaactagagttaaagatgtggaattattgacttttagatggtattgaagtgatgggactcaacataaggaaaggagccagcaaagacagtgaggagcaatctttgaggcaggaggagtggtatcatggaaagagggaagagagtgcttcaggaaggaggaatgttcatctctatcaaaatcctactgaaggatcagtaaagaaataatgggattgataagatcaaagtcatcaatgatcttgacaagggcagccccaaggaagctgtgggtacagaagcttagttggagtggggggaggagagactaagggcacagaaggggaggaagccatctagacaatgctttcaaggaaacttactgggaaggaatgaagaaaaataaggcaatggccaaatccaaggagtttgccttttttcctttaagatggaagacactggaatatgtatgctgataggaatgatccagtagaaatggagaaatcaatgcaacaggaaggaacaataattgagaataatgagtaaggacaaggagcaaaactaacaagattggctttagataggtaaagaatccctctgtctctctctttctcatcacaatcatcagttcattagtatatgttattaatacacttttggtttctaagcagcctgcctttgttctcagcatattgtctacatgttctcatgttgtgctttatccacaaagtcttagcctaggggacagaaagggacagtaagtagggttagtgaataacggcacttgtctgaaatgtagctgacctggttttaactctgactcaattgcttagcagcaccttgggtacattatttacctctctaagcttttatttcctaatcagtaatataagaatggtatttatttctatccttatgtgattgttggagggcttgtacaagacagtatataaaaagtactaagcatagtgcctgagacacaggaaactaaaaactattgtaaattataataatagtaatgattgtgtaactcttgtatgtcaatatacatgtwtaatatatttttcttgtgcagtgacaaagttattgtcaggctaatgactgcartgactatgtctttgtggtacctacattattggtgaaagaactgaacaccagccagatatttatgtatttattgagtagtcttctattttttttccagaggggtaaagattataagcggttccttaggcaacaaattataatggctgtcattcactaaatcttgtatatagggtgggacagaattgaaaaaacaataggaaggtcttgtaactccaacatatctgttctcctgaggtttgcatgtgtacatcttatagcacattgatattcagaagtttcctattggaatgcaactatcagacaataaaaccactacattaaaaatgtacagaatgcagataaagaactacttagaggaagatttatagctttaaatgcgttcattgaaaacatgtgaactaaactaataacttaagaagttaaaagaaaacaacaaggaacaaagtctcaacccaaagaaaatagaaggaagtccataatcaaaatatgagcataaatcaatgaactagaaaacaacaaaaatcagaaatgatcaacaaagaaaaagttggtgctttcaaaagataaataaaatagataaacccatagcacgactaatcaagaacaacttttccaggcaagctaggagtagaaggaaatatcttcaacccaataaaggatatctatgaaaactctaaagcaaaacctcacacttaattttgaaacattagctgcattcctgcagaatcaagaacaagaaaaggatgcttactctttctgcttcctttttgtactagagattttagccaatgtaataagaaaagaaaatgagaagtcagacaaaaggattaaaaagaaagagaatggactgatattatttgcataaaacataattatcagcataggaaatcaaagaaattccacatgtaaaccaataaaactaattagaaagtccagaaggatcattgattacaacgctggcattaaaaaaaaaaaaaggtgctcctatacatgagcaacaccaaaacaaatgtacgtaaatagcaaaaagatactcttctctgcacaaaatcataaaatgttactgaaggacagagaaaataaaatcaacagagagatacaacacattcatatatgagacaaattgatgttgtaataatgttggtatgttctaaattaatgtatacatttaatgcaattccagaaaaatccaaatagcattttctcatcaaatcagactaattctaaaattaatatgaaaaagtaagttataaaaatgtattatatggtaaaaggaatttgagtaagaaaaaaagacaaaaaagagaataaaaagaagtaatatataaaaaagagaaaaaaacaaagagtgtgatttagagttataataattaaaatagtgaagcataagctagacaaatggatcagaatagatccaagcacctatactactgaggagcatgatagaagtgacattatgaatcagtgggaaaaagggagcagtgcagcaggcacaacatccctttgctaaccccttggagggatgtaatcagctgtgggacaggattattttaccagggtcccactgagataccgattctgttgagccacctctcattgtagaatctggctcaacacaccctctgatgattgatttggcttctcaagtacctggaaaggaggtactctaggaaggagatgtccgattcttattgcttggaaaaaaaatactcactattataaatttgtaaatgaacagtctcgtttgcaggttgtattttagggcatagcctagttactactgatacgtgagtgagtgtgcatcagatgatttccagccctgagggcaaactgagattgaggtcttaagggaatggagagggggctgaacatgaggatgaggatgccagggtggacactaggtgctaaaagggaaaccgagaagatctcacgtgtaaaatctgtattgcaccatttccccaccaacccttcaggaacatctgccttgaggcgtgatttaagcagtttcaatccttacagtttctcttgtgggtgtgggtgagaaatgggacaaggataaagggaatggaatttacagtcaactaacaaggctgtggttagttattagctaagtcaatgaaaactattcagatttatctgcttatcttcctcttcacacccagatatgtgcgtggagtcagcttgcagtacctatcaatgactgctcattttccaactaatttttaaatcagttagtggagcacaattctgcctgccacctagataaaccatactgtgggaatgagggggagggaggaagaagaaggaggaggaggaggaggaagaggaggaggaggaagaggaggaggaggaagaggaggaggaggaagaggaggaggaggaagaggaggaggaggaagaggaggaggaggaagaggaggaggaggaggaagaggaggaggaggaggaagaggaggaggaggaagaggaggaggaagggagggagggaaggaagaaggaagggaggaaggaaggaaggaaagaaggaaggaagggagggagggagggaggggggaaaggaagaaggaaggagggagggaggaaggaaggagggagggagggaaggaggaaggagggagggaggaaggaaggaaagagggagggaaggaagggaagaagggaagaaagttagttaataatgtcaaaaattgggaaatatttttgagaatgaagaagaaatgataggaaaatgtgttttctctctctagtaagaaaatagatgcagacatcaaaatacattgatgtagcttacaaattagaaaaaagttttatgagagcatttggtgcaaaggatataccaacggtaggactagctgggacaaactttatggaaagcaattagatattacataccagtgtttaaaaccagtgactcatggatctcaggttaagaaaatcttcatgcacaaagtgtgggaaaacctctgcgcagaaatgctaactgtagcagcataactcaaagtagctaaaatatagaaaacacgctaagtatttgacaataagaatggtttagtaaattataatatgtatataagagcactattaagcagccataaaaatgatatttataaaggattaataacatggagatgtttttccttatgttaaatgaaaaaagtagaaatctggataaatagaagtagagaaataagccaggcacagtggctcttgcctgtaatcatggcactttgggaggctgaggcaggcagatcgcttgagcccaggagtttgagaccagcctgggcaacatagtgagaccctgtttctaaaaaaaaaaaaaaaaaaaattagccacctgtggttgcgcacacctgtagtcccagctacttcggaggctgaggtgagaggatcacttgagcctgagaggtagaggctacggtgagctgaaatcacaccactgcactccagcttgggcaacagagtgagaatgctaaaaaaaagaaaaagaagaaaaagtagagacataggaaaaatatagagagagaatgtaatagcaaacatataaaaaatacacagtgaaaaaaaccaagagaatgacaatataaagagagtaggctttctccctgatagttctagcttttgtgcccaaatttctgtgaagcacttcaaaatgtgtcttggaaagccagcaaacctcacaccctgcttccatttcttaacaaaacgttttgaaaaggcaattatttaaggatctgtttctaataaagcttccgatgtggccatgatgtttaatggaattgctggcaaagcccatgagggcatgcgtgttgaaaccatagagtaaccatggcaaagggcctctcttctccaatgtgcaggacactgggttacctggcaccgctgggcttcacctgttcttggagcatcacaagtttttacccctggagaagcgctatttgccaagggaatctttcaccatttcaaatacatccactgaagtttttgaaagcagtgcaccaagtaggaattctttggtagtgacagtgaggatgtaatgaccgagcggaggggccggctggacccttctcctgcacaccacaggagaagccaattcctggaggtagataatttctgttttcttttgttccaaacctcagtcagtttgaccatctccttaatatgtgattcatcaaaataccaatttatcagaagtggcttctttggctaaacaatgggctaagcacccatgttgaatccatcaagagaaggttttaggctgggcacggtggttcacacactttggaatccccacactttggaaggccaaggcaggcggatcgcctgaggtcaggagttcaagaccagcctggccaacagggtgaaaccccgtctctactaaaatacaaaaattagcctggcgtggtgggcgcctgtaatcctggctactcaggaggctgaggcaggagaatcgcttgagcccaggaagaggaggttgcagtgaactgagattgtgccactgcactccagcctgggtgacagagtgagactctgcctcgaaaataaataataaataaataaataaataaataaataaataaagagaaagccttgaggaagataaaatacaggaaattttccagcctttacaaattgaacctgattttgagaatgatccagtggcccgatttattttgagaatggacagtaaattgtaccgctggcacagcagtatttgtgtcctgtagcgtttaatgacctcgttggttgtgaaaataaaaccgaaagatgctgtctaaagctatatatactttctgttgtcgttttccaacttaagtatccttgatgtaaacaatgacaggtgtccataaccataattgtgggaaacatttgcattaattcacatcaaaggaaacccattgtaaacatcagaacatggtgatcgtctgatcattgcgtattacctgctttacacagtagcatccctggcctcctgcacttttttaaatggcacaggacttaataacacaatttgacataaaaggattttttttacaatgacaatttttaaagttacagcaagatatttaaaaacaacttttcattgaccctgtaagactcactcataagtatccctagtgtaccacttaacctagggctgccatatcaaagtactacaaacttgagtggctggaaactccagaatttatttatttatttatttatttatttattcattttttgagacggggttttgctctgttgcccaggctggagtgtactggtacaaaagtagctcattgtagcctcaaactcctgagctcaagtgatcctcccatcccagccttccaagtagctgggactataggtgtgtgccaccacacctggctaatattttttttttttttttttttttgagacagggtcttgcttcatcatcccagctggagcgcagtggcacaatcttggctcactgcaacttccacctcctgggttcaagcgattctcgtgccttagcctcccgagtagttgggattacaagcctgcctggttaccttttgtatttttttttttagtagagatgaggttttgccatgttggccaggctgatctcaaactcctgacctcaagtgatctgcctgccttggctccccgaagtgctgggattacaggcacgagccaccacgaccaggctcacccggctaatttttttacactttgtagaggtgagggtcttgctgtgttgcccaggctggtctcaaactcctgggctcaaataattgtcctaccttggccttccaaagtgctaggtttataggcatgagccaccacacccagaccaccagaaatttattgtgtcacagttctgggccaggagcctgaaattgaggtgtctgcagggctatgttccctatgaaatctgtaggggagaatccttccttgcctcttcctagcttctagtggttggctgactatctttgacataccttggcttgcagtggcctgacaccaatctctgctttcatagtcactcggcactttcctgtgaatctctgtcttcacatggccatcttctcataaggacaccagtcatattggattgaggggcccctgtacttcagtatgactttatttatttatttttttgagacagagtctcactctgtcacccaggctggagtgcagtggtacaatcttggctcactgcaacctcctcctcccaggttcaagagattctcttatcttagcctcccgatttgctaggattacaggcatgcaacactacccctggctatttttttgcatttttagtagagatggggtttcaccatatgggctaggctggtcttgagctcctggcctcaagtgatctgcctgcctcagcctcccaaagtgctgggattacaggcatcagcagccgtgcctggcctatatgacttcatcttaactaattacatttgcagtgaccctatttccaagtcacattctgagattaggacttctggaggttaggacttcaacttatctttttggtggtgatacaattcaacccattacaactggggttcattgattttgggttaagaacgtgttgagacagtcagagggcagcaaggggaccctgagaccagagggtatgaaacaagagtgcagagaaggaagtggtagggagacaaatggaacccatgttgctattttgcccataaatttggtggcaatgatctctccctgcagatttgggtgcaggaacttgagttactgatggcaatatttggccagtttccagctgaagatgctcaagttccagatttgagtcgaggctacaaatgctcaagttccagatttgagtcgaggctgcaaagggaagtttgtggtggtgtccaggacactctgctgatgccatgtgtttgaaaatgtctgaattttgtgcatagacacactagcagtattttcataagtggagttacataattagggcatggacttgcataataattagcatgtgtaattaggcacagacttcttgtcctttagacaatcaagacatctaattacaaaattaagatgtaattatgtggtccaaggtctacatctttttttctacccattagagattacttttagaaaataattcaaaaaagctgatgaagaaatgaacatagacacgaatttgaggatgttaaagaaagtgttaagtgggctggtaagtttcctttggtctttcctctctgttgtaaggggaattatttaaaacattatggtccacttgaaagaataacttttaccaactgtgctgtcaaccttcggtactcacactaatgaagaggagtgttggtatgactaatccttggcgttcacgtgtggctcttgagtgtggtttgtaatcacacttgaacatggacctaaatgtgacgtactgggaattcattcaaacctattaatggagccatacggtggaaatcttaggataacttgggatagaggacatcctgccttcccgttctgccctggttctcccttgtgaccactttaaaaatcgactcatttggccaggtgtggtggcttatgcctttaatcccagcactttgggaggccaaggcaggaggaycgcttgaggccaggagttaagaccaacctggacaatatagggagaccctgtctctacaaagaatctgaaatactagttgggagtggtggcacatacctgtagtcccagctacttgggaagctgaggcaggagaatcacttgagcccaggagttttaggctgcagtgagcctccactgcactccagcctgggtgacagaaataaataaagaaataaatagcacattgctcagaataatgcaaaccagcacttaagctgtgtttcctttccctgaatatttgagtatttttattttaagtactccttattgactgcaggtgggaaagatcaaagagtatagcaaatactctgtcctttgaaaaagagtgattcttatagcagtaatagtttgagtttcaatacacacagaaagctagattgtactgatagtctccatgtttttccttgcccttaaattgtgatttggctgatctctgcgtgatgctwaacaaccagtttgactcattaattttgctgaactaactgaacttttgacctaattggctgctggttagggatcagagccatatgtgcaggtttttctaagccagttctgactttagctgtgttatccctctgttcctataaactgttgaaataccatagtaattccaatgttttgacagccacactgcacttctcagactgccgctttctcctgggaagtggcacagaaatctgtcggaccacgcttcctgatttttggttaagaaaatatgcttcccatatggttgcgggccgagaaaacaaagacttaaagaggttgtaagcatttggtgataggtcttctcctcatggcgccttccctccgttcctatttttactattctctgtaaggccagggaatgtgatgagggacaaattatgtgtgtggcagggaggggttagtcttgaccatgaaaatacacacatttgcacagggagcttttgccattgttagtttttttaccttgccttctgagcaattgctcgtgatagatttagaggcaaaggaaaggaattggagagagtggcatttttaaaacaatctattaagaggaattctaggtcagagaggggcagttggactacatcatctgtaaggcatctccagctcagaggtttcaggattcgttgatctccagcaggtcactcaacaggaggttgactggactcctattctactcactcaactctaggcctccaattttttggttcttagatgtggtgactggaaacctattcttttgcctttacttccagagagctcagtaattctagttcctaatagagcctaaagcatgagtgcaacttcatttctcagcttttgaaatctgcttttccctccaggtactccacatcagcattctcaagactggagaagttaggcctcagacatcccaagccttctcctttcattggaaacttgacatttttccrccaggtaagggctgtcttccattggcttccatcataaaatatgctgagggccaggcacagtggctcatggctgtaatcccagcactttgggaggccgaagcgtgtggatcacctgaggtcaggagttcgagaccagcctgaccaacatggtgaaaccccgtctctactaaatacaaaaaattagctgggcatggtggctcatgcctgtaatcccagctacttgggaggctgaggcaggagaatcacttgaacccaggaggtggaggttgcactgagccgagattgcaccattgcactttagcctgggcaacaagagcaaaaatctgtctcaaaaaataaaataaaatgaaataaaataaagtaaaatatgctgagcccaggacaggctttctgcatgaaacattggtcttgtccaggtccccacaccttgagcagtaaaggtgttctgtgatgccatgagccctcctctacttatatgaattgttatgtgatggcaagaatccatctcttatcactatcaatatgtattgagtcctgtcatccattcactcacccatttcccccaaaccccatatattgtatgtctaaatacgtcagaccctagagtgtagaagaagaggttacttgtgccctcaagtgcactgtcaaatgatggcatgcaacaccagatgagatacaccctagcactaaatagggtggtatagacggtagctgtaatcttctgtcagaggagagggtgatctgtcagggctaaaatcatcctaaggaacttcctgaagaaggaggtccttcagggcctgtggacatagagacgagggtacacacaccaggtgggtggcactatttatgtgagtgtaccaacgtgagaatgacagcacaggttgaccagcagcctggactgactagaggccaaatgctaaggtgcactgggcaatgcagttgggtgagagaaaggggcactagatgcttacagggtaggaaggcacgtgaagaactatttgtgtgttaacatttttgaggacagggacattgaaatggacaacactctgcaagggagaagaacataggttagagctgtagaacccaactgttgctgaagtccaggggtgaagccacgatggctcggtctggtcggtgatgagagtgaatagagatggataattgggagcaaaatgaagaactcttgtgacaaattagtgtagagaattcaaggcaaagtgagtcaaacataagcctaagctttgagccaggggaacagggagaatggctatgggttgacagaaataaaacgttgggtgggggagtggttcagggagaagacaagttttattttaagtatgttgcttgggatttgccagagtgacatgccagtggaaatggccaacagacatttgtagatataggtcaggactttatggtctacggttattttttctcacattgggttttctcagaagccagatggcttattctgctaagtcacggggacactgactccagacccaacgccaggagccggaacaccctgcatgggaagaaccaccaagccaaacaaaggcaggaagactaaatttgggacaatcctgataatatcccttcaacatctctagaatttcccccatccctacctccggaaaggctggcccttggcactagatagaaaagaaagctgctctttctgtccttttctgcccccaccttctcaattatttcttttccattcctttctgtgtccatcaccttttccatgatttgtcattgttgtttctgtcttcctagcatttttaaacaccttctcctctcatctctctctctggggtgggcggttcacaacttttaagctcacaaacaacagtctcaatgaggcttcctgttagccccttgaaacaagtgtgaagaaattttaaagtgtcaagatagaacaacaaaccagatcggaaagctaaagaaaatgcatttcacacatttctggggggaaatgatcagttgtattccgtggaataattaatttggtattaacattctgaggaaaacggcgtagctgtcgacatgaggagaacgctgtgctcccgcctctggagagcctccacatatgctcctttgcagcccgccatcctcacagctacaagccctgccaagttctttctagaacatagtaatttcgctgactatttttatattcatatatactttccttgatatatggcaagcttacgctgcagaattcagtagatttcatgagaaaggcatgtgtttccatgcaggacatccacactcctaacccccaactttccaccttcattccaccccttatgtatccaccccatactccattctcacaacacaaatctaccatttgccaccccccacacccaccccaactcatgagtattttcaggtctagtccattcccaccacacaatggatctagcattttccacccctccgtcaacccagctacacttctttcccattataaaatgtgtctagccaggcacagtggctcatacctgtaatcccagcactttgggaggccaaggcaggcagatgacctgaggtcaggagttccagaccagcctggccaacatggtgaaatcctgtctttattaaaaatacaaaaattagctgggtgtggtggcacatgcctgtaatcccagctactcaggaggctgagacaggagaatcgcttgaatccgggaggtggaggttgcaacgagctgagatcacaccactgcactccagcctgggtggcagagcaaaactctgtctcgaaaaaacaaacaaaacaacaacaacaacaaagtgtctagcattttgtcttatatatcttaaacatgttgaatttaattaaagtttaactcgaatggatcatgataattcagaatttgtgataattttgatagactcagtagaagttacatatagtggcagtaaaaagggctatatgataatgctaaatcaaatttcagagggcaatgttatagttgagaaagcaaactttttgaatattttagcagcaagtatacataagtagtttaagaactggtgatctctcctgtccaagacttttacatggcaattttttttaaagccttttgtttattccaatgtttcaaagtacctgaaagcaatataacttccattcttttttattgtttctgtaattgtattcttgctgttccaaattgtttactgaataagtttgaataattggaattttgcttaatcttattcttactatagtgctgtgtttccttcagggtttttgggaaagccaaatggagctcagaaagctgtatggacctctgtgtgggtaagaaggaaactcaacgtttctattatgtacgatattttctattatgtacgatattttgattttcacgtgttgaactgatatagaagaaatgccaagattaggaatgttgtatgtgtttctatttttcaaagggcccacaaagagggagtcctgcagtacagacaaggcttctagagaagaccctggggttgcccacggggggactctgctggcctgaaagagtaccactttccagcctttgcagccttgctgggctgggcacagcatcatctcccgttgctgtgctgaggggtgttgccacgggatgtggtggcctctttgcctcagagcacaaactgtccaacttgccttgacagtgcacagcaggtcttaccccatgagcatatctgaaccttactcagactcgggtccttcagcccatggggaaagtgtgctgccagcaacatgaccgtgtaatttatcacccaatccagttcccttttgaaagtgaaaggaagtgctattaataattaccccaggataaccttatcacctaagactatcccggatatgctggggcatatggtcaccctagttcttggccgtgtaaagtaatatagcccttctctttattttctgaatttctcctttgtatgctcctttgtttctaaaattccagattctggtgagcaaacccacgttcagaccacttactctattcaagatttaacaggcttgaattgtattgattctcaacatgtgtctttccacactgaagtcctaatcattttagttggttttcacgcagcttctcttcagccactgagcgatttttttgcagcttttcgtagacctctgggtcagcgatcacttttgtaggtgcattaaagttctcctgtgttgccgacgtacattccaatgggctccagtgatttgggggtcctatctccatagtattcatgatgtctgttctcctgatacccatttttgaaagggattggcttgtcctctttatggaaatggcccctcctaggaagcccacagttttggtcaagttcttctacctactttttggtttgctacgtggtcctgaaaaagtaataaattaagatgttaagatgctctctgtattagtcattgctgcataatggactaccccaaaactcagtgacataagcaacaatttatgatttatcatgtgtctaagggtcagctggagttggctggcctaagctgcacttggctggatggctccgctggacttctgggtgtatctgctggggaggacctcatgtggggcaccaaggctctgcatgtctctcatcctctttggaagtgtaagctcggctggcaggttctcatggtaagggcaaagactcaagagagcaagcctgatggtgcaagaacattatacatttctgctgaatcatttcagcttataccctattggttaaaccaagtcacacggctaaacccaagatgtgggcaggagggcactgtggccactttgaggccaaagcaagacacctggcccagcctgacattgatggagcagggaggtgtactcctcggatggacgagcggggaggcaaggcgtgtctttaaataacaagcaaccctgcttcactccctaagatctctttcaacttggccttcacttactttttcatttttgctttttggtgcatagcttcttgctttaagcgtgataggtgctcgataaaggctcaagaaattgaactgtctacatttctcttaccgttgtgtggttctattgctttttgtttttgttttttgttgttgttgttgtttgtttgttttgcaatagagtcttgctctgtcgcccaggctggagtgcagtggcatgatctcagctcactgcaacctctgcctcctgagctcaagcgatgctcctgcctcagcctcctgggcagctgggattacaggcgcccgccaccatgcctggctaatttttgtattcttagtagagacgggattttgccatgttagccaggctagtctcaaactcctgacctcaagtgatccacccatcttggcctcccaaagtgctgggattacaagtatgagccactgcacccagtctattgctttttttttttttttttttgagacggagtctcgctctgtcgcccaggctggagtgcagtggcgcgatctcggctcaccagtctattgctttttaaaggttctcattccagctctttctttcaaacagtctcattctgcagctgagttggcaatgacttggagactgtctcatatgcctctgagacacagcactgactcagaatgacagtgccttcaccagaatcagaaaaagtcctgactgagtttgaattctaggaaccacttttcttgagtgtttcttgtacagatatccaaagtagagcctttgggtatttaaaaataatttgtaaatgccaaattaagagtttaaagggcactgtatgaactagttgtgtgtgtgtragagagagagagagagagagaaggagagagagagagagaatgacagagaaaaagagagagagagaaaaggagagagaaagagacagagaaagagatagaaagagatagagaagatagaagagggggagagagagagagagaggagagagagaggtggagcgaattggtttccttgacaacaggatatccaatcaactttttcctccaactttaactgagttaacacaatttatccttttcatttcaagaaaacctaaatcatagagaatgatttcaaatgaggttatagagatcaagattgcagtatcatctccattctttgttcccacttctagtgaaaaggaaaaaagaaaggtgatggcataatttcttcctataaagctatcaacttttctcctttggaaaaaaaaagatgagccataaaacactgacttctttttaaatgtgtctactcccagatttagaggcaatatggtggcggtgtaaaaatgaaagggttgaaccaatctaaatcgaatgtcttttctaactctaaatgttattttcttactgcttaaattttagcaacatagtttcactcattgggaatggactatgctcaatgaacagcaaagacccttcttgcagagaacaatttaatttaaattacattagtttttattttattttttattttacttttattactaggaaatataatcaatcccagcttggtcttcttaaaaattgaaataatagattgattcattatttgacaagtgaaatgccacactctacactgttgatgccgtgtagagatgtattgggcctttagatgacagcttggcactgaatgttgggagaaaaatggacagggcaaatctcctcactgctcgagactggaaagccaactatgatggcaatgtatatttattatctggttgtcaccctagcaattcaagagtttgaggctcaaaactggaaattgactccttactcaattcccctcccactccctaccatggggacaatagggctggagaaggtttccatcaagatgggcagacaacatcaatgtttatcattaccaccaacactgccaccaccaccaccatcaccaccaccatcatcgagaacaaaatatcttcaccaagtgtctacttatgtagcctgctttgccaggttctgtgtaaataaaactacacacggtgtctctgccttctttgaacttgaatgtaaagcaggaggactggcgtggatacctatacagctattagtcgtggtggtacgtgataaaaaactctcctgaattgcacagcaacctggccatgtaacacaaagaaggcaaggctttattgctttagataaccttcatcaattaatgattacttgttatctccttcaggctgagaatgagccccaagttggatttatattccttcccaaactctgtaagaacagaatcaacattatcgtcatacattggtgattgaatatggtttatattcaatatataccaatattgaatataaatatatattgatatatattcaatatatcctgtttggatagagattatatcccctccaatttgtagctggactttgtaacccagtagatgataaacctttattaattacttatagttaagtaagaataaatatttacacagtgccctaagttcaggtcattagcaactcctaaaggccgccattcaaagctccttttccctttatctcattttgtgtgtgtgtgtgtgtgtgtgtgtgtgtgtgtgtgtgtgtgtgttttgttttgttttgccttttgaggcagagtcttgctctgtcatgcaggctggagtgcagtggcacgatctcagctcatggcaacctccacctccgaggttcaagtgattctctggtgcctcagccaaccaagttgctgggaatacaggcatgtgccatcacgcccagcaaatttttgtatttttggtaaagacggggcttcaacatgtcggccaggctggtctcaactcctgacctcaagtgatccaactccctcggcctgccaaaatgtgggaattacaggcgtgagtcaccatatccagcctatctcattgtcttttaaatgcttgctctatagttctgcttttacttagccttatccccgtttcttcttcccccaacatcactttagttttgatcttggctccctcttgttgaacttgacttttacacttcctggcatccatcagctatgccgctccattttggtaagtggcacctgcatccctggatcccttcatgatgccagccttgttgcataacctcatatactcccatcagagcatcaagttgtaggtaggtaagcatgaactttgtacataattcataaagtacaaatgagtataagaaaaaagtacacttgctcccaccctggggcccatctgctccttcacagaggcaacctctcttaaaaatttctttatagtcaaatggatcatatatgatacatgctgttctttaccttgctttgttcattaatggtatttgggaaattgtcccattttgcttcattcattcttgttaaattaggtagtgtttttaaggatttccttgtatgaatgtatcctaatttttaaaacaagttctcaattgataaacatctcttacttttacaaacaccatcgcagtgaagattttcatatacacatcattgatgtctggggtaagtatgcaagataaattcctagaaatggaattattaggtcaaagatggtctatgtttttaatttcgataaatatgactaaatttctctttctagggtttatgtcagtttagattcccataaatatgcatatgtccctcccatacttgtcattaaaatgtgtggtcacaattttaaatctttaccatttgatggtatattgctgcagtttcgatgtgcatttctctaattatgagcaagtttgagcatcttttcatatgtttaaaatgcaatgtattttgttttctgagggatcctttgccacttctctgttgggttattgatcttttcccactttatttgtagaagctctttgcatattaaagaaagtagccttttatatgccttaaatagtttctcctctttatcattgtctttgactttgcttatcatatatttcttccaatcagaaaacatttgtttttgtgttgttgactttaattgattttaacagtgtctacattttgcatcttactcagaaaggttttctccaccaaggatattttttcataaactttcatttttctagtttctttaaattttatttttaaaatatagaatgtttgatatatcaggaatttatttggaagatggagttagggacacacccttttycccccccyccaggagggtagagttccatctggaaattcatccttttccaaatgatttgaaatgtcacttttatcatttattaattcctaggtgtatttctgatttctctattctgttgtactgcttaatcacaagccagggctgcactgaatatcctcgtttggatgtcacgtttgtagcttcttgtacctagctgcagtagggtgttctaagaacatctttgtaagtatcaaagcctgaagcaatctatctcccagggaaccttaggtcccatactgaaaaaaaaaatcaatttagcaaataaataagcctttggtataaagggcctgacacttagcttcaaagttcacaccacaggagggggaggtgtctcatatgcctccaagttggaggtttttagcaccatttttaaaatttaattagctagcatgcatgaactaatagcaccttgtcaccaggcagtgaggaagttgagaactttgggatacataaggaaaagcatgtggcatcagcaatcaaaataacaaggtcgtttcaacactttttaaagctcagcttccatggtgccatccattaggagagtctgtgttctggaagtgactaaggtgtgaacacttttygtgtaattgctcttaaccatcatgtttatgtactatttagatggggttgaagaacagcatagagatggtttactttaatactggcagatggctatgtgagacttcctggcctaccatcatggatcaagaacaacgggaattgaagggctctgaaagactcacctgttggacatgtttgttctttgacttagaagatatgagacatctgaatacactgggcttgaacatgtggctgaggatagggtagggtggaaactattgctgatttgtccaagaaaagacaagtacttagacttaaattgggcagctgacacctggagatggcacttgtttttaaactggactgagctcagtagaatcatagatgttgaagaaaggtggaaattaagccaccgttgtggaagagcttcccagacactgatgctaaggagtcaaactttaggtttttgctgctgataaaagtgcaagcctcagtatgaggctcatttactaaatgtttgacccaaaaatgtggctcaattctaagaggaattgatgaaaatgaaaatatacatagtatattgagaaaacacaatacccttgaaacagtggaattaagcacagaagtcctgaattattctaacatctctggccatgaggccaaactgtgggcaatatttgggtcccctagcttggtgaaagctggctttcatgaaagcgttgaaagcaaagctgtgcattgccgttcccaataatgtgaatctgaaagcaaaattcatgtgagaccatcatgatggtctgtaggtcataattattgagcatcattcagtgagtgaaatatcaatattctcactggtcaaaatagcttaatcatgaacactaagcctgtaagagcaccttttttaaatgattggaattcactaaactgcattattgcattttaggggggccattattctctaaaagtgaatgccctgacatagtgtgctgatgttttaggaggcctttgagaataggaagaaagttgtccacaggacaactatcaccaagccaagcacactgcccagtaggtggaattatcaaaggaacaattgtccacagataaataagtggcttagaccaaagagacagaggaatttgatttgagtcccacttttcttgaatgaaccattaatagactcttcacccttacctgccaccagcatgatctcgttataccaaatagtgtattgctacaaagcttccatgctttcttatgatttaagaccaccttctttcccagtcttgatccaaagacccttctgaagtttacctaattttctggacttctaacttcttctttcagcccatttattttataccagttcatttccccccatcctctttctataacagcatatgggtgatggttgctgcatattttaatgactactgctatctaagtctttgtgacccaccctcataaagatcaagaacctgtattaattccctcttctttgggtagaarcatccaacagggcatgatagcttacagtagaaatctgcagttaaaatcccagcttcaactttctttctctctactgcttgttaccttaatggatttaggccaatcacttcccctctccagctttagttctcttagatgtaaaatgtgggatttggactaggtcggtgattttgacactgtttaatcatgaacctcagtaaataatatattaaccacattgttatctaatacacacacatacatttgaaataaaagttttacagaagaacaccttattcacagtataagaaccactttgatctattctattgtattgtattctatctgtaaaaaataaaacatttacaagttggtcacagcccattaaattgatttcatgaccactagtgagtcaaaatcagcaatttgagaagcaaagggccagatgatatctgaagtcctttccagttgtaaactggatgactacaarccaatgagacagcccctatcagtgtgcatcagaaaattgttagaggccattgtgtttgcctctttgtggtttaagattctgagaaacctctgtcaaagtcagtaaaagcccaccgttcacagctgaaaccgaactccagtggaagcacttctcctgcagagaccagctcccgcacctgactgtgggcccaggctgggcacctcccacccagtagcaccttcttgttytttaaaatcacaagttcaactattattgaaattatttccaagccttaactcggaatcatgctaagaagctaacacaaatatattaattgaccatttaagacatctctctgtaagatttttgcattgggtgtaaatatctaagtaattcatgtggatatcttctcccaggtaggtgtggccagctgattacttattcccagggagytggagcagcaggaaggaatggcctggaaactggaaataatcccatttgccggggtaagctagctgtggaaaactgaccaggctgtgggtaccgagagagcagcttcctgctaaacttcctgctgtgggtgaagggcagcgtttaaagagtaagatggtgctccccattccagcaaacactggccacagtggacagtccaggagagagctgtgcaccaggaaggtgtcagctggacagtagtcargcgtccagtaaagcagcgatgaggaggctgtcagtggacaccagggccccactagtgggtggttcaggaacctgagaagcccccggccctgagaaaggagtctaggtagtacagcagggtctcagcggtgagggctctgaggatgaaccaggaattgacattcagttctaagattcacagcatcatgtgaggcccaggaccagaagccagacctaatctccgatatcagtcagggtggacaggtccatcatggttggaacagatccatgctggagaggcaccgagtctcaygatgtgtggctggaggttgttcctgcttctggggccagggctgggcctgcagatgagggacagagcacctggctagaaaggagagaggactgcagcggctggagcgtcagccacagatttttaattttgctttccttgatattcacatccaaaatctaccatggagaactgtatatcacgttcaaggtggaagggaactaactcattcctcattagtaactatcaaatatggcatcagtaccttctttatcctgtaagtgacagctctgcacagatgtgttcccaatcgatagaatgtctcaattaaagttgcataaaagctctattttgagctaatatcttcaaataataaattccacatttaattgaagcgtacctgcaacaaatccaagttgttcaacccaaaatgcataatagagtatgtaaaacagtcatgaatcactgtgacatttgtcaaggcattctcccatctggaagcaggtccagaaagcacatggctgtatgcatatatcttttgtcaagaactttgcacagacagtctcaaaaagtgcacacatttacccaattcttagggctcttcactctgattgagaatgcaaatagcattcctattctatctaaaaagaagaaagacaagccatctttgatttcaaaatttaaaagaaattattactaaatttgaagaagcaatgagttcccaattcacttagagcttaaagttcctctttcatcactattttgtgagcagaggaactttttccaaacaagttcttagaaatccttgcttgattaaaaaccagttctaaatcttgttactcacatagggcaaaaggtaaaggaatctaaatgtctaaaaccaaattaactccagatactagtgtgaactttcaagcaaaaaaagtcacacaccaccgcatacacstttgaaattctactaaattttgaatgtttgacgttagcctttaaactggaacatattcttctttcttccttaggatctttaaatcttttaaagtttgggttgtttactatgcattctaattactcctgatcactcttatgtgtaacatttctatagctatgcacacaaagtaattccttagcaaggccccaccaagttttatgatgcctgcttgcctagggcagataatataaacttaactacgaaaataagttctttgattattcttcgtatctcaagaccgtgctcctaacaacctctcctccatctcaccctcaagctgcaagaattttgcaacccactctatgaagtttttccaccctgagtaaggctgtcagtttattggcctatttataaaggtctgactctctgacatgttctccaggctccccacattaaccactaaggaggcactctttgcagatgaatttttttttttttttttttttttttggcctcggcttaaagaggaacctattaacctttgcccggaatctatgsctggtgaatggcttgtcatagcatgttagtttgatgaggcaattgtggtcttttttgttaaaacaccccccagcacctcttgatactacttggcctactggagatgtgggcatccaggattgaatcaaaactactgcacttcacaacagagctactgcaggaaggaaatccaggtactccctggcttgtgccacctccatcttttccgtggctaatgtaatgcctagtgcatattcaccacaaagaggcaactgttgaatggctcttccatttgcctttgaagattgcttgtaactcttcaagttcacttcttcatctcactgccagaccacagcttgagactgatgattgacatkgccactaggttcttcccaaagactccagcctaaagattgttagctgcttcccccaaaggcttagccttctctgctagagttttggttctttggagcatcccatgagcaagaagcctcagctctttgtcctcctctgtgtaggagcccacaaggatgctttatctccaatctggaatggacacttagcatcctkagttctgccctgctcaaaatccatacctgttcatgagtaccagggcttcagggcccgagaacccacagctaacacccataggagaaaggtttcatatgagtaggtgggatgggttttcatgcctctacaacctggccagcaggaggaacactgtgacccatggtttcagaattgatggtctcccacttctcggttagatctaggtattgagaataacctgaaggacatttggctggaggacattatttttattgtgttaaaatatgcatcacacaaaatgtactctcctatttttcattgtatagatcagttgcattaagtaccttcacattgtcgtgcagctatcatcatcgttcacatccagaatttttttcatcttgcaaagctgaaactttgtcctcattaaacattaactctcccttccctcctcccccaggccctgacaaccaccattttaccttctgtctctacaaatttgactactctaagtacctcaataaagtggaatcatatggtatttttccttttgtaactggtttatttcacttaatataatatcctcaaggttaatccatgttgtagcacatgggagaactactgcctttttaaggctgagtaatattccattgtaagcctattctgccttttgtttattcgtttgtttgtagatggcggagtgtgttacttccagcattgagctamtgtgaataatgttacttgaatatggatgtggaaatacctctttgagaccctgcttttagttcttttgggtatatatgcagaggtggaattgccagatcacagagtaaatctatttttagctctttgaagaccgtcatactgttttccatagtgaccataccatttcacctttggaggacatcttatagcaatgctttgttgtccccttttcaccacgattatgtggccattacttcttgttttcaaaccttgagagtgagctcaggttaaatttacacttccctttgtgccctggatcccaactggtcaaggtgaaccacacatttctaattggaatgtatgaccccagtgactttgcctgtaacttccttttggctaggccagtaagcgcatttttaaccaaaccgaccccattatcaacaaatgcttgcactgcacgataaattcagtttgctttaataaattcccagtagtcctcacccagagctccttctcctcttatctcactccttgctgccaaaccctttacaatttatgtgtctgcctttcggttctgccttcagccccctccaagtttcctctttcccaccagctcactgtggcctttgtgtctcacataaattttgtcttctgtgtctgaaactcttactgacttctgcttccttgytccctgggtctacactgttccttctcttcctggaactgacccttcgatctctgggcttcctaccttgagtaatttgtcaaaatcctgttcttgcaattggtggcttctcaatttttttcctctgggtttttttcccacagtctttccactatatcacagggcatacactcctgcttcatgactgttcatgacatattgaattcccctcttgtaccccacagtctctgcactgagtgtgtgctcattgggaaaggttagctcacattatacctatccaaaaaaggagaggtggcaggtggcctgtggagaagagtgtatccaggcacatatgcatgggagaaagttcagaggttttggctgagatagaaagaagaagagtagaggccaaatgtgtgctaggaaaatgtgatgtttggggcacaagtagagaggacaaccttggcagtggcagaygagagagaacctcaggactggtgctaaggaggtgggttatttaaagaaagttgtgcaggtatagagtggagaaggggtgcagggggaggatggaattgagttaaaaaaaaaaactagcaaaaaacattctgatagcacaggtgagagagataagagtgatttagattatcagaaatggaaggaaaagaaggagaattttatagagaaagtgtcctgtagtggccgggtgtggtgactcgtgcctgtaattctagcacattgggaggccgaggtggggagattgcttgagcccaggagtttgagacagcctgggcaatatagtgaaaccacatctctacaaaaaataccaaaattagctgggtgtggtggcatgtgcgcctgttgtcccaagtactttggaggctgagataggaggatcgcttgagccaggaaggcagaggctgcagtgagctgagatcatgtcactgtaatcctgtcgaaaaaaaaggaaaaaaaaaaaagaaaagaaaatgtcctaaaaatgcagcaagtcattgattgtaacaagtaagagatgagtcaacattaatcactgaggctgacttcaaatgctggagacaacatggtgattccaccataattaagaggttgaacagggcaaagacaaaatagttttatctttttcttaatccgttggagcttgtcctcatcctcatgtgttcaagctgttataacaaagtgccatagactgggtggcttatgaataacagaaatttatttctcatagttgtggggactgggaagtccaagatcaaggaaccaacagattcattgtctggtgagggctcactttctggttcatagatggtgccttctcactgcaccctcccgtggtggaagaggtgaaagagctccctagggcctcctttataagagcactaatcctgttcaagagggctctgccctcatgacccatttgtcccccaaagaccccaccttctaatactgtcatctgggggtttaagatttcaacatatgaatytgttggggggatggatacaaacattcagaccatggcagagctgctaaggagacattgggtgcaaggtgacttaggaatgaagcactcagaggatcaggaagctgcattaggaaggagagaggaatgggagctccagggtaggcctgraatccggaatctccacctcccaccctccaacaatcgaatggggtgtttcccgcagtgtgtccttgagaccatcgtttccactgacagtaataattgttacatggggaatagcaaaaggaacacaggtctcttcagtgtagaaagactccgaacctttcatgcagcaatgtccttcgacaatctccaagtgagaaatttaggatgcagtctcttttttttttttttttttttttgagacagagtctcgttttgtcgcccaggctggagtgctgtggcgcgatctccgctcactgcaagctccgccttccgggttcacaccattctcctgcctcagcctcccgagtagctgggactacaggcgcccgccactgcgcccggctaattttttgtatttttaggagagacggggtttcaccttgttagccaggatggtctcgatctcctgacctcgtgatccacccgcctcggcctcccaaagtgctgggattacaggcgtgagccaccgcgcccggccaggatgcagtctttatttgaccacagaacatttttccccccagagtatttcttgggactaggatatggagaacaggctttgagagaaaacactgatctaataaataccagcattttactcctaaagaattccccataaaagacaaccattaatagaaatagtttacttcaccattgtgaattatcaacattacaaccagtaattactaattacctccattttgagttgatgttttgggggatgtttttatcctgcagtgctatggagaggctgggaacgcactgctgcctgtgttgcttgtttatttatttccttttattcccagtgttctctcattccccttcccatccccaatagtcaaccattccaattgtgtttaatgtgtttttttttcacatgttcttgcaaaytgtgcattatcatttcgtggatattatccttagtttatgccaatagtactgccgtagatctcattctattccttagttttttcatttagcactgtgctttcaaggtccagcacagagttcccattgagtctgctgcttcccatggctgcctgacatgccacggatgcctgtacctacttcacctgtccactgtcccaggaggagatacccagtggccctcagcaagcaaccctgcagtgggcatccttttatgggacctctacggacctgtgggagaactctatgggctatccatcttgccctatgattataatatatatatatttatttatttatatatatatatttgttccctaaggccacttacatattaattgctaataatctgaaagtgttttccagcactcagtgtggatcatgtccctccaatatagtatctcccatggccatcccaataacatccctgagagtttggccgggctagttgcattatcctcaatcatacagaaacatgagtgactagaatgaaaagggcgtgtggctagtaagaggtgtgagcagagttgcacaggttctttttattaatccaaagctctttccattccactgcctcttcttgctgtttcttcaacattccaaacagtcctgccttaggacgtttgccataacaatacgtaacataattatttgttggttgacctgctttcctggtagaatgcaaacttcacgagggtagggacttgctctcttgtttgtgctgctatttccagtgcctagaatggtgactgacacataatagatgctcagtaaatatctgttgcgtgaacagaagaatcatctctaagtacatgtctttcatgtcagatttgtctccaaggaaacttcaaacaggaaggtcttgctatttggctaatttgggtaatggtactattttactggagacaaataaaaggaattagggggagagtctcatattaaaatagagggttggataaggggagtttatamtctttccccatcagtggcttttatgctctatcaattcagtagttagcccatcaaagtaaaaaattgaattacactgtgtaaggccaccttgggatccaaaagataaaagagaagataagggacatgttytcctgatacactagctgggctccactcacccaagtcattaattggagtcttattgggctactgcctcatatcctactcccgaagagytgatacctcccataacctcattcttagggtcagctggccgtaccagaaagagcactggattaggagccagatctgggttctggtcttagctcagctatccctactgatgggactagaatgaatgagtcatttatcattttcttccctttaaaaaatacttgaggccaggctcagtggctcaccgctgtaatcccagcactttgggaggccgaggcgggtggatcatgaggtcaggmgttcgagaccagcctgaccaacatggcgaaaccccgtctgtactaaaaaaatacaaaaattagcctagtatggtgccgcgcacctgtaatcccagctactcaggaggctgaggcaggagaatagcttgaacctgggaggcggaggttgcagtgagctgagatcatgccactgcactccagcctgggcgacagagtgagactctgtctcagaaacaaaacaaacaacaacaacaacaacaaaacaaaacaaacaaaaaaacttgagcacctacctatctcacaggtctgacatgagactcaaaggagctctcagagccctcccagggcagactgtccaagtatcagggattccaacygggattccactgctccttggtgttcttgtagccagcctgcatcttggggagtctgccgaattcagaagccccatacctcaccagctcggggtgagcttcttgagtcctgcacatgggtcctctcaccctcatgtctccagggactcctccgcctgggtaaggggagacagcacacatcatccagtcctctcccctctttgggcctcattttcctagctatgaaatgagggggttgggctagaatgatcatcttgaagcttccctccatctctaaagtattatgatcagtgctttattattttttccctgcctctgatttctctcccactgtgtctgaaattcttttgccattaaattttctcttctttcagagttgcatatctgggctttttatacctagtcctggacagcacattcttcccatggcactgggcttcctcccctggcctcactgtcttttcaggagtgacattagctttttcccagaccgtgtattcctgttctaagcccacacatcatttggggagagatgattttgccatgtactctcacaaatatatgtcctgcacatattctatggaatagacacacacacacacacacacacacacacacacacacacacacacagctcccttcaatacccccgaatatacatgcctgggcataacgtgtgggcaaaaatattcagggacagccaaatgactattttaatgttcctttgtccctgcagggccatcgaactatttatttagtagcttgatgctgtttgcatcaacaactttgccttataggctgttcttcatgtttatgattcttactgtgaaaaaaattgcttgcctaacatctgttctgaatttgttttttctttatttttatttatctgttccccattgaattacatttgcaccaagaacagtaacttgaattgtaatcttcagtgtccttcaggatttctgcacacttcaatacatctcttaattactctttttttattgttatgagatatacatatatacccatgctcacactggcagattggtttgtagcttacctctgcctgtccccctctggggactaagttttattaactgaataaattagatgggtgggtatattcaatagagtagggaggtttatcattacaggtttctttcagatatttttcccccttgctgcccagttctctcctttagccatagctctgttttggagaaagctttattgtagcttgacagagtcataactcaccaggatgagaaggaccacttcatcttatagatgaagaagctgagggccaggggggaggctatcttcctgcctgcttccagaaagcgtggagaatagctgccccagcgccattcttgagaggtagagcacagcttgaccctgcctctccaggctgccaagcctgggggctttccttagcagcaggaggcctcctgggactaccgtgccaccacccacgcaccacaccattgctgcagacccagtcctttgcagagcaagcattttgcatgttttccatgggtgtggctgggttggggtggttagmaaagtgtgcagaagatggtgtgggagaagggcagggcatggagaatcacagtggggtctcttcatgcttgtggactctcctggtggagctggttctctggcctccctcaggctggctcgtgtgactggagccctcattaaccccctgctctcaccacttagaaaccaacccagggaccaaccaagcatattcccagcagtaggcaagaagatccctaaagaagggaagtgagacctgcgtttwttcccctgatacttgggaaatctagcagatatagagacagtgacccaggtatccaagggattggtccaaattcaccatcctgtaactcgaaatgcaatgctctttctaccatcggttctccattctttctggaaggtgtgtcccccttcttccttttgccctttcccacactctttgggggtctatgtccatgtcttccaatggcacaaagtcagaggggatggtttccccatgtcttgaagtgctcactgctggccctgctccagatgttgtccactcaacagacatttcagtctttgctacrtgtacagcatggagctcatggcagtgggagagactacccatcccctccagaaaatgtatcattcatgtctcttttcccaaagaaagctgacatctaatttaggagaaaaacccagacatgggccaagttgctcaagaatgccaggtagtatagtggctgacttctacaagagaaggacaggacacccagaaagaaacccagaagaacaggaaacccagaaagaacaggaaacaggattctgggtagaatcatggaccagtgaaggcagagaaggcttctaggaggaagtaggtcttgaagaatgaataagggggaggtgagggcaaagaatgttccactcagtaaaaacagccagagaaaagcccttgaggtgggaatggttgggggaatggaagttgtggctggagagagggacacagatggattggccagtcatcatcacacactggaaagccttcgttgccaggcgaagacatgtttgttatccttttgttacccttgctaatggcctgtaagctgcttaaagccatgtcttgcaggtcagtttctagagatggggtttgaggggcaagatgtttactagggatcagtgaagggaaggaggagaaagctgtcagtcatcccccagtaggacaaaatgccacctctctgtgttcctactcagcccggccactggatgtgggctttaccaggaagggggtgaccccagtgacatggatctcagcagctgaggctggccctgaaggagctaacagctggaggctccctgctgaccacagtctcggctgctggacagcaagtccttcccagaagggggatctggacgacatgtcttgatgtcatcacatcatgggaactctagttcaaatgaagtttttggcagaatcaccaggttgaagtgggaggtgatctgagggttctgtatgctsagcttccccacagaggactctttgccccgctagacctgagactggctggggccagccacaaaggcagscccatggctgatggagccaacagggcacctctgcagggggcacctctccagggtggtaggagtgaaatagagcaggccccaagttttagaaaatgaccaggggctgggtgaattttggaagcaagataaatgtggataaagagaaaaaaggattctgaggtttcaagtctggcttcagagttgaaasctccttctgccaggaggagtaatagggaagccaagaggataaaatgatttcccagtcctggaaaggcagcttaaaaccatccttccacttgctcttaagggtgaggcgctctgctagcttctcagggatgcacggacagataagatgggctttgtcttgagagaacttgcagagcgatcaggagcttatcaataaacagagggtgatgcaggtcagtagaggaaaggaccaggtgccacagaaactacaaggagcgaagggtccatgaagccttcacaaagaggggcaggtgacccgactgtctgaagttttccaaactaacaagagggcagccggcactttagagggtaaatacttgcaaagaggcagagcagggggaatactgcacatctggggaaccataaataactttttcacagcaagaatgaaaggctgtggttcccaaactgtgtgctgagacaccccagggtgccacagtgaactcacaggggcttcctgggctatggtattttacacattcgtgacaaatacagcaacatctgtcaggcactgtaggaactgctttcagtttatgtgtattatttcttcaaatgtccactaacttgctagaacatgtatacttataaagttgtttgaacttatctacttagaaatgagactgtggggttcttcttttggcctggggagcgctacgaagacattactgagtcactaagggcaccgtgaactgagaacgtttggaaacacaggtataagaggaatggggtgaggagagaagtcaggagctcctgaagggcccctgcttggttacaagtgaagaagcttaaacttgcttcaaatgatggagaaccactagagatttatagggaatagaacgacacagtcagcttctgttttacaaaggtgattggccttggcgggagggttggtttggagacagagagcttcactgggagctcctcagtggtccaggcgagagagacagggcctgaagccagttggcattagacgttggagctggaatacagcacactgygttgacatcatggaattcccactgcatgcttaacaccataatgaacactagacatcaaagataagaagacaagatgtgtttccaccactcacaracgagcagaaagacagtcaggaaaaaaattacaattactagagaaccactaggagtcaaccaggcaagaaaagaggagccgttccaggcraggcagggggaacagcatgtgcaaaggcatgggagtgagagatcatggagggtttcagtcggtatgatcaggattggctcttggcggtggggtggggagggggaccgggggcaggcaggcggggggaatarggwggcacaaggccaaagaacaaggcagggagcagggtgtgaaggacatcatgtgccacatgctaaagacttggcaaaccattgaagggtgttcagtaaagaagcagcatactcagatttgcactttaccaagtcctaggtggataagtggagttggggcccacatgtggacaagcagcaggtcagaatgatggagacagaaacctctgagtgggaggtccaaagtctggccaggaagaggaccagggattgtaccagcctgaaaagggcaaaagaaagttgctgaacaggctctacaaactcctgaaaggggaggggctgagaaagcgctggttcggtccattgatctctgcagggctctgtgaattcagggtggaccccaggcatgagtactctgagggtaacatgggcagatgttgcctgaccctgctcagagtgacagacaggagccctgggaaagcaactccagactccatggcctatgactgtgtcactggctcctcaagaaaactctccctggtagctgagtctgctctgtcattcagctgactcaagcctcttgctctaatgacagacgggagagctgacccaaaagggaaagacactccatgagccaagcagggacagagccccaggactctggggaccctgctttctccatggcaccctgtggaccatccagccccggaggagcgcctgtgagtcraatgcccaggtactcccagcactggacttctccttaactttctctgaactttctggaagttgagcatctcagacactcacaactgtgatctgcagtagcgtctacccctttcctcactgagcctcctgccgcttccacatggacattccatggcaaaggtcagacttgagggtaggacagcagctaccctgttagcatcctcagcctgctgggaaataaaactgtcacggagacaagaagttctcagatgcttggcatttagcagttgtcagaggagctgaaagccctcatcagttctacctgaaaatcagaagtttcccaacgtgcatggcttttttttttttttttttttttttttttttttgagacagagtcttgctcttgtcacccaggctggaaagcaatggcgcaatttttgtacttttagtagagacggggtttcgccatgttggccaggctggtctcaaaatcctgacctcaggtgatccgcaagtgctgggattacaggcrtgagccactacgcccggcctgtgcatgcstttctgttccttctgctgatgtggggggtgttgggctcctgtcaggggcctcctgatgccccgttggggcacttcctcgctcagcttcctcgtccctgacaaagtggcagcagcagggtgtggcccatggaaggtgaccatgaccagcattttcattaaactttactgttcggacaaactattctcatctgacctcataacggtctctttaatcataggaacagtttcaagaaggttgatttgctcaaggtgatacagctgttaaattacaggacaaagccttgagcccaagttcctaagactctctgacacctgcaactgtggcactgccagccgccactctgcctctgacagtctcgggggaccaatccagtgacaaattctccctctcctttttttttttcattgcagaagtcacatgcgctcattataaaacactgaacgttcaaggaatagataagatgaaaaggacagtgccccataatttcctgctccagatctatgccctgtaagccaggggtctgacacagagtatgtgctcaataaatgctttctgaagggactagttaatagaaagaccgactataatttattaacagagctccccatactattttacaatgtgcttttccatttggctgggtcatttggacattttttcatgtcggtgcctgtaggtgaccccctgcccaccaccaccaggaacagtctatagctcggtcacccctaacaggggcaggccttctggaacaaggccaggcagcccccaggctaatcccaacagtctattctacttaagttcccagaaggcggctgtgaactattttggtttaactgactggtcagtttcaaaaaagagagaaaaccactaattaaacaagtcaaacaagtggttatttttgtctacacaatacttcactgatttgcctacattttctcttcaaccaggtgctttggagttgaataagtgaattcttaattgcatagctaaatgtagatgaataactggttaagaatttcttgcccggaaaggagtctatatgtaagtttggattagagtgaaccaaggccttacctctttaattgggctgggggttttctggtccattaagcaagaatatgctctaaatctccacctttgaaagccacagtctgcacagctgggagcctgcctgctttcccttgcacacctacccagcactggagcgggttcaaagacaggccacccgagctaagagcagtcactggaatagatgacagcatgctcaccaccaaggacctgggctggggtcaagtccctgtcttgggcaagtgactttgcctctctaagtctcagtttcttattctgaaaagtggataaaataatgtcctcatccattttctatgagaattacatgaggaaatacaggcaatgcacttagaatgaagcctggtcaatagtaaaccctcaaaataaatgctaacgattgttgttaatctcaaaggtttgagaagaatctacaacctctgcaaatatttcactagtatgagaagtttctttgcaccctataggaagtagacctaaaattcaaacaccccatactttaatttcctttcaaatttgtaggaattataggatttacagttccagtaaactacagagataacttagttttcactcccatatttcagccatggcccagagagtttcagaaatttgcgcctggaacggatttctgtgtgagtggtatggctggatgaacccggatcccacctgctaagctgttgcatattaatctccaggacccatgccacctcagggagcaggaagacactgcctcacattcacacctttgtgcaataccaagatcaggcccttctagggaagtaagctttgagaggcagaatggcactgggaattcacaaggttgagaagaaaaaggggcaccatactagttaggacttcctgatttcaaattatgggaaacccaacacaaactaactttagcacaaactaactaatgtaagctaggaggatggaatgaagagctgcaggaggaaagtttggactctatattgtgctttgtaggcagtctgtctatctgaaatctctgctggtctctattagctccttctgcagaccggctctctccatgtggtacaaaaatggctgccatcagccctagattaatatattctcagtttagcagctccaggagaaagtcagagcttttcaccccagcatccatgtagaaatcccaatgaaggatccataccggcctggagtgggtcatgtgtccaccccttggaccagtcactgttgccaaggagatgagatactaggattggccatgcctgggtggtgagcccaccaccatgaccagaggggcagggttctatcactgagagctccttcagaactgcatggaatgcgagggtggttcctcaagatgtagtgggcagacaaaagcaggtgagccatcccagacacccaaaacgaaagctatgtgtgcctaggacacacttcccttacattttttctccattcaaggtcttttcaggagctcctcaaactacagatgagagtttttgtaaatataaattcacaagattacacaatttacatgtaaaatgggaccagttttctcacgagattcataaaccagctctgaagcaattctaaaggaattgttgcaaaattgtttttagcattagcaatattactacaaaaaaaaaaaaaaaagaagcaggaagactcccaaggtgactacttggaaggacaactttcatttgaaagtagaagtattattttgttcctttaaaaaaatctagattatgcgtaagattattatgataactaaatcaatacaaatatattaccaaaagttgcgtgtgccctacagtgtaattgctttccttttagatctaagaatttagggaaatgagaatgggtgtgaactttggttaaatatagagcaggttttcacccaatcagattgggtccacaatctgtcaatcacatcaggatcccctgggagcttgttaaaataggaggtgcttgggtcccaccccagagactctggtctggtaggtctgggtagggccaggcattattatttctgaatgctccgcagttggttttgacaagccctcgaggctggaaaccatggccctaggacagcatttctcagagtatggaaagagtcctcttgcatcagaatctgagagctggttaaaatcagattcctgggccctacccaggcctgctagattagtcttggtagggagcttggctgtgaatttagagtttattaagctccccagtgactttttaaaaatttttaattttgaaataattatagatggacaggaagttgaaaaaaatatgtatggggaagtcctatgttcccattacccagcttcccccaatggtaacctcttgcgtgactatagtacgttatcaaaaccaggagaatgaccctggtatgacccacagtgcttatcatattttttccaggtttatatgcactcgtgtgtgtgtgtgtgtgtgtagttctatgcagttttatcacctttgtagatctgtgtaacccccaccacagccaagataaagactatcctatgaccataagctctctagaactacccctgtatagccacatgcacccatcaccacccccatccctaacccctggcaaccactaatgtgttctccatctctataattttatttcaagaatgttatgtaaacagaatcatacagcatgtaatctaatgatatttgttttttcagtcacaaaattcccttgagattcatccaaatttgtgcatgtaacaatagcttgttcttttttaaattgctgcatagtattccgttgtatagatgtactacagtttgtttacccatctacccaatgaagaacatttgaattgttttcagtttttgcctattacaaacaaagctgctgtaaacattcatgtacatgtgttctgtgaatgtaagttttcacgtctctgggacagatgttcaagagtgcaattgctgggtcatagcataagtatgtggttagttttataagaaatcgccaaagcggctttatggttttaccttcacatcagcaacttataaatgatccactttctccacatgtttgccagcctttgatgttatcactattcttttaaaattttagcctttctgatagatgtgaaatgatatctcattgtggttttaatttgaacttcaccaatggctaataatgttaaacatcttttcatgtgtttacttggcatctgtatatcctctgtagtgaaatgtctgttcatgtcttttgcccattttctattttatttttccataagttattgggggtacaggtagtatttggttacatgagtaagttctttagtggtgatttctgagattttggtgcacccatcacctgagcagtacacactgcaccatatttgtgtcttttatccctcaccctcctcccactctccccaacccccaagtccccaaagtccattgtatcattcgtatgcctttgtgtcctcatagcttagttcccacatatcagtgagaacataggatgtttggtttcccattcctgagttgcttcactcagaataatactctccagtctcatccaagtcactgcaaatgctgttatgtcattccttttaatggcagcatagtattccaccatacatatataccacagtttctttatccactcattgactgatggacatttgggttggttccatgattttgcaatcgtgagttgtgctgctatgaacatgccatgcaagtatcttttttgaataatgacttcttttcctctgggtagatacccagtagtgggattgctggatcaaatggtagttctacttttagttctttaaggaaactccacactgttttccatactggctgtactagtttacagtcccaccagcagggtagaagtgctccctgatcactgcatccacgccaacatctactgtttttttaattattattttttgattatagccatttttgcaggagtaaggttgtatcacattgcagttttgatcggcatttccctgatcatcagtgatgctgagcattttttcatttgtttattggccatttgtgtatcttcttttgagaattgtctattcaggtccttagcccactttttgatgggattgtttgtttttttcttactgatttttttgagttcattgtagattctggatattagtcctttgtcagatatatagattgtgaagattttctcctactctgcgggttgtctgttgactctgttgactgttccttttaccgtacaaaagctctttactttaattaggtcccagctatttatctttgtttttgttgcatttgcttttgggttcttggtcacgaaatccttgtctaaaccaatgtctagaaaggtttttctaatattatcttctagaatttttatagtttcaggtcttaggtttaagtctttaatccatcttgagtgaatttttgtatgagagatgaagatccagtttattcycctacatgtggctagccaattatcccagcatcgtttattgaaagggtgtcctttccctacttcatgtttttgtttgctttgtcgaagatcagttggttgtaagtatttgagtttatttctgggttctctattctcttccattggtctatatgcctgtttttataccagtatcatgctgttttggtagctatggccttatagtatagtttgaaatcagatagtgagatacctccagatttgttctttttgcttagtcttgctttggctatgcaggctcttttttggttccatatgcattttagaattcttttttctaattctgtgaagaatgatggtggcattttgatggggattgcattgaatttgtagattgcttttggcagtatgatcattttcacaatattgattcgacccatccatgagcatgggatgtgtttccatttgtttgtttcatctatgatttctttcagcagtgttttgtagttttccttgtagagttctttcsactccttggttaggtatattcctaagtatttttatttttttgcagctattgtaaaaggggttgagttcttgatttgattctctgcttggtcattgttggtgtatagaagagctactgattggtgtacattaatcttgtatctggaaactttgctgaattttttttatcagttccaggacctttctggaggagtccttagggttttcaaggtaaacgattgtattgtcagcagtgacagtttgacttcctctttagcgatacggatgctctcctttctttcttccttccttccttcattccctccctccctaccytctctttytctttctctctttytctctttctttctttctttctttctttctttctttctttctttctttctttctttctttctttcttctctctctctctctctctttctctttctccctctctctctctctctctttctttctcttgtctgattgttctggctaggacttccagtactatgttgaagaggagtggtgggagtgggcatccttgtcttgttccagttccgagagggaatgctttcagcttttccccattcagtattatgttggctgtgtgtttgttatagatggcctttattacattaaggtatgtcccttgtatgccgattttgctgagagttttaatcataaggggatgctagattttgttgaatactttttctgcatctattgagattatcatgtgatttttgtttttaattctgtttatgtggtgtatcacatttattgacttgcgtatattaaaccatccctgcatccctgttatgaaacccacctgatgttcgtggattatctttttgatatgttgttggatttggttagctagtattttgttaaggattttagcatctatgttcatcaaggatatcggtctgtagttttctttttcggttgcatcctttcctggttttggttttagggtgatgctggcttcatagaatgagttagggagggttccttctttctctatcttgtggaatagtgtgaaaagtattggtaccaattcttctttgaatgtctggtagaattctgctgtgaatccagatgcaagtccttagtcaggtaggtagtttgcaaatattgtctcctagcctgtagcatgtcttttcatcttcttaacagtgtctttgaaagggcaaaaatttttaattttgatcaagttcaactttttgatttttgtcctttatggattatgttttagtgtcaagtctaagaactttttgccaagctctaattttcaaagattttttttttacttttctaaaagttttatagtttcacattctacatttaattctgtagtccattttgagttcattttttgcataaggtatgaggttcatattttgcctatggatgccaattactctagcatcttttttttttttctcactctgtctcccagtctgtagtgcagtggcttgatcttggatcactgcaacctccaccttccaggttcaagcaattctcctgcctcagcctcctgagtagctggcactacaggtatgtgccaccatgcccagatagttatttgtatttttagtacagatggggtttaccatgttggccaggatggtctcaaactcctgatctcaagttatccacctgcctcggcctcccaaagtgctggaattacaggcgcgatccactatgcctggcctactctagcatcttttgttgaaaaacctacccttcctgcattgaattgcttttgtatctttgtcaaaattatcagttgagcatatatatgtgggtctacttctgggttctctattttgtcccattgatctatgtgtttgtctttctgccaataccacacagtcttgacgactacagccaagttttgggatctcgtagactgattcctcccactttattcttttttcaaaattgatttagttattttaagttctttgcctttccatataagttttggaataagtttgtctacacctacaaatattcttgctgagactttgrttggaattgcattaaactgatatgccagttttgggagaattgatatttttacattgtggagtcttccaatccatgaacatgatatgtttctccacttagttcttcttttatttctttcatcaacattgtaaatggcaatgtgctttcatttggtttacacatgttcattgttagcatgtagaaatgctattgacttttttttgtatgttgatctggaatcctgcaaccttgctgaactcacttattagttctaagattgtttttaaattttttagtagtttctctgtagatatcatgtcatctcaaaatagggacaattttatttattccttttcagtctatatgcttttcatttattttcttgccttattgcactggctagaacttccaatactatgtcaaacaagagtagtgaaagaggacatccttgccttgttccccatcttaaggaaaagcattcagtctttcacattaagtatgacattagctgtaaggtttttgtagatgccctttatcaagttgaggaactcctctctattcctgagagtgtttatcatgaacaagtgctggattttgtcaaatgctttctcatgtcaactgatataatcacataattttttatttttcaggcagttaatatggtgaattatattgattgttttgaaaatattgaatcagccttggacacctagaataaataccacttggttttgatatataagtctttttatatagtgctagatttgatttgttgaagatttttgtgtttaaggtcatgagagatactggtctatacttttcttgtagtatctttggctggttttggtatcagagtaaacctgtcctcataaattgagttgtgaagtgttccctcctcttttatcttctggaagatattgtaaaattagtgttaattcttcttttaatatttggtagaattcttcattgagaattctacattagagaattgtactctctaagtacattgagtaccacatcatagggtggtgtaatttttgcttcaamcatcaagtatgatttaagagactccaaggtatcctggcctggagatgtgtttttcaggaaattttaaattatgaattcaaataaaaaatatgaataattaaattttgaaatttaattaaaattattagtagttttgtggttgtaagattattcagattgcccacttcatcttgattgagctttaatagtttgtaattttcatagaattggtcaatttctttctagtttttaaatatattagtctaaagttgtttgtagtagacccttatccttttagtagctgcagtgtttgtagtgatatcccatttcattcctgatgttggtgttttgtgtcttctctcttttatctttgttagtcttgttcgaggtttatccattttattgatattttccaaagaaccagtttttcgttcatcagtttttctgtggtttttgttttcaggttcatagagttctgcacttttttttttattatttcctttcctgtgcttgataaggttctttgttcttctttttctagtttcttgagatgggagcatagacgattcatttaagatctttcctcttttctaaagtagcatttagtgctatcaatttctctctccacattgctttagctgcagccacacattttgatatattgttatctagtcattacattatattcaccattatagtagtgtatttgttctcttttattccttctgctccttgtttcatttttcttacctttttgtggataacttgaacatttttcagaattccattttggcttatcataattttaaaatagtttttcttagttcttgtgtaaatacacatatataatttatcacaatctatgagtatgaatgccttaccattttgagtgatatgtagaaatcttacttccattttggaccttttagcctccttacttttaaaatataattgtcttaagtatatcttctaagtgcattgagtaccacatcatatggtggtgaaatttttgcttcaaccatcaagaatgatttaagagactcctgagaaggatagtctattatttttatccatttcattgtcctttcctttctgaagttccaaactttcttctgttatcatctccctttcctttctgtttggagaacatccttcagccattctttaagggtaaatatgtgagtgacaaaatctcttagttttccttcatcagagaaygccattatttccacttttctcctgaaggatactttcaccaaatagatgacttgtgattgacagctatttcctttcagcacttgaaaaatgtgccacttccttctggcttccatggttcctgataaaaaaaacctgctgtcctttgaactggtgttccctatagataatacattatttctctctggctgttttcaagatgtttttctttcttttttagttttcagaagtttaactatgaggtatcttggcatggatttccttgggttcatctgagttgagattcactcagcttcttgaatatgtaggtttatgtcttttgcaaaattcagaaattttcagctgttatttcttcaagccaaggtgacttttaagcacattgtatatttgagaaacattgctctggaggggggttgagagatccaaggacttctcaaattgtatgcagaatgctgttaagtgtccacagctttcattagattctcaaaagactccatgaccctcaccatacattttataaaagaattggtttatggccttattgagttgttttttgttttcttggttaaaatcagtaaaagcaaacaaacaaacacaaaaagtagttagtattcttttctttytttgtaccacatctgttgaattcctgtttctcaaagattttcctgacaattttggaaaatacgatgactcaggtaaatgttttccaagtgcctaatatgtgccagacaaatatttttattgttttccatagttaatgagaaggagaagaatttaaaacaattaatatcatttgggtttatgaaaagttcttggtaaataagtgctagagtaaaattggctgcttttcagtgtgactttcccctttaaaatctgttccttactgctctgagctggatacaccagcgatcaaattacatccctgaaagtataatttcatacaccgaaaacatgtcattacacagtgggccgcttgtcatcactctggcttgctttgcacagttggtagtccggcactcacggttcccccaagcaggcttgtccctggctcaactgctctagctgattcctccagccagcagaccctcacctcctttgtcaccccttattcctggactaacttttgctcatcttccagaactcagcttgggaagcaccacctctgggaagccttcagtctcttttctccaagcattgagttgagtgtgcctccagggtcactcatgcctgccagaacatcacgctgtatattaattgcctaattgtctctcctgtcagatagtcagacccttggaaactgtgactgggtcttgatttgctttcgtgcccccagtacttttgtaagtataatatsacatgtgtttacgcactatctccagttagagttcacgccaccagctgactgactgactgagcctttcatccatattttcattaatgtcattaagtatctgttgagggctgggcacagaggttcatgcctgtaatcccagcactttgggaggccgaggtgggcggatcacttgaggtcaggagttcaagaccagcccagccaacaaggtgaaacgctgtctctactaaaaatacaaaacttagctgggcatggtgatgggcgcctgtaatcccagctactcaggaggctgaggcagaagaatcgcttgaacccgggagggggaggttgcagtgagctgagatagcaccactgcagtacagcctggacaaaagagcaagactccatcacaaaaataaaaataaaattttaaaaagtacctgttgagctcctttatatataggtgtggcgaccagatattcagttcttcccaagcaggtttaatctttcctcacaagcatctgtttattaattcactttagactttttctgagaattggtataaaggttattggtcttttgctagaattcctatctttccgttttggggaaatatggataacaccgacctctgccattttccttctttgtcttactactggatcttatgaaccctttattattacatttacatgtatagctctgtctttcctattaggctgtaataagctccttgggcagggagtgtatcttattcaacccagagtctccagggaccggtgcaaggtggcattccatgagtgctggtggaaagaaatttgatgttagatcatcacagctatatggttgcttatgattggaacatatgtttcctcatcgtctccatacctttacttcctagttatcttttatccctcattctaagctaccgtgaactcttttttggaaaggagaaatgggtaatgcaacacattttaatgcattttttattcctcccaggtactatcttggtcgtcggatgtttattgttatttctgagccagacatgatcaagcaggtgttggttgagaacttcagtaactttaccaacagaatggtaygtagttttctttccgcatatagatggatggggaattgttctcagatggagacactgcatgtcagatccaatggggatgcaatcaggcctctgatcaggtttatgtcagttccactcaaaactaagctcctcagtgaactcggtttttcaaaagagatctatgggactggtacaaaagagtaacatttacatttaagaaatgcttcaagaaagctaaagctcaagggaagctgaggctattaaaaatgctaaaaccaagagggttttctaaagctgggttcaaagccgggggaatccagagggcacaggccaagtgactgacggagaatgagctaggctaataaatattagttggaaagcaaaattttgaggttcttgcacttacatctttcccagaaagtataagagtattaaggctggaaagggaagtcaagcaaaattaggagagaaatttgtcccctagtaagagaaggaaactttaagagggctcctttacattaggtcaagtctccagcctacatgcatgtacatatccctttgtttttggaaagtaaatgtcctactatttatctttgatgagaaatcccaaaggatgggcgaggtgacagaaaatggcagagatcaggccaggcacagtggctcatacctgtagtccccacactttgggaggccaaggagggtggattgcttgagttcaggagttcgagaccagcctggccaacttggcgaaactctgtccctacaaaattacaaaaattagccgggtgtggtggcacacatctgtagtcccagctacttgggaggctgagacatgagaattgcttgaacgcttgaatctgggaggctgggagtgggaggggctccagtgagctgagatcgcgccactgcactccagcctgggcgacagagacgctgtctcaaaaaaattaaataaataaataaaagaaataaagaatgaaaaaatggcagatatcagtgctaaccattttccaaaaatagggagataggcattctagcagagaagaccagtaacctttacgttgattcttggaaaaagtctaaagtgaattaataaacatgtttgtgagaactcagagaatcaccttgccaaccatttttggggggttccaattagacctcacttttcattcttttagggaagtacgtattcattcttttgttgattatgtggcaaactttttcatacctrccatatgccaggcactgtgtaggtgctgactgtaaagagacagtgtccctcgaggaactctcggtttagtgagggaggcagacaaggaaagggaccagcacaatgcagtgtggtgagtgctcctgaggtggggagcccaggccaccaggatgcagacagaggaaagcttattgggtgtgaggtgcttggggctgagtcttaaagaaattagagaaagtccccctscctgtgttccgaactaggtgagccatccagagtgtgtccttgtcatcgcaagagcttatgagatgagtacaattatcatctctattttatagacaaagaaactaaggttcagagaggctaaatgatcaaccctggtaacatggcttaacacgaggaagagcagggattcatgtgccatctctcaacttaagtctagagctctttttactgccaaagctgtgacagctgcctcagtgacatttcaggatgtcaaggttgagtggagtaattggccactcacccaaaatttgctcatcttcttccagccccagagcatcatgcccaactccagacatcacgtggcctctagagggatgtggcctggagggaggcggctggcctgctacctccatcccttcaggatggccgaaggaattgcagaagtttaactgcttctctgctgcctctagattctctttcccaaacactgcattgctatctcctcgctcaaagtcccctggaagccgtctgtcaagaaactgattctgattattaaatgcagctgtagcttgttgctccatcagcctcagcaaggagtgctgattaaagaagttggagaagccaataagtcaaagtgcacggaccaccaagccacatcctggcaagcagtaaaggtactcccaggagcctgtcatagcacttgagactgtctgagcccctaagccatgagacggcacttgccaactggtgtctccatatttcctcccatgataccaggacatgtgaccctgagagctgacctagaagaggtcaatgatttggcctgctaggggcagacatactcaatgcacatgtccaagcaaggaggacacaataatattgccctcagcttygatcaatttatcctccaagccatttgtctgccgtttctaatttctttcaccatcccctcacccacccctccacgcagactaggtccagtgccccaaactccagagtagagttccaattttcgtcctcttccactcagcacaggattaagccttcaggactaagttcaagttccctagacgatatttaagggcccttgtgtcttagatccattgtgtgtgctccaccctgtctctcactgctccccaatacaaatcgtcactccagcctctccctgctcaccctcacctgctctggagagacctgacctctgccttgctcacgctgacactgcctcagaattgaaggcagtgtaacagtggggctcatattgattatgacgtgagcttgagcacatatctttttttttttttttttggagacacggtcttgctctgtcacccaggctggagttcagtggtgtgatcagagctcactgcagcctcaaactcctgggcccaagtgatcctcccacctcagcctcctaggtagctgggactgcatgtgtgtgccaccatgcctggctaattttaaaaaaaaaaaatttggcagagatgggggtcttactatgtcgccaaggttagtctcgagctcctggcctcaggtgatcctctcaccttggcctcccaaattgttgggattatagccctgagccactgtacctggccacatttcttaacttaaaaaagagctggggcagctctttttaaaaatatccatggaaagtggagctgaatcaacatgactcagcagaaatggtcacaaccagtggcagaacttcttattcttggcctcctctcaaggcctggagttgggggatatgatccaccttactgggctgtcataaagccacatgggatcatgcatataacctctccctctacacagtacttggcaggtgacacattactgcttctcacaagaaaaccctccacctcttccacacccatccaaactcttgctgttcttcaagacactcctcagatactgcctcctccaggaagccttccctgcctccatccacatgcacytttccccttccctgaactctggcagcgctcaccatgtgtgtcactcgttgtcacagttgatccccttgtgccttccagtatttacagtgaaggaggatatggctttcactctagcttgattattagctctttaaggccaagaactgtatcttgtattttttttaaaccccatgacataaacacatattgactcttcagcatccaatatattcttgttccaactgaatggaatttccatcaacttgacattcctcccagaagaatgaggtattacttgaacctggagttgcaatatagtcttcttcgtctcggtcattcacaaacacgtaaaaagacccatcatagataagatctccaggaaatcccagtgtttatagttttccatctgggaatgcatccacttatgtgtagctttgtttatggtctttaagccaattccatatcgatggtaaaacaacccttagtgactcaattttttaaaaaacagtctttaaagtgggattttctcacaggtttttgaaagtcaaattaaattgggttctgtggttccctcttatccatatgcttatttatctgctcaaagaactcaaggagattagtgagacgtgatttctccttactgacaccacgttgccttccctctaataggccatgtttacttaagcgttcagcaattcagctttattatacattcactcggtaaacattaaatgcttactccatgcaggctgctaccaaacggtcccttgtgatacagaaaatacctcggcatattagtttgataaattaagtgaaaaggaatttaaataatgcatgctctcattctccaacagggagagcccatgtctgctcacaaattcaggcttgagttacgttgagttttgtccctggacagcctggtggagaagggccctgatttgggaagctggatttagctctgaaatttgacatgagccgtaagcatcccatgagggatccatagagcatattcactggaggtgggggtgatgcaacagggagctccctgacatacaacaacattgaacaaatgtgtgaattcaaatatcatcctgtgaaatattcttttccaaactccagaacactggctggagcagactgtgggttggatccggagcggcagttcttaatgtcatgctttcccattcacagtttttgggcctctggagtctgtgcaatgtctctgcttcatcttgctcattttccacgtggaccttgtaggtctctatcaatgtcctcagtgcttcctgaaactgctccatgatggtgcaaccacagcttatcattaaacccaaatcaatcttcttggcacttatagaagctcagtcgtcctggtacatcaggactcggatgtttctatttagatattttcaatgagctcttctttgctgtcaggtacggtacctaatgaaaccatagggcagctcttttttaaatatctgtggaaaatggagctgagtccacatgactcagcagaaatggtcacaaccagaggcagaacttcttgttcttggcctcctatcaaggcctagagttagggagctgtgggaagggtgataagaggtaagccagtctttggcccatgttagcttggtctggtcagataggcatgtcagggatgtgtcaaaacactaagcctagtgctttggagatgtgggttctggtctggagtggcagtatggagtgccatctctcaggtcctcatgagcaacacagaggtcacctctccaggcacaggtcgagccacaccactgacacacaagagtcacgtccaaagccatgtgatggacgtggtgggtggttttatcccgaaccatcaatacccggcaccctggctgccccaggttcagcctctcaggggctgcttcactcgctctccacacagctgtgaacattgcaggatgagtcactgtgaaaccacaaactccttggcattggtgaagatgactaaagttataggcaaattagtcactggaaaccttcctgtcctctgtatctgcagcagcctcctatcgaaggaagaaaagagtatgttggctcattgcagagctaattggcaaggaaagctcaattcagggctacaggtgagtcagacgcccttgtgcgggggccacagggacccgcctgctggcatccattgaggagagaggggcccttggcagacttgccataaaaccgccccccttgaactcattcctacacctgtaaccactgacagtttttgaaaactgttcacctggagttcctggttctctttctcttaaatcaaacattgartaaatgaagacactcagatgttcaaacatgtgcatcaagattttacttgtgagagtggttgccatgcatgacctagggaagctctcatggcttcagtcaaaccttgccaactttttttagctgtgcatttcttgagaaaggtcaactcacattacgrgtctacagctctgagcaagggagaagttcttcctgaaagcacaaacagactacagagggcagtgaaaccagaaacacaggtgtgcaacctcatttgcctgcccccgtctctattttgaggcctctttgttttatgtgacctccgtctccttctctgccgcaatcttcttcttataacacccactttcttcttttaatttccccctcttctaagccatagcccagtggtatggcgaaaggtctttgctgtgcataggaaaccctccaatctgaactggaagcttcctgttgcaggatgggctgccccattggaattcccaggtgacagtcgcaatgggatgcctgtcccctgcaggtctcccatttcacctgcttttctaatgtctggacatggctaagtcctagaaaagccagatccatggcattacatttaatcagtacaacacactgagcttcgtttccaacatggtagctaagttttaattctaacatctttaaaagtactgagtgtcttgtgatgccttgggaacacaggaatagtgttaagtggtgttgattctcaatgctcaaatgtacttctctctgccttgcagagatttttctaaaatttcaagaccttgttgaaaatgatttcatatttttgtgtcttactagactcttggttcagcaggaagctatctttatatatttttttaacaaaaagaaattagtaaaagcttgctctgatatttatgccatatttccctaacttttgtcgtggcagaagtagaaataagtgtgtaaaccaggagattaatatctacaatttaggcatgagaatagagaaataaaccataaaatcaattcttatctctcaatggatatattccagaacattccatggaaatcaagtgactaagtcctgatcctccctgtctttctccgccccaatctccttcttatgacattccctttcttcttcccattttccctcttctaagccatagctcagtagtatggtgaaatgtctttgattttagtttaaagaaatgaaatcagattccagatttgcwacctcttattagttgtgtggccttcagacaatcctttaacctcctgattctcaatttcctcctgtgtaaaatacattagactagctaatccctaaggtctgtttggtgcccagttcacgtgaccgttggcagccacagggagccacggagtcccaccagcgtcccatagagccacttggagcttcaggtacaaggaacaagcccctcktaggccccctcaggaaaatttattctcgcagccaagcatgtcaagtgcaatatcaggaacacccttgtccttcttgaacactgcttctggccagaaactctgctgagatctgttggagagtttcctgcaaagataagagttaacaagcccccagattcccttccccgctcaggaggggccctcactrtcagctttggggctgatagaagcacagttccaagcgcctggcttcctcctcctccccagtggataaaatgctggaactccgtcaggcaggactgccataattagaagaggcccctttccagcagctgaagctgactaggcagatagagcccaaatttgtttttagccaccacatgcccctgagctgacccctcragctgtggacacatctcacaacctcacccggaggccattctctcaggccagtcacactctcccacagagagagcgaagatgatgtcaaatctatggccaccttctaccagcagagggaatgaatgaaaactgacatgtagaagagtaagaccactactgttttcatttttggtattttttttttacattttaatttttttatactctatttttagtaaaagggacacctttactatttcaaaccaccaaaatataagccctatttggttcaaatctttgtacagccagatagcaatagatataaattgacaatggcctcaagtatagaatttggggttatacaagtgacagaattcttgagtctcagttgattataatataatgaggggacagtgccaggtctttcacgtctccaggtgggaaggggacaagttgcacgatggctgtcctcatctgtgcctggttgtgtgagaattagaaacaacgtttgtaacagtggtacctagtctttgtgaccgtggtcctctttttgatattaatatttttgcagactagttggcataaacaagttggctctctgtactcacattacaaccactgaggtataacactatctcttggagtccttagaagcacctcgctctgttcagctggcctctcagccttgtgtggctgtttcagaactgttgatcatctgtcaagtcatcccagagatcatctagatcttgagtccatttcttgcatgttccagaacacaagaaaacatttgtggctatagcttcatattctatcatgcctttcatccctttctcccgataatacatgaacccggttacagcagaaatgcattccatgcatttgcaacactctggaaggagccagtggttcttgtgtggctttaccaggccagtcgagaatcactgggctggtgcatgagaaaccttcagtaagtggctgctgtcttcatgcacccatggaatgccgaggtgttggttttcttcaataacctgctcctcagggcagtgtttcctaattgctggagaatgacccaagagttgatgaaataatatgaaaagtactgtgtttgctgtaagatggacaagtattggtgatataggccaccccactcccaccctccattctttgtcttgatagttccagtcccagtacagcacctggcacacagtagttgctccatcattattcacagcataatcacagacaccattcagagcagagcttgtacagccctaaacataaagtgcagcaaacccagctcaagatcattgaagctagcagccattcagctcctgctgtgggatggccagggagggtcagagactgtggtcttgacacattctgtgtggggttcatccacatcttcctaaatgcccaaggcatggctatttgaagcagagcaagtaaagacaacgaggggtccctctgctgggttttctgtccccctctggctgccagcactaatctagcctttgaagaggggcagaaggggcaaagttaaaccacactttcctctcttacctgttgtcacccctctaatgacttttcactttctctgctcaccttctccttcctgcctcttttagaaatgggaaacaaagggcccatagrccctaaaaggggccaccctttgaaggaggagacatgaccacaaatgtcaccctttgatatcctaatgggatccatgttaaaaaaggaagtttttaacctggtctcagaggacacttgcaagagatgccaaggaaggcagtgtgatcatcccaagtcaagcagcctaacrtgagcctgtgagagagaaactgcaatccacccgcaacgtgtggtcatcaaagggcggcaaccccagttaccagcttgagattaaaaacccaaattaaaacagggccaaaggattcctgtcagctcttaacacctctcttaaaatgtgaccactgtctgaaaaccattgtttggctgatgaggtctaacttcattacacatcacagtaggacactccttcctgagaccaggcactgctcccatgagtgcagtaggacagacctcctctgttcctgacgatgataccccaatacagcccgacaagcgtgtgctcaatgaaggttcccagatctttttaatgcgactttttgcaggtcaggttgcttccatcacatgcactgaacaaccaaattttaaacctaaatatgaaaccttgtagttacatctgttgattttcgtcttgttagtgttcatccagcattcaagtctgtcgaaattaaatgtttattattccttagtatttttttaaattgaagtcacttccatacacaaaccttgagtgtaaagctcaatgtattattgtctatgtattcccctatgtgacaccacccagatcaagacacaaacatttccarcactccagagggttccctcatgcctcttctcagtcaacccatccctaccatccagaggaaaccactcctctgacatcaatttgtatagatttctcttttcctgctgttgaacttcatgtaaatgtaaacttacagyatgtatccttttgttctggcatcttttgctcaacataatgtctgtaagagtcatccataccacgtatttagattaatatagccaggtgtggtggctcagtcctgtaattttgcactttgggaggctgaggcaggaagattgcttgagcccaggagttcgagactggcctgggcaacaaagtgagacccctgtctctacaaaaaaaaatttttaaattagccaggccccgtggtgtgtgcctgtggtcccaggtactcaggagactgagggaagaggatgccttgagcccaggaatttgaggctatagtgagctatgatcgtgccactgcactgcagcctggggacagagcaagatcgtgaacatagtttgcatttttcattgctatgtagcattccaatgtatagaaacaccacaatctattcctctgtcaataaacatataggtttccagttttttgctattatgaattaggttgttatatcaacaggcatttatgaacacctaggagcagcatcgctagcccacgagagtaggtgcatggtgggtttttgtacatactgccaaacagttttccaaaggggttgagccaatctatactcccataaagtggagttctagttgttccagccttagccagcactttcatcttgccattatttttcactgtaactattccaggggctgggtagtagtggtatctcaccacagttttaatttgtatttatctggtgaccatgtcattgagaactttttctttttctttttttttttttttccccgagatggagttttgctcttgttgcccaggctggagtgcaatggtgtgatctcagctcactacaacctctgcctcctgggttcaagcgattctcctgcctcagcctcccgtgaagctgggattacggacatgtgccaccatgcccggctaatttttgtatttttagcagagacggagtttctgcatgttggtcaggttggtctygaattcctgacctcaggtgatctgcccaccttcacctcccaaagtgctgggattataggcgtgagccaccgcgcccagccgagaactttttcatatgctctctggccatttgaatagtctcctttttaacaacgtgcctgttgagtctttgccccctcccccacttttattttaaggtgtttgactttttctgattgacttgtttttctttgcatgttctgccttgagtcttttgtcagataaatgtgttgtgaatatcttctcccagtccatggtttgtgtgttattttcttaataatatcctttgataataaagtccaatttatcaaaatcttcttttgtggtattgcttttggtattctctttaagaactcttgccttatatacaaggtcacaaagatattctcttggaatcattatggttctacctctcactattgggactatgatctatctccagttaacttttgtgtatagagtgaagtatggatcaaagctgattttttttctctgtattaatatccaattgccccagtaccattgttgaaaagaccacccattcccccttgaatagcacctttgtcataaatcaagagatcatatgtgtgagtctacttctggactctgtcccatttcattggtctttttgtttatccttgcaccaatatcacactctcttaaatagcatagctttatcattgatcttgaaagatggcagtgtggccaggcacggtggctaacgcctataattttgggaaggccaaggtgggggaattgtttgaggccaggagtttgagaccagcctgggtaacaaaccaagacccagtctctactaaacaaatatatatatatataattagccaggcatggtggcgcatgcctgtagtcccagctactcagaaggctgaggtaagaaaattgcttaagcccaggaggcgtaggttgtagtgagccatgattctgccactgcacttcagcttgagcaacagagcgagaccctgtccgagagagagagagagacgcaagagagagaaacagagagagatggcrgtataaattctcgtggttattctagttcttttggttccatatatctgtttacaggaatcagcttgtcaatttttaaaatgtttaatttttgtgagtatatagtaggtgtatacatttatggggtatatgaaatattttgatacatgcatgtatcatgcatgcatgatacatgcatgcaatgtataataatcacatcagggtaaatggggaatccaccatctcaagcatttttcctttctttgtgttacaaacaatccaattataatcatttatttttttgccctgtcttatggtgctgatctttcggttattttaaaacctgcaattaaattattattgactatagtcaccaaatactaggtcttattcactttttctatttttttccacccattaaccatccccacctccctcgacactctttcactactcttcccagcctctggtaaccatcattctactatctccatgagttcaattgttttactttttagctcctacaaataagtgagaacatgccaattttgtccttctgtgcctggcttatttcgtttaacaaaatgacctccagctctatccatgttgttgcaaatggcaggcttttattcttttttatggctgaattgtactcccattgtatatatgtaccacgttttctttatgcagttgtctgttaatggacacttaggtgcttccaaatttggctcttgtgaatagtgctgcaataaacatgggtgtgcagatatctctttgatatactgatttcctttctttggggtatatacctagcagtgggattactggatcatatggtagctctatttttagtttttttagttttttgaggcgcctccaaactgttctccatagtgattgtcctaatttacatttgcaccaacagtgtatgtgggttcccttttctccacatccttggcagcttgtgttattgcctgtcttttggatataagccattttaaatggggtgagatgatatctcattgtagttttgatttgcatttctctgatgaccagtgatgttgagtaccttttcatatgcctgtttgccatttgtatgtcttttttttttaaactgtcgattcacatcttttgcatgtttttttaataggattattaggtttttttcctgcagagttgtttgagctccttacatattctggttattattcccttgccagatgggtagtttgcaaatacttcctcccagtctgtggcttgtctcttcactttgctgattgtttcctttgctgtgcagaagttttttaacttgatgcaatctcaatcrtccatttttgcgttggttgcctgtgcttgtggggtattactcaagaaatctttgcccagttcaatgtcctagatattttctcaagtgttttcttttagtaatttcatagtttgaggactcagatttaagtctttaatccattttgattcaatttttgtatatggtgagagataggggtctagtttcatcattcttcatatggatatccactttttccagcaccatttattgaagagactgtccttttctcaatatttcttcttggcacctttgtgaaaatgagttcactgtagatgtatagatttgtttgtgggttttctcttctattccattggtctatgtgtctggttttatgctagagccatgctattttagttactatagctctgtcatataattagaagtcaaggattgtgattcctccagttttgttcattttgctcaggatggctttggctattttgggtcttttgtgtttccatacatattttaggattgttttttctatttctgtgaggaatgtcacatagagattgcattgaatctgtagattgttttaggtaatatggacattttaacaatattgattcttccaattcatgagtatggaatatctttccattttttttgtatcttcaatttcttgtatcagtgttttacagtcttcattgtagagatcttttacttcttcagtaaagttaattcctaagtatttcattttatttgtggctattgtaaatgggattgctttcttggcttctttttcagattgttcactgttggcatatagaaatgctactgatttttgtatgttgactttataccctgcaactttactgaattcatttatgagatctaatagcttttcggtggagtctttaggtttttctaaatgtaagatcatatcatctgcaaacaaagataatttgacttcttcctttctaatttggatacgtttatttcattctcttgactgattactctagccaggacttccagtactatgttgaataacagtggtgaaagtgggcatccttgtcatgttccagatcttggaggaaaggttttcagtttttccccattcagtatgatactagctgtgggtctgttgtaaatggcttttatgttgattgatgttccttctatgccttttaggatttttattatgaagggacgttgaattttatcaaatgcttttttagcatcaattgaaatgattatgtggtttttgtccttcattccattgatatgatgtatcacattgattgatttgtatatgttgagccatgcttgcatcccagtgataaatcccacttggtcatgattgatctttttaatgtattgttgaactcagtttgctagtattttgttaacgatttttgcatcagtgttcttcagggatattggcctgtagattttttgtttgttttgttttgttttgtttgatgtgactttgtctggttttggtattagggtatgctggcctcctggagtgactttggaagcattcccttctcctctcttttttggaatagtttgagtagaattggtattaattcttctttaaatgtttgataaaattcagcagtgaagccatggtgtcctgggcttttctttgctgggagactttttattacggctttgatttcattacttgttattgatctgttcaggctttggattagtgattcaatcttgacaggttgtatgtgtctaggaatttatttcttctagattttccaatttattggcatacagttgcccatagtagctgctaatgatcctttgagtatcagttataacatctcttttttcatctctgattttatttacttgagccttctttctttttttcttagtctggctaaaggtttgtcaattttgtttatcttttcaaaaaaccaactttttattttgtcgatcttttgtattgtttccttcatttcaatttcatttatttctgctgtgatctttattctttttttttctactaactttggctttagctcctgcttttttagttctctaagatgtatcattaggttgtttatttgaattttttctacttttttgctgtaggcacttataactataaattttcttcctagtactgcttttgccatatcccattagttttggtacattgtgtttccattataatttgtttccagaaatttttcaatttccctcttaatctcttcattggcacaatggtcattcaggagcattgtttaatttccaattaaacaattggaaattgtatagtttccaaaattcctcttcttattgatttctagggtttcttttttttgttttttgtttgtttgttttttgtttcttgagacagtctcactctgtcacccagactggagtgcagtggcatgatctcagctcactgcaacctccacctcttgggttcaagcaattctcatgcctcaaccacccaagtagctgggattacaggcgtgcaccaccacgcccggctattttttttttttttttccgtacagacaggatttcaccatgttagccaggctggtctcaaactcctggcctcaagtgctctgcctgcctcagccaaagtcctgggattacaggcatgaaaatagacacacttttgtgtatctattgtatgtttttagatttgaagttatcatatcttgcaaataatcttgtaaaccattattttaaactgacaacttaacactgattgcataaacaaacaaaaataaaactaataaaaactctacgctttaacataatcttcccactttttaactttttcttgtttatatcttattgtactgtctatatcttgaaaagttgttgtagttattattttcaattggttaatcttttcatctttctacttaagatatgagtagtttacataacacaactacagtactataataatcttgctaagttttgaagaattgacatcatgacaatgttgaattttccaaactatgaatgtggaacctctatatatttaggtattttaaatttatcttagcaatattttgtagttccagactacaggtcttttgtacatctttagtcaaatgtttttgtaggtatttaatagttttactgttattgtaagttatatttttaaaatttcatttttcagtagtttgttgcccatgtgtagaaataaatttttgtatattaaatttgtatccaacaatatttttaagctcaatattgaatctagaagtttatttatagagatttctcaaattttctatgttagacaatcatgccatctacaaataaatagagttttacttcttccattccaatttttacaaattttatttatttttcttgccttattgacctctctatgatgtcaaatagaagtgtaatagtggacatagttgtcttgtttccagcctcagaaagtgttaactatttcactgtttaatataatgttaactgcaggtgtttttgtaaatgtcatttttaggtgaaggaagtctccttatattgatagttcactgaaagttgttattatgaatgggtgtcagtttttatcaattttcttctgcatctcttgagattgtatatgtttttctgttttattctgttaatgcaacaagttacattgattttcaaagttgcattcttggaataagtcccacttggtcttaatgaattattcttgtaatttatcactgagctatattacctaatattttgtttacgacttttgtgtctatgttcacgagtgacattggcttataatttttctttcttgtaagtctttatctggtttggggctcagtttatgctggctcatgagatgatccagattaatgttaaatcgtgactctgtgcacattaactattctcagctgtgatttctgcaaatcagtagttcattatgaaaataacaaataaaatgttcgattcgactgggataagtgtagaaatctgtgggtctctatttgattccagattaatagagttttatttgtctttggtgttctgacagccatgaaaccaccaacccgttgcttctcctctttccccataagaatgtccttggaaatcacaaaatgttttgtttcccacatctatagatctgtccctatgtgggggaaagaaaagaatgagtaaacattacttctcagtgaacttgttcctaaggatcacttttttaaaaaatcttttttaaatgggagtaagctgttatctgcacaaagcccttggggtgaagtccagtcaacagggcttccctyaggagatgttctctaaactgtgttcatgaaagtgaataagagttagcaggcaaaggagaaagggggttggagagggatctagagtttcagagaaagagaaaaacagctcacgagaagkaccacaccctagagagatgacatggtcaagggtctaacggaataatgcgacatcatctcaacactatgtgccaaggactgtcctgaaagctgtgtcataaataaagttttggtgccgcaaaagaaatagcactcaaatataaaattttctttttaattctcagcaaggcaagttacttctatagaagggtgcgcccttacagatggagcaatggtgagcgcacacttggacaagggaggggaaggggttcttatccctgacgcacgtggcccctgctgttctgtcgttcccctattggctggggttagaccacacaggctaaactaattccgattggctaatttatgtgatggagtgatggctaatttagtgatggagtgggtggtttcgtgggaaaaatggctatgacagagcatgtaataggaatgagtcagggtggagcaggtgattggaatgagtcagggtggagcaggtaatcgaaaaaggttgctttatgaggaagttaagtttaaaagtagaaggcaaaaaattgaacatactgacatattgattctttgaaaagaaatttagaactcatatctaacagctataaatgtattaactgcattcatcattccgactgctcagtccaaaacccttggagtcatccttgactcctgtctttctctctcccacctcatatccaatccatcaggaaatcctgttggctctaccttcaaagcatgccaggctgatcatttctcccggtatctgtgtccagctccctggcctgagcctccacccccgctctctcctggccactgtgcttcctcctgacggcgctccctgcctccactctggctcctcacagttgattctcaacaccaaacagcgagattctttaaaacagaagtcagctcaagatatgtctctgttcaaaactctgctatgactacctgtgtcttgtggagtacaaatcctaccaagattctggaggccctccacacacaggcccccatgccctctctggcctgcctccatccctcccctccagccgcgccacatccttaagggtcctcacgcacatgatgcctttgctgtaatggttcccatgcccaccaaacccccagctccttcaaggctttgcactaatctcacctatgcaggagcccagtgccaactgaccaatttaataacacacctcgccccatcccactgtaccgtccagtgtatttctcatgcttattgtccaccttctcccactagaatgcaagctctgtgaggacacggagcttcattttgttcacagaggtatcctcagcacctaaatcatggcctagcacataccaggcactgaataaatatttgtgaagtgagtgaagcctcacaactatcctaagaggtcggtagcgttattatccccattttacagattgagaaactgtagagaggtcaaaccagagaggtcagctctcaaagtcacatggagccaatatttgaacccaggcatctgactctagaggcaatgttcttaaccactgcattatcctggcaagcccaaagtagcaaatgcaacccgagcttccagaaggccctgtgacttcagactatataagggattgggaagttaaggcactccttcaggctttgtgttcagaaaggggtggggaactggccagcacataccaggcctcataaaacaagttagggagtttgcaccaggatagggctagatttgtctttagaaagatcccactgactacagggtggagtacggatgggtgtgacaaggctgcgggcagggaaatcagttaggggctgagataatggtgacctcagccagggtggcagctgtggggatggaaagagttggccaaagagagatttaataattgtgactgacaggattgtagttgagagagagagaacwactcctaggtttggggtttgggttagttttggtttttcaagcttttttgactatgatctacagtaagaaacacattcacattttgatacagaatacacacacacacatacacacatacacacgcatacatgtacatacacacatacacacacatgcatacacacacacacatatcttgaacaagttcaataaccacagaatactttccctgacgttaaatgctcctctgtgtttcctaatcttgtctatctcttgtctctttctctcctttttttaaatgctggttgccactcatgacattgatttcatgactgatcatggcttgcagtctggaagcccttgaccagagagtgattggaggcttgggacacagctaggctgacagacaggagcctcgaaagctgtgtccctggacctcctttctgcagagtccccttcctgcatgacatacacagtctggctcccatcacacttaccagtctcgttactcattgaattagtccattttcacactgctgataaagacatacctgagactggcaatttacaaaagaaaggggtaatggactcacagttccacgtggctggggaggcctaccaaacatggcagaaggtgaaaggcacgcctcacatggcagcagacaagagaagaggacctgtgcagggaaactcccctttataaaaccatcagatcttgtaagacttattcactaccacgagaacaacataggaaagacgtgaccccaygattcaatttcctcccaccaggtccctcccaccacacgtgggaattgtgggagctacaattcaagatgagatgtgggtggggacacaaccaaaccatatcactcattcctttggggaaaatcctttgtctctttcaaggcatctctcagtaagtctcatcaatgaatatatgtggacaagcaggaggtgtggaggggtcatggaagctattgtttaataggcacagagtttcacttttgtaagatgcgaaaagttctgtggaggaatgctggtgatagtagcacaaccatgtgagtgtacttaataccaccaaactgtactcttaaaaattattaagatggggcacctgtagtcccagctacttgggaggctgagacaggagaatggagtgaacccaggaggcggagcttgcagtgatccaagatcgcaccattgcactccagcctgggcaacagagcgagactccatctcaaaaaaaaaaaaaaaaaaaaggttaagatggtggattttatgttacatgtattttgccacaattttttaaatcaatgtgtaggcaaactaatagaaaaaagagtgtctggagtggctttccagacatgaagtctcagggttgaaagagtccttggaaggcttttagaccaaacccctctgcatgctcaagccttgggtacaggatttctaagaagtggaacagtctccaggggtgtggagctcatcgctcaaggcaggttatcttatctgaataattttgtctgttgactattgggatagttctccttcagatgagctgaaattttctccatagcttcctctattaaacccaattccacttctcagggtcacaaaaaaaaaaacaaaacctaaattccctctcccatgcagtatgtattcaataaatatttattaggcatatgcctaagtaccactgtctgatcttccaaatcttctcttttccagttaaaaattccaaatctgacaactatttcttaaatgacatgattcaatgtccccttaccatctgactgctcttttgaaatcatcaatttcctcttattgtgggacatctataaacaaaaagaggccaggcacagtggctcatgcctgtaatcccagcactttgggagaccaaggtgggaggatctcttgaggctaggagttcaagaccagcctggtcaacatagtgagacaccatctctacaaaaaaacttcaaaattagctgacatggtggcatgtacctctagtcccagctactcaggagactgagagggtaggatcgcttgagtccagaagtttggggttccagtgagccacgatcacaccaatgcactaccgcctgggtgacagagcaagaccctgtttcaaaaaaaataaataaaatgttttcagaaataaaaacattacaataatcaatagccccaaatgatttcatcaaaaaatgggagattctaatggaatttccaggcccaagtgagcacagtgtcatggcatgctggtgagaaagatatgtgaaggccatgctgacatattgcaaggaggactacatttgtctttcaggtgcaagacaaaaaatagtgtaaattcacccttaagtcttaaggataggtacgagatccaatcagccttcactcttatctctaatttattctgtctcatcagaaccagaaaacatcacygcactttccttggaggtaagtgctttattccatgtagtgtgccacaggactgcatcttgccactacataaatacacataatatatgatttcctccttcaactctggaacctaaacaaatggattatgttccccaaattccataaagccataattctgttgagtggccatggcgctcccaaagaatttctttctaaatatagagaggtattcctctgcagaaaaaaatatcccagcatcttggttctaatatataattaactcctctctagatactttgcagttacgttttatggcttattttgagtgttcatattttatcagaaaattataattttcctctaaataggagtttttacaaggcttttgaattctgatgactggcttcatgtttcagctataattaaaacagtgaaatgaaatagcatcaccatgcatcacatgtggttctgagactgcttggtcccccaaccgcctgtctccccacaccccgcaacctgcaggctggggacactctgaccaatggtgggggctccagttttgaccacttagtgggacagctggttttagaaagaaacagaatggcctgagaagaagggatgaggagaccaaagtcctcacctcggagaagcctcccaaatatgtcccccaccgatgtcccaccttgccccattttccttccaggaaaatatactttctccaagaaatacactttccctccaggaaaattcactttccatctagttgttagcttatgagcttactctctgcttcccctctagactgccaactccatgagggccaatgcaaagtcttttttttttcttttgttttttttgagatgaagtttcattcttgtcccccaggctggagtgcagttgtgtgatctcggctcactgcaacctccgtctcccaggttcaagtgattcttctgcctcaacctctcaagtagctgggattacaggtgcctgccaccacgcctggctaatttttgtattttagtagagacggagtttcaccatgttggccaggctggtctcaaactcctgacctcaggtgatccacccgcctcagcctcccaaagtgctgagattacaggcgtgagccaccatgcctggccgcaaagtctttttcattcaacatggtatagacaacttcttgaaccccgtattagtttgctaggctactataccaaccaaccataggctgggggtttaaacaatagaaattgcttttcccacagtgctggagatcagaagcctgaagtcaaggtgtcagcagtgttggtttctccggaagcctctctctttggcttgtgcatggctgtcttctccctatatcctcacatggtcttccctttgtgtgtgtctgtgtcccaatctcctcttctaataagcacaccagtcatgttggattagggcccaccctaatgaccttattttaccttaattacctctttttttgagacggagtcttgctctgttgcctaggctggagtgcagtggcgcaatctcagctcactgcaacctccgcctcctgggtttgagcaattctccctgcctcagcctcccaagtagctgggattacaggcacccactaccacacctagctaatttttgtatttttagtagagagggcatttcgccatgttgaccaggctggtctcgaactcctgacctcaggtgatccacccaccttggcctcccagcgtgctgggattataggcgtgagccaccactctcagccttaattacctcttcaaagaccttatctccaaatacagccatccctcagtagctcgtgggataggttccgggacccacccttgctcaggacaccaaaatttgtggatgcttaagtttctgacataaaatggcatagtatttgcatataacctatgtacatccttctgtatgctttaaatcagctctggattacttataatacctcatacaatgcctacacatcactttatgtacatggattcaatgtagttctctggacagagcaaattcaagttttgctttttggaacttggtggaattttttctgaatatttttgattcagaattggttgaatccacagatgcagaacgcccagatatagaaggctgactgcacagtcacattccgaggttcttggggtcaggatttaaacatatgaagtttggggtggggggccgaattcatcccataacacagtattaggctatcaaccactgtttgctgactgagaaaaaaatgaatgaccaatagaacacagaaacattatggcaggcatgctccyggaagcagttctcctrgcacacgcttctgaaggcctttcctttttcccccttccctctccctccacccatacaagggtccagacgagtgagtcttctgtcaacttcgggtccaacctaaccaatccagtcacacaaaaccctgtgccatgaacttcagacatgatactaattcccaggaaagactaggccatctccaggaagccttccttgtttgtcttcagggaacccctgctcagtagggggactgcagaacacacagaagccattgagttgtctctatgatgatgaccacatcgcagcagggtacagctgagccaccagagcttgcccatctgctccctctgggccccgccatgattctttctatcactgcctgtaagcctttatagtcttcctctctctccttgcaagagaaacctcctaacttgttggccactgatggactttaaccagggtgtttgtcatggacctgtattgccaccaaggtggctttggctccctgagtcctgaccctctgcttrttacttcccaacaggcgtcgggtttggagttcaagtcrgtagccgacagcgttctgtttttacgtgacaaaagatgggaagaggtcagaggtgccctgatgtctgctttcagtcctgaaaagctgaacgaggtaagacatgagaaatgcaaactctcttctcttacggagcaggtttcttctctccaaatcgtgatgagagccagttcatgttgcatcacttgcccaggtgacacatcaaaatgcctttcccactgggaccttcagacctctctgttatgcagaaagcacgggactctgtgttgagcgtctttcgtctctccagcctcccatatccccacttgccataaatgaactgtgagtcaacaagtacacagggcattcgcctgtgtccagagacagagcttgaggtgctttgggggccccaggagacaactgcaacagtgtctgttggactgtcatgcataatggatcacctagggatctggctacaaagcaggctctgattcaagagggccagggtggcctaagaatctgcatttataacacccggccaggtaatttcgttgttactggacaatgaaccacactttacatagcaagaaactagagaacagcatgaaacaaaggtgacctaccaatcaagtcttaaatagggaggtgattgcagtgaatgactggggaggagtgggcgatcatgtcaggcagggacacccaggttaacctctaggccaagttcaagggaagggcaggctccacaggatgctaccagctctctaaggccctggacactctcctttccctactgagtgactcactctttcctatcagctgtgcacccaaaaccgggtgtttgtacagcctccagaccaatttctcacacaacagatcctgactgctgtgttttgtatctaagcctgacagccccctcaattgctggtctggctttggtgtttgctgttctgaattgtgcaaccacaagggagagagaacttgagcccttatgatgtgaaggggctaaggggcttctttagttccagtctcaggtacacaggcatctctagagcaagggagcttccaaagcttggcttgagtgccctgggcttctgccatccaccctgtctggatgttccagagtagcctgtcttcagttcaataaaaatgaaagctacttttagcttaagctcaagatgctcatccatatggtcctgattgaattcctataaatcttctgaagtcccccagaagaggagggggttccacacctcattatatccaattaaactcactcagaagctagtgatccccccatttttatgaggttttgatttgcatttccatgggtagctgttggtgtttgggggcagagcctgtctctgtatgcagcacctgctcacactcacacagctcagagtcaggtaccaagggttgcctgtttagactaacayactgcctcttcaccacattcctgcgagataaataccatcatccttattattaccatcccattttacagaggaggaaactaggcacggagagattaagtagcgtgctccaagtctcatagctagtaagcagcagagccaaaatcagaatccagctccggagcgctcttcacctctctgcctgactgcttgctacctccatgtgattttccagtggtgctcggaggccacgtaggactgtgccaggggctgtctggaggatgcaggaaggggaagtgtagcaaatggggcctcggtggaaagctrgggggygggggagggtcagaagcaaaacttctctattttctgcctaagtttggaaccaactgaggtatggaaagaggttttaggcaaaggaaataaaattttctcttatcttactggtaaagctgtttgaaaaatagagtccccatctgatcacatgggcttgctatgctaatacttcacccagaatgggacaattgcaggggggtggcagatgccatcggggctggcccgcggcccacatgtgctcarttccttcctccaagactgggtctgatacagtgtagacagcaggagatggagagtgacttagatgcagcggttggccagtggggcccaccgggatcacttggggggctttgaaaactgttgctgcctgggtcccacacctagaaattctcattcgcttggtttgctttgggatgcagcctgggtttgaggatatttttttcaggctccccaggtgattgtcacgtaaagccagtattgggaaccaccaccagtagaagttccccacaaggacatgagaggaaaggggcacctgcttccactgcaacaattagccctgctcacattgatctctgttatctattgaggattcacaggagaatgtgaaggaagggcctgcatcttaaagctagaaaccactgctctaaaccatgtagactagctgcctggagtgtgcccctttatcacatccagccactaaaaggttgagtcagccaagagaagaccgggggaagagaggagaggtaggtgagcctagggctggcatcactagcgtatatgtctgtattcaaaagcaatggcttcatggcactatagaagtagaaagaacctcatgtgtgaaaaagaaattggtaaagagtatctgagaaaagaagaaaagagaaagaagaaaaggaagcaaggaaaggaaaataaggtttagcagtcctgggctatgattctttgataaggaattttatcatggtctagattcctttaaccccttacaggggatactccagaaagtgacacattgtcgtttcccaagcaaatccagtgctcctggagtccagtcttctccctctagtccagaaatcaaatgcatagtgcctgaattaattgcagaaaatagagttcctcaatatgtccacggcattaagatgccaagagaagccaggcaaggtggctcacgcctgtaatcccagcactttgggaggccgaagcgggtggatcacctgaggtcaggagttcaagaccagcttgatcaacatggtgaaaccctgtctctactaagaatacaaaaagtagccagtgtggtggcaggcacctgtaaccccagctactcaggaccctgaggcaggagaatcgcttgaatccaggaggcagaggttgcagtaagccaagatcataccactgcactctagccttggtgacagagtaagactccagactccatctcaaaaaaaaaaaaaaaaaaaaaaagccaagaggtagagagagatttcatagagcccattatttaccatacactatcaataaccttgaaattcccttgaaaggcatttttttctactccatatagttcaatttaggttcttgggtttgcgtttgaaaggattccatcccagaggcaggagaagttaactttttccccacctctggggattttagacctggcgagttgaagtttactggaaggcccctaaggagacccttcaagaagaagttggctgtgcagatggcactcaggtgggagggggaagaaagatggtcttcaaaacacagagacgtgtagcatatgtgttagatatggttctggggagaaccatatttaagggaggagcggaggagaaacctataaagaagactcaggaagaacagcctgaaatggaaaccagcagaatgtggaaggggaaagcatttcaaagaggaaggagcagccagaggtgttaaatgctgctcacatggaaagaaacacgaggacgaaaaagtgcacagcaaagataatatttctgaaacgtgaaaccaatgtatgtctgtttcatgctccatagatcgtgttccctgtaattttcccgcacccgcggaatcaatggcaccagtgggtgctcctgaaggtgcctctgaggaagacagtaggtgccatccagaacaaggaagtagttgcttgattttgaactgtacgttagcaagctttattaggagaggaaagagttttcctaattccaaaagcagctcccctttgcatatgaagagcagagggtttgaggctctaagccatggtgtagacaggatgcaggaaatgacagggrggctgcttctgggctgtggaagatgggtggaggggacaaaatgagaagtgtcctatattcctccccaaaacctcctggtttctggatgcttcctcaaactttaatctcccagctgcctttgttctctaagtcactggttctcaaaccttgtgggaccaagggctgcatgagaatcacctaggacccttgttaaaaatacataatttcagccacctcaagatctatatagtcagaatttctaagggtaactgagaattcgcatgtcacgagttccctggaaagattctgctgagagccagcgtggaaagccccggcacagtgagtgttcctgttggtccyctctctgaccacctcagacygactacatctccaggctcgaaggacctggcccctgaacccccaccctccactgctttatttttctctgtggaactatcaccagctaacattccattttgtttacctgtttattgtatgtccccttctgctagatggatgcttcaggaggacaaagtctttttgcttttttcttattttctttattgttaactgcacacactaggtacataatagacattcaggaacaattaatgaatggatgtatgaagaatcaaagaaccgagaagctttctacctattctgcctaaggatacatgatgaaactaagctaaaaaaatgaaagggaaataattctatcaagaaaaaattaaataagaggatacagcaaactggcttttcctttagagagtcaccaatatatacacatatacgtatacacatacaaaaagtcacagacacaaagagggaaatgagccacagtgttaggagatagctcagagactctgagccacagatactcggctgtgggtacctgagtcagttttcctggaaatagctttgaaataccagcatctctagtcctttctgaatttgtaagtagtctttggacttttgttatcaaacatcagagtttattcttgaaataaaagtttgtttccccttggaattctgaggctttctcctttagaaccttggcagcctaagtccctctctacctgtgtctttaagtatggtcaatattcaaaagctttggatggcgttgtcttcgtttatgcggatattaggttgcctcagtcaacaatgcttgaaaatggctttaaaatgagcatcatatcatgaagccatatttgtatttaaattaaaattgtttttttttttggyctatgtcataccagggataatatagagcaacagagaaccagggaaaatgtgattcatgcatctccaagtcaggaaaaagagactattggaatcatagccagcgacaaacaagttattgggatttatagaaaaggatggctgagcattcctggaaaaacaactgactttttgttgttgttgctgttgttagggaagattttgtctgcttaactggccagagttttcactccatcccccgaagaattgacgttttaaaaagcacaactgtagatttagattttcacagtcttttgctagattctttaccaaagactattagtgagtagtaaccctgggattgtrtaaaactttattaaggatgagggaataaataggtttaatttcaggaaataaaactggggctaaattagtacttctctgacggaaaatgtataaataatgtgatcccctggggacccaggttagcactagatttatttttaaattttataactcatctgaaagagagagaacayagtggaatctatatatttgtatattcctctaagctgttctgatttgaaagatattaaatcaataggaataactttctgagactcttgtaagattgcataagtcagcacaaaagtggcaggtaaccttcagtgtaagcaagaataaaagaatacatttaggagaaaggcatctaaactgtacttatatgatgatgaatttcaagctatgaattactaccagggaaaaggatttgaaatatggaggaccgaaaaggccccatagtcaaataatttggtgaaatattacaaactatattcttcaagattcaccatgtacctgagcatatgaarggcttgagaaaggcctgcagtaaagaaacctgcttaactttgtttattctgggctcaaataggttttcaaaaggagagaacgtgggttgttaacttcctggttggctactgagagaaatgagtctcttgagcaattatcctttgcaggtagcttccatgaagaacccagtttttgagtgcctctagcagagamtaagcttcaaacctcattaaccatggatccaatccaatatggcagcttgtatgttctccattctcaaagcccaatataaatgatgggctttcttcattcacccagataactaagagctgatggtaccccattgagcagatatgggagacaatgaatcttcatagatgagtgcctaaggatatatgtgtcactcaagagtaaatgaaccaatcatgttgctatgcatagggactcagttaaagaaaagtcagataaaatgggaggctggtatctcgcacagcactgatccggctctctgcctaatttttcacttttcatccagatgttccccgtcaagaaggcacagtcaataatgtatgaatcttaaaggcagaggcagatgtggttattactccctgtaggcatttcctgacttggagacgacatgttactcgagaatgactacaatttttaaaaatttaagttgatatagcccgcttatgagtaaatgcatttcagtgcaaaagtcttttcagaattacagtcatcatcacagtttagtttggcctttaaattttcactgtaaactctccagatggtcacatatgggggcttctaaggcagaacacgcttcccaataacattagagcaagcagccttctctaggaggcatccatttccagcagtctatttttaatatttgcttttatttcttaatcctcctgaacaataaaaatgaacgtcattataaccaagtgtggctgtagtcatcaatacttcagagtccaaaaatacattggccttgcctgaccagttgcccattttctggaatagctgggtatttatctagcagygagagaccattatcctgagacacagtcgtgttccaccgacacctgatctactaattaaaatcactatcatgatggactgtttaaattctggtttaaatgttccttttgcatttgcatttaaaagaaaacacactcctcatcatgggcaccccagcctgggttataatttggctttcctttgccagaattataatgtcactctgacttgccgctggttaaatctaaaagagcatctaaatgtgcctcacagcttggctgttgcttggcaacgccagcagccacctcctcattggggtgacttctaattggtcacaagtcttgacaggagccactgacttattagaaatgacacttgattattcacctagatggctagagctgatacttagcagcaggaaattttgcataaaaaggagtcgtggatgtttttaatatctgggtggcttttagcgatggtgtagtggaagaaggaagtgataagtttcattagtggaaattaatttttcatttgttggtcaccagtttagagcactttaaggcattaattttttcattttwaaaaaaaacccagaaatacgtttaaataccttcccccacccccagcagctgacccttacttattcagaaaaccctcctctgacatcagccccaaaatattgcccccaggtccaccaagggccaaatcagatgaaatgttcaatttataaaggtcaacaaatatttattaattagttcctgttgttaaggagtttataatgtagaagagaaacamggtacataaatcactgcattattaccaatcgtggaaggtggtgacagagctggggtcctgctttgagcatcagaagccactttggcagggaggaagcagtgagtagcaccggaattgagctctgaagattttgctgttttgacagagggagaaggtgcattgcaggtggaatgagctgcaggaatcaaggcatctggacagaaaagtacagggtatgttcagggaataggggagtacaaattggctggaacacagagtacatgtaagggattagtgagaaagaaagctgaaaaagtaggttgaggcacgtacagttcactgttctgtgccgagagagtgtttggtgcacacttcactagagctcgaggagctattaaatacttgaaagtgagggagtgacctgctcagaactctgtgttaggaaaaagggtttcatttcagctgtttagcccccaagccagccatttcccagacccatggggcaaatctttctggtgcagatgaggggaactgtgaattgtctggaggagtctcctctttgtagtagccccaagtatgggcaggctcccaggggccatgttatgacatcaaggcagcggtgtccactgtggctcttttgagtccctcttcgtgtgtggatcaacaagtcacccaagctacacaccatcaacgtttggggcttatctctgtttagatggatagggttatgyaaaaaagaccctctccttccctctctctgtgtargaaatatgttttccctagcactcagcattgtccaaactttcargaactccaaaggcttaaagatggtgggttttttctttctcaagtttatgacataagatctgcacagaatgacctagaagtgaataaactaaggagcaaaggaaatgtggaggctgagttttgtgggaaagcaacaagccaggagtcaggatatctggggttccaattctcatttgaacacaaaaataaccagattctgccctttaggtccctatgtattctgaagttgatgtgtcaaagaaatgacaaaaggctttcttgggaatgggatgtgttgctgaaagcacatggaccaatgatctgacacttccctgcactgagctaagaatttggctgctctctccatggcttcaagcaactgtctcaacctgatgctttgtgacctccttggaatcttcaaatgtcagtggaaagggacattatagctcattgcgatcagcccttcatttagggatgaggacccacgttcagagagattcaaatgccaggtccaaagtaacacataggaccagcatgagtctcagctttcttcttcagagccagttttcagcaaaccacactgtattcatgctaagagacagtgcctcaatctgttcatgtttcttgggtaccttctatgtcaaggctctcaaggaacatttgatcaatcagtcatcacacaggtatttctagaaaatcaacagaatggggtgtgctatgctcattcttgatataacaaataccaaaaacttcattaatccatgacaacatgcaatagttaccacaaaagagcaatattgagagtgtattagttatctattgctgtgtaacaaaattaccccaaaacttagtggcttaaaacaaacttttgttagctcattgtttctgtgggtcaggaatcctggcatggcttagctgagtgcaaaggctgagtccagagggactgagggctgaggccagagggatcarggtgtcttggagtagtagtcaaatggctggcctgatctgtggtctcatctgaaggcttgactgggggaagatctgcttctaagcctcatcacacggttattagcaggattcaattcgtaatggactttggaagataagaatcttgtactgtgtccttcagtcagtggggatctacaaatgtttcagcaaagcattactgaaataacaagtatttttggaagatctggccaggcatggtggctcatgcctgtaatccmagaacttcaagaggccaaggtgggaggatcgtttgaacccaggagttcaagaycaacttgggcaacatagggagaccccgtttctacaaaacattaaaaaaattagccagctgtggttgtgtgtgtctgtagtcccagatattaatacttgaggggctgaaatgggaggatggtttgagcccaggagggcaaggatgcagtgagctgtaatcatgccactgcactccagcctgggtgacagaatgagatcctgtctcaaaagaaaagaaaagaggccaggaagctctttcaaagaactttctttagtacacctgggtgtcaggcactrtcaaagtcctaagactacaaagatgcttaggctatagtcttttttctcaagaaggaagatgacaaccatattccaggtgacaagtagcaacacctgaactaggaggtgactgaggagataaatatgaaagaacagatgaaagaaaggaagcaatgttaacatgatgaggcaagaacagatggctccaatggggagttgtccctgaggaacaagaaaagagaagagaatgattccagtagtccaaaccagcctgggaggayggatccctccagaggacaactaccatgtttacaccactccctgcyttctgtgccaagtgttttgcatattttgtttctaatctttgtcacgactcttcaagggaggtattattttcatttttgcagatgaggaactagactcagtgaggttaggcaatgtacccaagatcacacagctataaagtgccaggggaaggaaacctactaatttgcagtgcctttgagtatttgctatgcttggggcaagtattctccaacaaggtcggaatcttacactcaaggaaggaaactcagtgatgagattctgtgagtcacccaaaaggagaggagaagaagacctttgagcagaagctctcagcccttcttggtcgttactctctttgcccactcatcaggccctccctccttttagaattcactctgttgccctctgtctgcaccttgactcaaaatttcacagacacagttggtagaaaatccattaaaaaaaaaactggtgcccatcaatgacagactggataaagaaaatgtggtacatatatggcatggaatactatgcagccataaaaagggactagattatgtcctttgcagggacatggatggagctggaggccattatcctcagctaactaacacaggaacagaaaaccgaacaccacatgttctcacttacaagtgggagctgaacaatgagaacacatgcgcataaggaggagaacaacacacactgaggcctgttgggggaggggggaggaagagcatcaggataaatagctaatgcytaatacctaggtgatgggttgataggtgcggcaaaccaccatggcatatatttacctatgtaacaaacctgcatgtcctgcacatgtatcccaaaacttaaaataaaataaaattttaaaaaactgggtactttaattacataagaatctccaggttatgcagaaccttccttccttggggaatttgcttcccagggtggggatggtgatttcccctgaatggttaccactggttgccagacagctgctcagcctcacactcggcatcacctgtgtagggacaaccaatgtgagaggcgagaggaacaaaatgggaaactttctcccctagcttggctactgcactgcaaccccggtcttagcttgggctgtcataaccaaacaccattgagtgtgtggcttaaacaacagactttttttttttttgagatggagtcttgctctgtcacccaggctggagtgcagtggcgtgatcttggctcactgcaacctccacctcccaagttcaagtgattctctggcctcagcctcccgagtagctgggattgctggcacgggccaccacacctggctaatttttgtatttttagtagagagggggtttcaccatgttgaccaggctagtcttraactcctgacatcaagtgatccacctgccttggcctcccaaagtgctgagattacaggagtgagccactgtgccaggcccagacatgtattttctcacagttttggaggctgggtgccagcgttgttggtttccagggaggcctctctttctggtttgtgggtagccgccatcttgctctgtgcccacaagacctgttctttgtgcatgagagagagagagagggagagagaataagcatgagtgctctggtgtctcttcttataaggacaccaatcctattggatcagggccccatccttgtgactttaaccttaattacttccttagaagccctatctccaaatacagctacactgggagttggggcttcaatgtatgaattttgaggcaacccaaacattcagtctataagaactcccaataaatcactttttttaaacctaataacattaatattttatctgattataagtgtaatacatgtgcattgtgaaaaatttggaataaaacaaaaaataaaaattactcattatcccatgaagaagatgaaatgtaacaaccgaatgcatcttttagtaagatctgagtgagaatagcattgtgtattcatctgtgcatgtgtgtgtgtgtgcacatgccacgtttgcctgcttgttcaaaaatctaggagaagaactgcggggtttgtggattgtataaagattatgcaagcccatcaaagacagcttttgtttgtatgcaactcatgtaaaagtaaatattccgtaactgctgtgtaaaatgcaaggaagaaaacctgaaatgatggctattggccaacatacagattatgctcggctgtcttataatattttctctgcattgctttttaaaacatttttcatattacatgccccatctcatatcacattaacccaaataaaaatgtcattatccattcagttcgacagacagcaagcagagtatcgcagaaaattacaatcacgtcaggcagcaacaaaggattctagtcaaargcacgtagaagacccgatggtgggcagctggcctgggctytctttcacactgtccaggaatatgtttggattcagaatgggtggccccctctttatacacagggcatgcctctgaagagttgtgtgtaaatcacattttatgttccatctcttttgttatgttaagaaagcttcaagctagatatctaaaaagacttcctttcaaacagtacatatatatatgtagatagatagacagattttcttttaccatgttactattcctctgaagtaaatttaaaaggtatttaggtttatgggattttatkaaactaggattcagttgtaccactaaacttattaagataatcgaaggaagatagccagtaaagctagttataaaaatgtggcttagactgtactgacttttccaatgttaagggtagactgagacttcttggaagttggggcctagagaccattttaagtgacccattggcacacccttttgtactgatggattattaaatcgatggtttgtgagaatttagaaaagcatacagtagtcatgaagcatcaacacagagatactaagaataaatcaggatagtcatacttatttttcttttttgagtggacttccagataggtagatgaggtaaatcacatttctgtttctrcaaatcatttgacaaagtcttccccagctgactcatcagtaaagcggtgcctggctgagtatttacttaggttcatgcacagatagcccaagatccaaaaacagtgatgatgaatgattctgcggctacctaaacyagctgtccagtggaggggcacaaggctctgcaccagggcctgcctacagaccaatgaactgaagggaggcttagaaggcacacttactacattgcagatagaacgaagaaagaatagcccagtgttgcaggtgatgggatttttttttttttttttttttgagacggagtctctctctgtcattccagcgatgcattcttggctcactgcaacctccacctcccaggttcaagcgattctcctgcctcagcctccgagtagctgggattacaggtgcctgccaccacgcccagctaatttttatatttttagtagagagggggttcactctgctggcccgccaggctggttttgaactcctgacttcaagtgatccgcctgccttggcctccgaaagtgctgggattatagacctgagccaccacgcctggccaggtaatgggattttaatgagtgagtacatcttttgctcccccacagtgttcaaacaccccagtgctctaagccctgtggctttatgaacagcaaatctattttcccaagatggctctccctccatgagccttggcaacagggcactcatgagtctcagatgctctgctatctctccacttgggtgtgttatgctgtgaacattctgctccttgagctgttgttcagccgtccatagcgctgtccaggccattgtccctgccttggttaccacctccacgtggcagccttcatggagccattgcagctttgatctacaggactccctcgccctccatctacgggaccccctcgccctccatctacgggaccccctcgccctccatctacgggacccactccttcagcagaggagttgggcccctggtaacacaattctttccttacacccagagcacgtgggactgactcggaggaaactgcagaggagaggggtcctataaaatttcatgtcctcccaacatcctgtcaatagccggccagctgtcccactctaccaggtgtctccaaccaactgaatattccagagaagataagagatcgttctgctcagaacacacggcaggacaactagtgcctttctaatgaatggtccctaaaaaaatcgaaatagcaattgtacctggttatcatccatggaaaaagacctcgtggttttcattaacctgaacctcaatatttgcctgcactgtttgtcttctagaaaagtcaacataaaactggctttgcgattgacgtgtagggtacagatctcaggaagtgattcatttaccatacaccaatccacacctgaaatactgtattccacttatgaggccacctttaggagtgaccctgataaagatgagagcaataaggcaggaggggtgtatgcaagccatatggttcagtcccccattgaaaggatgggggcagccaggcacagtagttcacgcctgtaatcccagcactttgggaggccaaagtgggtggatcacgaggtcaggagttctagatcagcctgatcaacatggtggaatcccgcctctactaaaaaaaaaaaaaaaaaaaaaaaaaaattagccaggcatggtggcacacacctgtaatcccagctacttgggaggctgaagcaggagaatcacttgaacctgggaggcagaggttgcagtgagccgagatcacaccactgcactccagcctgggcaacaaagcaagactctgtctaaaaacaaaaaaaaagaaagaaagaaagaagaaggaaagaaagaggaaagaaagaaggaaggaaggaaggaargaaggaaggaaggaaggaaagaaagagaaggaaggaaagaaggaaggaaggaaggaaagaaagagaaagaaagagagaaagaaagagagaaagaaggaaagaaagaaaagaaagaaagaaagaaagaaagaaagaaagaaagaaagaaagaaagaaagaaagaaagaaaaagaaaggaaggaaggagggaaggaaggaaggatgggaacagttgtctaggagaagatggggagcagataggtacttgctgtctgagtgtcgggtgcactgtcatgaagaagagaacagaaatgaaaccagcaaaagattgttagacgaagtcagattttgcctcagtacaacaacataccttctgagaagcagattaactttataacttttcccagtgcctcaagactttaagaggaaagagtgggtattacataatcagtacgatgccatgattcgttcattcacttaacaaataattactatgagccaggcgctgttctaggtgctgggtttataaaaatgaagaaacagactaagatctctctgacctcgagaactcaatattctagtgtgaaaatcatcaaatctaaacataggttacattttatgtctttcatgagaaatgctcagaatgatgtattagagcacgttgctttagctgtgatgctattctagaatgggcagcgaataaaatgattctgctcgatattttcagcttggccttttaatcatgcaagagagaataaaaggtcacatgggtggccagcaggctccacaaagaattccacccacccgtttgtcgaagccgagtggtatctatgtgaatctccattatgccactctacctttctgtgtaagttaggaattttctaacataaaagtattttcctattaaaaaaaagaaacccaacaattgccccatgtgggcataggaggcatcttgaagtcaaggttttcccagtattcgaaagcttagcggcttaagcacaaaagaataaccatccatcaggaatgctctataaataatttctgtgttaaataagaagttgaaatggatgaccttaggttcctttggatactaagattcaatattctagtgaaagatctaaaatacaatcggaatacacaagcatagacttgggttaattccagggattgtgcatatggattaggctttatttactygctaatgctaaccaaatgtcatgaaactgagtactgattctcagttttgtctaagcacttaatgatcattttcataattatttcaccgtattcactgtaaatctgttcttcttttttgcttccaaagataaaaaatgcttaagctaaaatagacgtttagagctattgtattttatgaatatttgtgaattttaggatcttcttcttgaatcttagctgtgtgaaaaatatcttccaaacagtgttcattttcccagamagcactacatataacctcttcatctgcagccaatttaggtgtactcccggcatggtgccctaattacacctttgttatccattatcagatggttcccctcatcagccaagcctgcgamcttmtcctggctcatttaaaacgctatgcggaatctggggacgcatttgacatccagaggtaaggctgctgcattacagatgagaaatcgagtttttgaatcactgcttcttgtaactgtccataattgctgacaattaccttgggactagcaaactgtggaaacgctagaagctcataaaagcatggatggactgattaataaaaagaaaagaaacccacttaacatgggaaagagatgtgagcagagccagggtacgtgcgtcctgtcgaacctgtggatggatccaccctctgacctccacagacccaggaatgggcaggacaggcctgcgcctaaggacagggatggggggaaagttcaagcattttcacttcaagaaaaattgtggtgcacctcagcccagaagctataayttagtggtggacaccaaatttaaataactgattatctggcttttcgtcattttgtaactaaaaggtttttgctttaaaaaaacatctttagtctaagtttgtccgacccacagcccgctggccacaagcagcccaggatggcattgaatgtggcccaacacaaatttataaactttcttaaaacattgtgagtttttttgcagtttttttttttctcatcagctatcgttagtgttactgtattttatgtgtggccaagacaattctcctgcttccaacgtggcccaggcaagccaaaagatttagccacctttgctttagtcattttatgccaaatcatggcttacagcagataaagaataaagtgggatggtgaatcatccagaaatttattcattattatcattgctaataaaataataacataatcatcaccaacactggtattgcaccagtttacacagtcttttcatccacattgtctctgattattataggatgcatgagttggctaaagataaggtggcctcatcagctataaaagcaaagtaaataaccctcaagacccttaaatcttcaaccttcaggatcagatgaaatcacattcagtagtctcattcttgttttcactctagcagggaaaygtgtaatcagttgtagaaacgttttcaataaaagcagtgtgaattttaaaagtcatctggaaacgtcatgtattccttaatgataagttagtggttatagaattcatgtacaaaaggagttaagtgtgtgcctacattgagaacaaaaattggccttttaattataaaaagatattaataacccagtttttagctttttggaaaagaacttaatctgactactcctataagataacaaaaagaatcatttgagtttaaaatggccttttgagggsgcagctttcctatagcctaagaggttaaattttctggagctcctgccagacacttttccttctgtttgtttctaaagcacaatgtatgttttctgtaataatatacagatgttcatgaagcctgccttaaagtttgtcttgtgtttatttgagtgctaagagcccttgctttttgttcrttgctattaagaaaactgtaaaatcattaagaggaagagggagacaaagttaataaaactagataattaggttgttaattcatcaaggacaatttgatgtctatcagtcaatcattagattctggcctgagctgggctgtgcagagctttgggtacagcatgtaggcgttgggtcacctgtgtgccctccttcccagggaggaaactataaagtgtccttcttagtacctggctgtgttctggttgaccacagctgcctgaggctcgaaggtggaagaggctgtgccctcctctcctcccaggtctttgtttagacgccaggtcttcgtgtctcctcccaccctctgccgtcactgctcagagtgccccatccaggagcccatctccctccacctccccccagatctgcagaagctcctcttccagacacatctgcagggctgggcaagccagtgtaagcaattcaggccctcctcctctggagggggccattgtgggtagcccctgccagagtcctttcagatctctgtgctcccatctcccgtaggtgctactgcaattacaccacagatgtggttgccagcgtcgcstttggcaccccggtggactcctggcaggcccctgaggatccctttgtgaaacactgcaagcgtttcttcgaattctgcatccccagacctatcctggttttactctgtaagtgcggctgcagcccggggcgctgcgatgactccagcaagttgggcagaccccatgacacctggggtggcttctggggctctgtccctgccactgggaaagggcactcgggttgttcccctgcagaggctttgtcttatggagccaccgggttcctcttgtcacccgcctagggccacttattagcaatgctgtagccctggcattggtaataagtggccccaccgccatggtgagaacggttgggacgcaccgtgttaggcacggggtgtgcgttgcctcacttagtcctagtactcaccctatgagaaaaatattcttgtccctatttctcaggtgtgaaacaggcctagaaaggccgagctgagactggaacccaaagcctttcatttcctagggcatatttctttccttcagcaaaatcctcttcacaagacttctccacttgaagcccaacacacagaaatcctgtgtggtggatgaggattaggtcacccaatgcacgaggaccagtctatttattttattttatttattattattattatttttttagatggagtttcgctgttgttgtccaggctggagtgcaatggcacgatctcggctcaccgcaacctccgcctcctgggttcaagcgattctcctgcctcagcctcctgagtagctgggattacaggcatgcaccatcacgaccagctaattttgtatttttagtagagaaggggtttctccatgtcggtcaggctggtctcaaactcccgacctcaggtgatccacccaccttggcctcccaaagtgctgggattacaagcgtgagccaccacaccaggacttattttatttttattgtagaagtgagattttgccctctggccaattctagtatcttcttgcttttataggagcattgacgtgttgttatgcttggtattgattattgccatgatttctaaccattctgctgggctggtaaattccattcattccttgaccagtttcattcccgtttctgagccgatgtccatgggagcccgtcacctcactggctccgccctgaaatcgtaggcagagtcactctgagtgtccagcagtctcttcctgcaccctttccaccgatcttggaggcagcgcaggctgtgtctgccccttgtgcctcaaccacggcccaggcctgtggggcaggtggctcagttgtgtcatcccttctatttctcctctctgcctctgcagggccctcctgctgctgtgtcacattggttcggactctggctcttgaaaatgggcctgcgcattctgagagcatgtgtgtctggagatgttctccccagcccagctcccatagagcccggtrcagggtgaacccacaatggaagctgagaagctgaacccagccagtgcccctctccaggggagatgaggggttcctgactctggcagcccgatccccagcacatggcagcaagggcccatgctgcacccaggggccggcaagggaggcacccacagcagcaacagccagtacccttgtcagcagctgcagtggcagctcttgggagcaattcaggaggtcatgctgggaacaattatccactggaaagaaaattcaaatgaccagaaagtttgtaaaaagtaaatcagcttctaccacttgctaaggcttgaaacagcctgtaatcctttctctcttaatgaagtacaaagaccttcaggtctcatccccaggacctgaaacattaatttatgagggtgaccttgacctcttgagggccagatggaagtgcagactcgattaattgcacagatgtttaytgagtgcttactatgtgccaggaatggtgaggagtaccgagagggagtgagacatcacccctgctctcagaagcagcagtgcggcggggagggcaggactccaaaamggctccgattccaggcccgcgtttgcttcccgggaacaggcgtctaatggccctggtttattatcacccccttttcaatgccacttttgtttttctctttcaagtatcatttccatccataatggtcccactggcccggattttgcccaataagaaccgagacgaactgaatggcttttttaacraactcattrggaatgtgattgccttgcgggaccagcaagctgccgaagaggtaacgtattttaataggacacagccttgaaatggaatggagccgactttggcatcactgtctctgctctttctcttccctctcagccccgcacatcacaccgtgccgtccttcagcaacccaccacttacagcttccagggacagtggagagaacagaggaaggttgaggaaggtcagacaagaaagggagggtgggacggcagagagaagcctacagcaatgtgtacatcctcggacacggacgggtagaattaaagccgcccccaaaactgtctccctagtgcaagcatcaacccaagcacaggttagaatagcccagaagaattttctgggtaagtgtgcccacatgcaattttcatgagcatattctttatattgaaaacccagcaagatggagttctccagcatgaacagcatgcttattagagagttcggcaactgtcagtcactaaccccacactcccactcagcatggaggatgtcgctacagaactcgtggttgagggccccctggactccttggcacgattcatatgagacgtagcattttctttcctccttgcagatttgcactatgcttggcacatagtaggaatcaagtaaatatttgttgattgaacttggctaaaatagaaagaggagttttcagtgggaagaaaggtcatttcaatactggatatgcatatgcatatgtaaatctgggctttaaagcccttgtcacattaaagaaagttactaaaaaggaaaacagggctgaaatggcctttccttagctggctcgtgcaagatgcaactttaaaagggttgtctcaaagactggatggctcagaggaattggtgagggccaattgttaaggcactggcctgaaatgaaatcaggggtcaattagtggcttgatacaccgagcggccttgggcagcagccgcgtcctgtgcagcttcacgcccggagaactgtgcagcaaacgtgtctagatccagaaggcatgggaaggtgtaggcaagcttgcagccccytcggcccacaccactgtgaactcaactcgcatgtccttggaggtgcgggaagaagcagctaactggcatccctgccccagctctgaagcctaaaaggacagaacattctgatccaggttcatgtttctccgcagagtgaggctggagccagggggagaagggataaagaaagaaccattttcaaccctcaacattgctactaagggccaccttttgagagtgttcacacacacacacacacacacacacacgcatccctagcctggctgtggaatcaggctaaaaattttaaaactgttgcatcgaatgacttactaagaggtgagaggttattaaagatccaattactgggattgcctagagcttttccttttataaactctagtgctatttgtttcaaacaatgagttgatctgagaaaaatctcccaaccacaaatccaggacagccatgtcaagacagagctatacggttactaagaaaacttgctttaaaaccatctaaagtctgtatacattccatcaagcagatgtgtgtttgcgcagtgaaaatgcrgcacagatgttaaaaggtaaatatttttctaagctctagccgatgggtggattagacacctacatctatcagggtgcgtattttccttggataggaccataaaccagcaccgtttcagtcctcaatgggcagtgttcagatagcctccctgatgccatgtgaataaaagaaacccatctatactaatgttcttctccagtgcacgggccctggagagtggcctttcctctggcctctgtagctggaggttaagacagatttctgcaagattctgacagccctttagcagtctgtctgggctgggataagaggaaaggatgctggctgcagttttgcccatggaaaaatacccggtgtagaggtggctgtgccctccctcccatcattactcctacactacctcagcaaagccatagccaagcctcagggaccacaatgatatcacacccygaggaccttcagagggactgactgagaggtctgggggtgctctggggtcctgtgctggtgtcccagagctgagggagcaagggatgctcacttcccctgcgtgccatcttgcctgaccctgccccagctctgctccatgggagcagggccagcagtgggaccacaccagcgcccattgaccgagcagcaggaaggaagctggggaaagccagcccttgaggatgctgtttgaaaatcagaacgagcagggccagggtggaatgaagccaccaactacccccgaccctcaccattttctcagctattacaacccagcaggctgttgggaagctgaggccttgcttccttagactcaaggtctgtggcacccatagtcttaaccttgagcactgctaggatcccagtaggcaccttccaaagtcacaaggctggggtgcagtagagctgcaaaggtgtcagcagccaagactcccgctctaaagagcattcacttgtcatcaaactcagcatacccatcctccaaatgcacgcactgcattacatttttatctgttgagtcatggactgcagatttaacatgtgctcagcataaaactaggcacggtgtcaggggttgagggtggggtcctgccctggagttgcttataatcttatggaggaggaaaagcaaccacacatgaaatgacaacaatcttaaaagatggaatcatcaggaggctgaggcgggcggatcacctgaagtcaggagttcgagaccagcctgaccaacatggtgaaaccccgcctctactaaagatacaaaaattagccgggtgtggtggcacaygcctatagtcccagctactcaggaggctgaggcaggaagatcacttgaacctgggaggtggaggttgcagtgagccaagatcacaccattgtactccagcctgggtgacagagcaaaaaaaaaaaaaaaagatgaaatcagacgctcatgtgtgtggcatagattattaatgcaatcgaaattcagaagccagtgaactgagaaaatgctgcagctagcagagtactttgcatgaaattctaatatttttctgttggtgattctgatactctccttttgccattttagtcccataaacttcagaaaatggaaatgtcttggttgtccttcatgacattaaagagcatttcaaagaagggatgttctaggaataagctttgttaacacagaggcgatatagaaacactcctattgttacaattagtaatagtgaaaatataaagaatatgcaaatgactgataaagaaggtagggggaaatggaaaaaaagctctgactacttaaacgggggcaggggattactgagaaatagagggaaccgatgtgaagatctgatatgaaggctaggggatgaagaaggcaaagcctggagactttgaagacaggcgccgccaaactagtcccctcgccttgccctcacttctgttaacttcctactgtgtgagaaaaactggtggctgcccatctaagccctaagctgcacagaagtgagcagtacagcacatgcttggttttaaatctatctatgtgatgttgccattgttttattgttggaaaaccaaccaccaaccaacagtacaaaaatgtataaagtaaaaaataaaagcccccctcctggttttcccacctcctccagctcattatgaactgttgggtggggacattgctaaaatcgtctatgtgtagacagatataggtgatgatatatttagtacatttgctgtttttgcagaaacgagagccacagtgcatactgttccatgaccggctttgtttttacttaacaaagtggctcaatgactttcacatcagcccagatagaatggcctctgccttgctcagggcagcagcccaggctgctcttcactgccccagaacctgcctgaccagtgctatactaagggacattcaggtggcttccaggttctcaccgtcccagataacccagcaatgaggaagcttgttgctactgagctcttcaaaagctatgcccatgtatcttcctcctttgttctccaggaagcctcactcttcatgactgtaaggtcaaaatgtgcatttttctccttttgttccttagaggcggagagacttcctccaaatggtcctggatgcccgacattctgcaagtcccatgggcgtgcaagactttgacatcgtcagagacgttttctcctctactgggtgcaagccgaacccttcccggmaacaccagcccagccctatggccaggcctttgactgtggatgagaytgtgggccaggccttcatcttcctcatcgctggctatgaaatcatcaccaacacactttcttttgccacctacstactggccaccaaccctgactgccaagagaagcttctgagagaggtagacgtttttaaggagaaacacgtgagtacaagttggatccagttacccatgggatatccayaggacaattgattttgtgtttgtgggagtgaaacttatttttaatgacttgctaatatcacattctaagcttataagatgaaatagggtcattgcttggcttctcctgctctccgggttagcaagcgaaatgaaatgttgagaacaataaccacaacaaaaagacaaattgtgtgtgcaccttcactgtctggggtagtccatgaagccaggcctggctcgaggaagctgtggaagcccaggaaggtgtcaggcccaaagggcagggatggggaaggagtcatggcttcccaatatctgacttggagctgccacacggagggaggcaggtgtgagccagaaaggagagccaagatagaaggcaggagtggacaaaaggacaggccaagctgaagctggactgaagactggaagctgaggaggaggctcacaaatggaataagggaagatggggcccgtcagcgcccaggccagcttcagggcattttcttctagatgaggcccctcttgatcgyttatagcagatataacgagggtgctgagcaaggctactttatcacctcattttttcytctagatgcttgtgtgtgtataactttgactcatgagttgtcaaagagattcatttttaaaatctgtactttaaaaggaagaccaccacagtggaatcctttctgttacattctgatatgattgctattacattcaccattttgaaaggtggtctgttctgttactggaaccattaaaaaatgtttcatacaatgaactgaaaaccacttcccgggaaattctacttctttattctactggggaagtaaaggcaaagtcartgtctcttcttcacagcagtttttaaatatttgaaaactgcattcactgtgttactaattaattgtcttaactttaggctcaacatgagtttatggtcaacttcaagttctaagtagttatgacaactgccaagctgggcctttccaaaccctgcttacacaattgatttattgagcctagacggaagagtttatatttatccttattactgttcaagtcagtcaaaataattttgaatcttgattctgccatctgttatattagcaattcctccagcctcgtgtcatctgagacttattaagcatgtctcctatttcatccaagtcattgattaaaatgttgaacaggacaggacttccctccagattgacattgatccattaatcaatattctttgggcatggaatctcaacaagccatgaatccaaataaccctgccacccatcttattctgttttatatgtagtggtttgtgtatttgttcttaaattgaggaaagggtagagggagggaccaacggtgactggggtgcattagtgcaaaagaagtaaaaggagctggaagcgaggcaatctattaggatacatttagttgcagataacagaaccccaacccaactgatttaagcaaaacaaaaacaaaaagtaaaaacaaacaaaaagactcataaatgtgtatttctgagtacatttaattgagcagctcaggaatagatgtggctccaggcaaatctttgtctaggtctcaaactggtgcacaggtccgtttctctctcgccagttcttggctgtgctctcttatattggccccatcctccatcatgctctcctctcaaagccccaagaagcctgtcaagagtgtctgggactccatacttccttgcttgtaaccaatggagaagagagggtctgtggcctaaaattcccagaaagagtcatgagggtcactctgacgggaatgcttaggtcgctgcccattcttttttattttttttttgagatgaagtttcactcttgttgccgaggctggagtgcaatggcacaatcctggctcactgcaacccacacctcccaggttcaagcaattctcctgcctcagcctcccgagttgctggcattacagacattcaccaccacaactggctaattttgtatttttagtagatacggggtttcaccacgttggtcaggctggtctcgaactcccaacctcaggtgatccgcctgcctcggcctcccaaagtgctgggattacaggcgtaagccaccacgattggcctgctgcccattcttgaaccaactcttgaagcaaggggaatggggtccctgataggcttacaccaatcagactctagccctcagtcaatcatgctcaagtcacatgactgagaacttgggaaggtgacttctcaagggaagcttagcatgctgtcccaggaaggcattagagggaagcccagcgctctggtctcagtaaaccagaaatcacaccaaattaagggctttgaagcatctaatgagtgtccagcagtttagtagacacagcagaggctaggagagggggcagaagctctaagagatagaagtcaggtcctcatcttgcgggaattccatcgccaattgagaagcaatgttatgtctatgaaacaatattttccttccaaacacaggcctgcagggcagtagaaggcagaagataatcaggtctagaatgtgtgatgtcatttagagagccatggggcgataggagtctgtcccaccagctataacmatagtcacatccagttatgtcagtctgccaggaggacacagcaagtgctcatgttaggccaggcacagtggctcatgccagtggctcatcccagcactttgggaggccgaggtgggtggatcacctgaggtcaggagttcaagaccagcctgaccaacacagtaaaactccatctctactaaaactacaaaattagctgggtgtggtggcacatgcctgtaatcccagctactcgggaggctgaggcaggagaatcacttgaagcagggaggcggaggttgcagtgagcaaagattgtgccattgccctccagcctgggcaataagaaagaaactccgtctcaaaaaaaaaaaggaccacatgttattatggggctgtacagactgttgcaaagcactgagaccccttggtcaaataaacacattacagcaggtcaaatttttgagtttagtgtgcataaaagtatataggaagactgcttagaatgcactttccagggtcctgacctcaggggttccgattccataagtctgggctgggacccaggaacccgcattttattttattttattttttgagatggagtctcgctctrtcatccaggctggagtgcagtggcacaatcttggctcacagcaaactccgccgcctaaggaacccacgttttaaataaatgtttccagtgattctgatgcaggtggtccctggttccactttgagaagacagccttagactctcaagggctcggatccctcttccaagaaaaaaaatcagggtccaaagccctcctaagccatgcaagccacaaggtgattttcttcccctatgtgatagctggttgtgggggggagtctctgaaaaatgggaatatctacagctgtctttttaaaaacatacatttggtagtcacaataatgttgctttgcatagccttgcacatggcacccactcaatgaatattggtaggttttctttttttcttttctttctttccttcttttatttttttaattttttttttttttactataatcagagctctgttaatatgggccatctgtcaggacatggaaatgcagattagatgttcacacattagatattttcctgaaaatattcctgaaaatttgcatgtaaagtatgacttgttataattttcctgctggtttccattcaacaaatatttcttgagtgccagttaatgccagactccggggctccagccctacgcacgagggtgttctggtctagctcttctgtgacatccctgtagagcatccccatgcctcattagatggccttcccttgtatttgtcaatgagattgcttaatttgagctctagagtttcttttccctgagcaatttctttcatagcaatgcaccatgggaatctgatgagagctacatctcttcctccaagaaagagcagatatgtgcatggcatcagttcagactcttctgtggacagtgataaaaaaaactcagcccagattgtctcagggagtttactgacccctayaactgaaaactccagagggcagagctgccttcaggtatggcttgattcaggggctcaagccctgtccaagttgttctctctccccatttctcagctccggtttctctgggcacactcccttctcaggcacatctyccctaggggtctcaagccagctgtgtaaccagtgttttgaacagtctcaactcagtgaggtaccaacttgaaaccatttggtgttttttgtttcatttttttcccttaaatgtgctctgatgaatctcctttccctgtccgtgatgatactttggacagatctcaatgatttctggtcattttggggggcattaaaaagtccaggccagtctggcccagatgaaaacttcaggctcaaatccaatcagtgcccttctgttctcttagctcargctgacctgtggcctgaggatgccgccctgcgggaggagaggtctgttttttcccctccttctacccctcccccamccctgctgggcccctttctcctccaggagtggggcctgtgaacggatccccaaatcctgcctacctggagctgccctcagtgccttccctgcggggcttctgacgtggggtagatgcaagacgtattcggagggctcccaggtctgaagtcctcactgcataattccctgccagggagacaggctccagctcctgccaccagctcctgccccaaggctgcttgatggggaatcttgagcaggataccagctagatggctccagcttccatgccttccccagtgtccgcccagcctatgggaaacacacaactgggccacacccacagtggccaccttctgccctctccttcctccctccaccctgtcatgtctctccaagtacttttcctttgctcaaataggcagagagggcacatcagcaattctgctgcatgagcagatggccaaggagaatggcccacctctatgagtggctctgctgaagaccctcttccttggcttgggagtagggaggaccctcttccctaggccaatgactccttgctctaagttttctttaaatccctctaatgtctttataggctgaggatgggggtaggagagagtaggttcaagttcaacgggaagaagcaagagtctctttcctgcaagtctcagcaaaagcctcctggcatcccagtgacttcgagagggtcatgcacctgccccctcaaccaatctttggaccccagaggaatatgatcccctgattggcttagacttgggtcatgtgccccatccttggagttggtgtctaggtgaggccttacccaaaccactgagctctcgagcggaggagaggttgatccccaaatcactcttattaaaagtggggtaaatggcttctgggtagccaggaaacagtgtgtttgcccacccctgtacatagaatctgtggcccccagattagaagttcccacctctcaatttcctgttatgtgatcatgttcaccttccctctgaacttttaaaatccagcttgccaaattagaaggtataagtccggcagtgcctggaacagcctgctcttgcctgtttcttgcaaatcatcccaagttccctgtgatttctgcaggaccagtcggtccagctcagcagttttgccttattgcatccttcaccatttgagaagtgaaaatgtcaggcatgaaagtcaataattcagattctctactgttagcagttctaaacccctggcgcatataaagatactcaaaggtctccctcactatcggggatctgcctccgcacatcctgtctggcaacatcccatctctcatcccatacagccttgactgcattctcctttcagggtatagattttggttccagcttctaaaacagttacaatccacttttttgtttgtttttgttttgttttgttttgtttttgagacagagtcttgctctgtcgcccaggctggtgtgcagtggtgcaatcttggctcattgcaacctccacttcccaggttcaagtgattctcctgcctcagcctcccaagtagctggaattacaggtgtgtgccaccatgcctggctaatttttgtatttttagtagacatgggatttttccatgttggtcagtctggtcttgaactcctggcctcaagtgatccgcctgcctcagcctcccaaagtgctggaattacaggcgtgagccaccgcgcccggcttcaatccactttttaattcatgcccccagactgattctttctggrccacatgtgttttcttccaaatcgtcttgtttgggaattttatctggcctctcctcctcttgtcccaccatcaaaattcagtgtaaaatcttctttctcaagtcccccaatctcttggagaagtctctcttttcccatgttgccttggtctatggaaaaggaggtagtacgttcagtaaattcaatagtggatgggtgggaaaaggtttgtaccatttgtaccactcgtaaagctgaaaaaaccacaccatctatttaatgagacctttgttatatggctgcttcattgtgttctcatgtaattttgaaaaggatgagaaaggaaaaaaaccaacttcttttcatataaattgtgtcttctatagctttagtgttctatgttgaaattattgacttttgatctggctaaaccattctcttttcttctctttggtgctggactctgccagccaaaatttatgacccattttccttctgcttaattgttgttataaatctgctgtgcagaacccagttgtaaatttatcacagactggattggattgatatacagcctctctttaggataatttgaacacagttatgccttagaaggaaggccaaattcttaaaacttctcttgaagagctgctttgtaaccattataaatatctaattaaaatacaacttactctttctttttctcttaaggataaaagaacattctgtgctggttatttcagcttattagctcatgctgctgtgtgagcaaggttgaggatttgttccttgaagcagtcagaggatctccaagaaaaaaaagcatattatgtgcttacaaaaaaaaaaaaaaaaaaagccgttttacccccaactagctttttcatgaatacacatcctttgtcacagggaaagggttgagcaggaaaaaaagtgaatagcttaacacaaatctatcctcactatggaaaaaaaaaatgtcttcccatgtggatctcacccagggaggagggcatggttggctttgagatcaagtagaaaactggaaatgggtttttccccatggggaaggtttcctcccctttgcccaggtctgctggggtcgggctacccacagttggtgaggagtaagttcaggagttccccatcaattcagtcccccagccacacaggggtcagaggtgctgctgagtctctgccttctgacagaccccacaacagcacaacaggacaacagagcacaaagccacagggacaagggaagaggcaaaacagagaacgccttacagccctaatgttgaatctaaaacaaagaacagcgtcactgcagcgtgagaaaagtggcaacgggctgtggcaccggcccttggttagggcatcacaaagtttaacgtgcacgggaatcacctgggagtcactaaatctgcagattttgattcagcaggtctgggacgagcctgagggtctgcatttcttttttgtgattattattttgtatttatgagacggagtctcactgtccccgaggctggagtgcagtggcacgatcttggctcactgcagcctccatctcccaggattaagtgattctcctgcctcagcctctcgagtagctgggattacaggctcacgccaccatgcccagctaatttttgtatttttagtagagacagggtttcaccatgttggacaggctagtctcgaactcctgacctcaggtgatctgcccgcctcggcctcccaaagtgctgggattacaggcgtgagccaccgtgcccggccaagggtctgcatttctaaccagctcccaggtgatgctgatacagccagtccatggcccacactatgtacaaggagccaggttctgaaccatacgtactgtgtctctctcacgtgtgctggacatggcaagtatgtattcctcatgacatttaatgtgctcatgttcttcagtggtttaccttttgctaataaatctcagtggtttcctgatyattccataatcatgatggcattcactttattgagtgggagatgaagtgatgcaggaatgagccaatcctaatacatkttagaagtgtattaatcctaaataaagcctaaaatcatctattttcttcagtaattgtttccatggtgggaggttagggggagcttttgaggtgatttaaagtcattttcaaagcagatgaagacggcaacctgagctttctgtcaggacatgtgtgtagactggagacctatcacatccaacgggaccctcaggccaatccttttaagcagggggctccacccagccccttagcttccctactcccctaagccccttggttgtagacagtagcttcgggtgccaggtgggaggccatgccaaacaactatagccaaagagcatgtctctgatgccatttctttggtggcctaggacagaatctgagctatttccactagaggaataggagcttcagcagggggccttggaaatgtatccaaggtacccacctcctgtccttctttctggaagcatctggccctgggaagtagcatcccgaccactaatatcagggcactaatatcaggcaaagggaggaaaagttgcatcctgaccactaatatcagaaaggcccctcctcccagcccgtgaagaggggcctctctgggtgtgtacctggaaccctatcttggaagttaagwtttgtggtcactgctaccaacacaccaactcccaggacacaggatactagggacttctgtgccccatcagtggacaagtcacaagttcccaaagcagggtgaccaatcgatctggatcaggtggcagggcctcggatcttaactgtccatttcattgttatgcacacaaacttatcttagagatccggccatctgcctgttcccgtcctggggatacctgcgggaaggcaggctgtgcctcccagaggtcatctgggctgcaaatgggtgccaagaccttcctctgcccctactcaggactccagactcctccacatcccctggagatactcaaagcccatgcccacagtaacccgtagggaaactgacccgctctgcctgggagctgctcccaggagcctcagcagtggcaaccaggagcttagagaccgctgtgcctctccctgcccaccctctccctctcatcctgccccatttctctgttgtctttcctctttcctctcttcattgttcacagcactatttaatctccttcccctctttcttcccttattcttgttctgactctattcccaggtccagagaggcccagaatcttctctgctcctgctccacctcctgacccactgccccctgggagcccctggtcatcccagaagcctgtaagtgcacacagcagccaagacccacatgcctgcaatgggggtggcacaggggaggcagggtgaagagcaggacagacttgcaggtgtttttttctgggctgcctggcttcatcaactgcaacactccagcactttgaatttttagcaattaatgccccaagtccccctccccctgagtccctgcagagcagagggaggggcacctgcaaagagaagtctctcccaggaatgggtcacaccaatcagcatgtatgtggtgtctttcatgtagcaaatcagagtctttcatattcaatagctgggcctctagagggaccaagctttgctaagcaaataagcttgtggggttggttcacatccatccagaaaagcaagaatgaaaaataaacttgggaaagtcagctccacaggtgaagctcaaccttctgtgcatctgcttggcatggagctacatttgcaactgaatggctcatttatttaactattgcacacattatgggctcttaaaacatcaaaagaatgggttttattcccaacaattagctcttgaaataaaagaataaacatactttttttttaacttccccagactctgttgaccaaagtcgctttcacaccagtggagtggaagctccaaaatggtatcatctggtgggaatttaaagacttcttgtccccaaaaaaccttttcgtcactaggcttaaaattttccattgggaggccctggctttgttttgacacatgatccgttattaacacaccactcattttgggaggggaatatcatcaagtcccagccaggatgtaaaccccacgactaggaagcctcgtccgctgggtaccttggtaggtcccagggccgagcacagtgcctggcacgtgagaaataggtgttgagaaaagttatttcactcttccttttctaactggaaaccaactccaagcacagatttgasgggggacgagcagggaggcacagtagataaagcctgtgagttactgcgcccagcgagaaaggggtcggtggagtcaaagagagaaggcactgcgtggggagatggaggcaggttgaaggcaacacttggagtccctatagtcctacaattgcagtgcaattgcccagaagatatcatgctaagaaaaggagggagcctcagccctcggcctccgaggagacctctggggacatctagggcagcttcccatccaggacagatatctgaaagatcatgaggctgggcttgaatcctgctgacaacaagaaacttactacctatgtcccctaccgctgctatggtccgcctcctctgtcagctcatggtatttgagcacctactaaatcagcaaattaatagcttctgcctgggggctgcttccacactccactaatagccaatcgctgggcatctcagagccgagagaggaaggaaaattggaaaatgagtctagaataaggggcctttccaaaatgtgtgcttatggcccagacactcctttaaccctaggttttccagaaagtctgttttgccccaggactgtggacagcattatgktttgtttggtgagctttcttttttttttttttttaggttgtattttataactgaatatggcatgtgtgaaaatatcagctaccagactctgttagtccaggcgtatgaatattccagatcacaagggaggtgtgactcccctgtgaattgcaatgcggaaggtttataaagttaatcatttagaaatctgtctttaaaatttaaatatttagattgggtcgctaggacacaaaaggcaattcctgtttctcactcacttaatttgatttttttttcttttggtcgcacaagttgtttttcaaagcctcattcctcgaatgttccctataggaggaatgtaattaaactccactggcctccccctgctgggaccaaacaggggccagagctgtagggagcataaaacagatatcctgcaaaagaatccttattataaagatgagaagagaatcaacttccctctggttatgaacaagaagctttagaaagccacccaggctatttttgcaatgggcttagtctccaagacattttaattagtaatttaagactggaaggaaggggataaactcctcacctccctggctataggcaagaacttcaactggatgagtaactggttcaagtggctgaaaaggagggaggtccagagggagggtggttccttaaaatgaaccaactttttcatgaaaatggcatagctagatatcccggcccccagtcagtcactgtttttgcagtcccacttcttaaggcagttctcacccctcaccagaggcaggcactgcctctctctgggacactcggctggcaccagagcaaagaagcttgtgctgagggatggttcccctcacaccgggccaacctggacttctctctgaccaaagagcatatgcctcccaccaagcgagaaggtggaaagatcctggcagggaaccccgagacctgggtgctagcatcatccccgccatgagagcacacggggcccctgagctgacacctgctggcaatgtgacgtggatcactcacataatcccttccttagtttttctgtctgtaaaatggggatagtaacattgtgtagctcataaggttgtcaccaagattaaacgagttaagaatacacgtgcaatgtttgaacagcgccagcattacgtacatatagctactctcattcgcctttctgtgactcagtttccttatctgtaaaagaaaaaggttggactagacctcttctccactgttattgatgatgatgatgataaatgaatgtttctgtgccagatcctaaactaaacaaaagttaacttgatactcacaatggctgtatgaagygggagttatcaccatccccatttcatcagtggggaaagaaaggctggattagtcagggatctccagaggaaccgaactaataggacagagacagaaagacattcattttcaggaattggctcatgtaatttatggagtttggcaagtgtgaagtctgcagggcaggctggcagtttggacaaccaggcaggagtcaatgcaacagtctagacacagaattctttcttcgccagaaaacctcagtttttgctcttacggccttcaaccgattggatgaggcacgcccatattattgaggataatctcctcaaagtcagctgattttaagtgttaaccatatctaccgaagaccttcccagcaaccctgggattcatgtttgattaaataactgcacacwatagcctagcaaagttgacacaaaagactaaccaagctaaataacttgagaacataagataataccctaggacagggcctaggtcggattggcactcacgtttcccgactccttagtctgtattcttttcaaccttgtctctaatattccatgattccatggttctgatgccattcctcagcgctctgctgttcttgcctgaccaagtggatcaatggtggctctggcatttctataaaggggatttcagggctgcctgctggggagggaggcttgaagctgtgtctgcactgcatcttcacagcactgagaaaatgccagtcattcaggaggacagggcagccctgtcctcgccacagtgcccgcatcttcattggttcacctttgcaggtatcatctgtgacctgtcatccaggctctgagccctgaggataataagtytccctcgaaggtcctgggtttgttggagctttttctccctcttgccatgtccttttcacggtccatcctctgagtttgtgaattatctttcttcgtggcccatgtggcacaagatgaagagtgcatgggcagcttctcccctgacatccctacctccctgacgcttaacccacatagggaagaacattcctgaaacagagacgtcacccagggttgctttctgccacagcaggcactctgcttcgtgcctttctcacttccatttgtaaatgatcttgtctccttccttgtagaaagcttttcagccattccaggctttctctttgggttccatccctctgggattttccacgaattgcatttccttgtagttcattttcatcattttccttgttagggaaatgcacctgagacattggcatgcagcctgattgcccccggcctcccctctgctcattgccagagctacctctgcacagaggagtcactctcctcccactccagggcctctgtcaggggccaggcttgatgctgtcaccagccagctcttcactgctgcccagtgccatattcatatccattgagacaagtccctgggaaatggttgggagccgggggacagccctgcatcctgagatcctaagatcagggaggttctccctgcactcccagctggaaggagactggatcggccaccctcaccaaattcccagattctctgactgaagcaagccagtccttggtttgaatggggaatcaactcagggttataaaatagacgccagccttcttgtaggtagaatctgacttcagacagcaaaagactctaaaacagcttaaattcctgtatatgccttctcctgtgcatgccaccggtcagaccaaaggccacacgccaatcaaggcccaagatcagccaggggtgtttccatgtcctcaagaacttttacaaactgtagctgattgggttccgcccctggagattcgatttagtgggtctggagtgaggcctgggcttcttagaagccccagcggattctaaaatgcagccaggaggaagaacsttgccagaatcccatgaggcacagatgcaaatgtgcatagtgacattgggttgcattatcaatggcaggactgactttataaacctccacatccttactggagctgctgtttgctttttagaaaagtccctcatcagattatcaggaagtcgtgggttttccgtgatcatgctgtggtcagatccagcccaaccagagagccaaaaacaaaacaarcatacaaaacaaacaaacaaacaaacaaaacccaaatccctggcaagccccacgaaatgactgctctgataacattcagcagacaagcctgtttgaaatcatctcagaatcataccagacccaaacccaagaggtcatctggtctatgcatcgactctaggagggtgtattagtccgttttcacgctgctgataaagacacacccgagactgggcaatttacaaaagaaagaggtttcatggacttacagttccacatggctggggaggcctgacaatcatggtggaaggcaaagaggagcaagtcacatcttacgtggatggcggcaggcaaagagacagcttttgcagggaaacttccttttttaaaaccatcagatctcgtgagacttactcactatcacgagaacagcacgggaaagactcgcccccatgattcaattaccgcccaccagtttcctcccacaacacaagggaattgtgggagttaaaattcaagacgaggtttgggtgaggacacagccaaaccatatcagagggtgaggggctatttctccatgttacagacaaggcacgtgaagcctagggacgttccatcacaggcccacaccttgtctcagaattaagaggaaatgcttctggctgccaggggtggggtggggtaggatgcagagcctctccctccaccaccayctccatccttttccctttctctgaaaatctcatttgatgattccccagcctggctgcaaattaaagatttgtagacctgaaagatgctaccgatggttatcagcaccaccaccaccatcgtaacagtaaacatttatggagcgccataattattcataataatttttatgtgttaaacaaatctgacctagctctataaagaaataggccctgttaaccaaaaatattggataaattaaaagtctcctagaagcatctgatgaaaggatctcaagttccataacacacggaccattcagtggtgttgtttctgggcttgattcactgtgggtcacttgaacgatgtcgggggtattgtccacctcccagtgctcagtctgtggcttgtggccagctgttcctctgtggggtctatgttggctgtgttaaggcctgctgcagaaacatctcatttctagcatgtttttctcaagcagtgatcctgtggggtcaagtcttcaatatcaaataatattgataataattatgatagaaataataagaggccaggcaccgtggctcacatttgtaatcccagcactttgggaggcagagttcaggtggatcatttgggcccaggagttcgagatcagcctggtcaacatggtgaaacccagtctctactaaaaatacaacaattagccgggcatggtggtgcacacctgtaattccagctactcgggaggctgaggcaggagaattgcttgaaaccagaaggcagaggttgcagttcgctgagattgcaccactgcactccagcctgggtgacagagtgagactctgtctcaaaaaaaaaaagaaagaaaaaagaaataaagaagaataataagaattatcagtcattgaacacgcgctctgttcttggtgctcttggtgttattccaggcaattctaacaccaattagatattttcccctattttaaagattaaagcaactggcgcagtggttcacacctgcaatcccagcactttgggaggccaaggtgggaggatcacttgaggcagggagttcaataccagcttgggcaatatagtgaaacccctgcctctacaaaaaaaaaaaaaaaaaaaaaatcaaaaattagctgaggctggtggtgcgtgctcgtactcccagctactcaggaggctgaggtgggaggattgcctgaggccaggagttggaggctgcagagagctatgatggtgccactgcactctagcatgggcgacaaaacaatagtcttgtctcaaaaaaactaaaaaagactaaagtgaaattgaaattcagagagtaagtgacttcaaggtagaggcagaaacagaggctggatttgaattcgatcctctggctccagagctcctgggagttatcttgggaatgactgcaaggtctgaggtagatcgttccaggagcaggtgcttatatacagtggaatggcacccactggcacaccrctaggaattctgttttcttaccaccaccggagccaggtctctgtcacggtgatgagaagttcccaaagtcatttctcctctctagggtgtcccctctctgtctgctgccactaaatccctaacgacattagagcgaataaatggcatttttaacttcagctttaagcaacaaagaaatactattaagtcaagatgtgtccatctttaccataaaaaaaaacaaaaaacttgcttcaataaccaataaacagatcaaacaacagaaaaataaatagcaaaagactkcagggctcgatggctcacacctgtaatcccagcactttgggaggcggaggtgggtggatcacctgaggtcaggagtttgagaccagcctgaccaatacggtgaaacccgcctctactaaaaatacaaaaattagccaggcttggtggcgtgagcctgtagtcccagctactcaggaggctgagataggagaattgcttgaacccaggaagcagaggttgcagtgagccaagattatgccactgcactccccattctgggcaacagagcaagattccatctcaawataataataataataataataataataataataaataaatagcaaaagaaagaaaaaaccctcagctaagaagtatactgttgtgttttttggggttttttttatgtaacatttgacaagtttacattttccttgtctgccttgggtgccttaaaataaaactctgtcaatatttccatgtaacattgggttttgcttttttttttcctcacgtaaaatccacatatcaggaattcctctatttattccgtcgcctgggtttctttccttgggaataatttatatgtcaaacctgtcatttatcgatttattgctgtacctagcagcatttttctccctgccctcaaaatttagcttaaagaccacttaataaggcctgtgcgggtcctcagactccagagatttctgctgatatgagccataatttagcaaaacaaatcctgctcattgcgggcatctaaatggtatcctgttaaatttccatacatgcttttcttttctaaagttatggcctacaactagaagaagggatgaaacatcacccctacctccacatcttatttcctgtatcaaatttcgaagcccttggagatgcaaggcgggtttccctaatgagttgagaatcaatgcgaatcatctgaaatgagaggtggcccgtgggtgtaatccatccctgctggtgctccaacttggttacacatttccagaaaccagcacctccctgttgtccatgtctggtcatcagaggcctctctcctcaggtgggataaccagagaccaagaaagaaacatgtttctctcccttggaatttctcttccttagtcattttcagaaagttaggagtcggcaaccttaaggaggagtttcctatcatctctcctccacttcctcccctcrtttcctccccgtcttctccttggagtccttcatcaatgtctctattttctgttcaggataaacaaagagtccctcttacctgcacaggcctcacctgccttccccccctgtcatttctgcagccagcctgtctcctgagcctggcctggcattctccaaagactccttaaggccacttggcttccggtctgcctctaggcttcactgtctgcaccagagtggaaattgtcatgtgccctcagcaacattttacccctcccttccagaacagacacaggcatttcttccacaagcagtattccacagatgaaaaaaaaaaattataaaagcgaaaccaaaaatactggtagtatatttttttcccttcaaaagaatgataatcatcagtaaaaaccacaacaacaaaaaactaagcaaagcagcctgaagataggctgaaagcacacatctacggatggcttgttgttgttttgtttttgttattgttatttttgagacacagtcttgctctgtcacccaggctggagtgcagtggcgcgatctcggctcactgcaacccccacctcccgggttcaagtgattctcctgcctcagcctcctgagtagctgggattacaggcttgtaccacccatgccccatgcccggctaatttttgtatttttagtacagactrggtttcaccatgttggccaggctggtcttgaactcctgacctcaggtgatccgcctgcgtcggcctcccagagtgctgggattacaggcatgagccaccatgcccggccaggatgttctgaatattaaactagctgaccggtggacattagctgtgctgtggaaaagtgaagcagaawggctttttatcccttgtgtatgatcatcaagacacaggacagcacagagattcaaaatacaatgcattccccttgctcgtctggtcargctcaccttcctattgcacagggttgattggttggaggccgccaacctctagctgaaaggcagagacagtctcccctgttatttcggtaccaagctgtgtttcttaggcattaaaatggagggaaagcaaccactggcccctcactgggatygttcttgaggattccagacagaccataagtaattcattgagtcgctcacaaagggcctggccctgaaggtttgtggctgcagcatccaggcgagccaaaggtgtcagtgccaccaaaatgcagagaaaactcttatcagaaagatgtcatttttttcccctaaatgtcatatatacaatttttattggagtgtgatgacagatagtgaataaattaacataaatttgcataatacaatacagctgttaatttatgatcatattaaaacacaaagttttgtmgtttgaagcagttaaaagtcttaatcttctgaaaatttccctcttgtttgttatttgtttatgagttacttagggttattagataaaatacaggcttctggttaaatttgaatctcagataaactgtaaataattttttagtgtatctcatgcaatatttgggacatacttatactaaaaagttaatcttattgtatatctgaaattcacatttaactgaatggttatattaatatttttatttgataaatcaggcaaytctgtatttcataagcagtttaacctctctctactggctcttctctggcagggcagaggggtgctgttttatggagaaaggcacttactgctgggaccttgatatctttagactgtgggggaggctggctctcctaggaacactaacagagtcaaagagatcagacaagagaggtgccagtgcaaagggggaaactgaggcaggcagcatgcctgggctttcttgacagtaccaggggtattatagccctgttttccagattttttggactacaatctcatcataagaaatataatttataattcaacccagaacacacatcccttataaatggaacaaaaagttttaggaaacatgtcaccttctatgtacaatctgctcgacatcctgttctagttgatttcatttctttaaatgccactcttaaccccctaaattgaattcatggattgaattcatggtcccctaaaggatcacagcccacatgttgaaaaacactgggttagagggtcacagttcaggaaaatgaacgaggaggttttttaaaatctactttacaaacgaggaaatgtatcgggtyccttaagagcctttccaggaaaatttttgctcatttgyggccaaactcgaaataaaacttaggtcccccaactcccaaccctgcgttttctggtttccttccaccactctttctagtatccattttcctggtctccaagttgtaatacacattctgggatccacatttacttgttttattttacataattatattacttgtatactatttccttatacttcatattcttctcaaatttccatgttttatatcatttctgatgcaaactgattacatcattgcttatggcacattcttgactgatatcaacattttaaaccaaattgtcttggtacgcaccctctgatctttggcatcttactgccctgccccatcttcaacctcggctcactattttggtgcctcaggaggtctcaaccatgaaccttccatgtgctctcactgggattggtgccatctgtgacataagaaaaacatagaaacataaaaacataagaaaaactattatttgttgtgatttgttctccctaatctatgaagtcggtagggtatctgttataaagattcccttctagagtcgagaaaacagaggctcagagaggttaagtgtttttctcagggtcacacagcaaatacagaactccagtcttcttgctgtgtctcttaccctctgtcatcaggatgcaggggctgctgagctgagatgcctgcagatgagtaaactggcgggaagaaagacaccaacccaatagatctccatgtattttatatattttctcacctactcagtctagattttcaaacaacatacagaactttctgggatcttgtcatcattcagtgtactgtcctctggatcctctccaggagccgcccactccgcacacatttttttttctagttgtcataaacaaatttcaaagaaagccattttcccagagccctttcttgtgactctaccacagttcatcctggtttgcagaatccaaactcagggcttccttccaatatttttattagttcagtagtcgatcagtttgcacagagaagtggattggagctccccttcccttggagctgccagtggagaaagtctcctccaaccctcaggctcagcaccactcagggccagtgagatgcacaaacagcatcttgcaggtaccacaatgccttcatcasttgtatcttccccgaccctgtgatgaagtaggatgaagatggctgagggtatggacgttgggcccacctccctggcttaaagctgctggaccccttacccggccatgtggccctggggcatgacacagttccccctaagcctcgcttcttcactgtttaaaggggataataatagcatctgctctgttagactgagggctggttaagtggaataacatacktagcacatagcctggtacccacttattttttttattttgctactttgtttcaaatcttcaaatcttcctattattccttttttacagagccatgtcagaaaccttagattcacgtcccttccatgtgtcccttccacatgtccctccttgacctgccacaatgcctctgctccacccagagcctcagcacctgcgttctgccccctcagtaaccagggtccctcacctgccactcctgggttgctctctccttttgaactagaaatttttctaccctcctgcccctccagccaaaattacctttttgatgtcccatttccccaggacactattttgtcctagggatcaaaaataaaaaaataagaaagaaagaragagagagagagagagagagagagaaagaaagaaagggaagggggaaagaaagaagaaaagaagaagaaagaaagaagaaagaaaaagaaagaggaaggaaggaaaagaaagaaagaaagaagaaaaagaaaagaaagaaagaaagcaggaaagaaagaaagaaaagaaagaaagaaagggaagggggaaagaaagaaaagaagaagaaagaaagaggaaggaaggaaggaaaagaaagaaagaagaaagagaaagaaagaaaagaaagaaagcagcaaagaaagaaaggaaagaaagaaagaaggaaagaaagaaagaaagaaaagaaaagaaagaaagaaagaaaagatcaaattaccaggatctgaggacctgggaggatttcagaaatcgctggtcagtcccagcaactaaggctcaaatgccctccccaggattctgctggagatcattctgccagtcrctccaggagcgaggggctcacctcttcctaaggcaggactttccacgaggctagaccagaccagtgtcctccaattaattcatttccctgtgtcttccatccatggtttcaaactctgggaccccaaagcacagtggccctttacaaagttgaaggctatgtccctctggcttctgcagcttttcctgatgtggcagggtttcaggtcccctgcccatccaccccccacccctctagcctgactgtctgtgtccctctagagggtgacatgccttgaatggcagcgaaccctggtgtgggctgatggtgtggagtacagagcggtagccgctgccctgttatcagctgcttccaaaggccagggtggtcgttagtgcatcattaataacccattatcgggttgtcatctctgaatttatctaaatttatctcamttattgtaaccctgtagactgataagccctataagtataaaatacactggatgaaaaagctacttcctattatttgttctaaaaaattaactccttcaagtaatctagagtttggtgaccaatttcttattttaccctcctcacatcttcaaaactcagcactggtgatttcacgtctgttgatgggattcatctgtccccctccactagactggaagctccccatagggtgagacccactatagcatcccccaatgtccagcacggaactggagcatcacaggtgccctgaggaatgaatgggtggacggcgcttacagactcgggtgccacttcctcttgtccagctccatgccctcccccatagtgtgtggaccatygggggcctagaactgaggtcctggttggtagcacccaggagcctgttcccaacatggccccatggcagggcctggtctccaggtgtggcatgaggtgctacatgagcattctgtgagcatcttcagggagaaaacaaagtgttggccaggcccaccggaacagcggcccacctaaacaggctggcgggcggaggagtgccacagaatggacatggggaggccttacaaggtctgtagtagcagaggtagtgaatgtttgttgagttctctctatgcgctagtgttattctaagtgaggtccatgggccacgctttttgctgactacaactctgtggagtaggactaggattatccccattttcctgggtgagaagctgaggctgccagagttaagttgactagggccacacagctgagaagtggtgaagcataaattgaaacttgggcagtctgactcccatatactttaaaagaaaatatttccatagattattggggaacaggtggtatttggttacatgagtaagttctttaggggtgatttgtgagattttggtgcacccatcacccaagcagtatataatgaacccaatttatagtcttttatccctcacccccttcccacctctccccccaagtttccaaagtccattgtatcattcttatgcctttgcatcctcatagctcccgcttatgagtgagaacataccatgtttggttttccattcctaagttacttcacttagaataatcgtctccagttccacccacattgctgcaaatgccattaactcattcctttttatggctgagtagtattccatcatatatatatatatatacatayatatatatatatatgtgtgtgtgtgtgtgtgtgtgtgtgtgtgtgtgtgtatatatatatatatatatacaccatagtttctttatccactagttgatgggcatttgggctggttccacatttttgcaattgcgaatttgtgtgcaagtttgcttttaaccactatgcgatcttggctctcaaggtggaaatttgatgtggaaagcagagtcaggccctggaagaatcccccaggctatctgtaagagctagaatcggtatgatgttctagaagcaattggcctgggcagtgccctgagagcttagcagtgcagtcatgagccagcactctgcctgggtctctgtcacagagtttctcgtgcttggctgcagcctggagccaccttggggagcttgatgcctggggctccccacggattccagtgtcatcggcctgggcatttggcatttgggatattcacaagctccttggtgactccagggtgcagccgaggttgagaaccattgggaatagaaaagcaagaggaagctgttctcacctgccctttccacaccagagccccagggtcccggggagactaaagctggggtctatttctattcccccaaccaagacgggagcttcacatccccacayactgagaggccagaatgggtcagaccagagtgagtgtgctctggctaagactggccgacagctctgytcccctggggtggggactggacgtggccctttggtttaactgcattttactctttccagcctgtctggccattattcttgcaggagcacgcaggactaaagtccccttcctcagcaccacgcatgtcccatctcaccctgtgtcttccaacttcacttgccataaatcagttgtcaggacccccgaccctaaaacagtcacctaatgataaatcatgtttaattctaatggaaccctcccgccaagactactcatcagagaggaagctaattcgcagggatatgaagagctttctaaaattagttccagacgttttttgtcttaaatctgtattatggctgccctatttttaatttactttttgaaaaaccacattgggacactaagtaatctgggggcccaaaagactttgggggccacgggaacctcccaggccctagggggcagtagcaccaccatgcagatcaccagttccacaaaagaacggaactccaccagtacctagtgttattagtataagttttgggaaagrtccttcttttcttagctcattagaaaaacaatcacagcatcctatggactgggccaaagtgggcagacattgcagtccagcccaaagaggcctgtcccagcaggacgccaggggacagggtcagaaagaggcagcccacaagctgagcacagctgcagaggttttagcttgcttactacatttgaattaattgccaaacttttaaactcaggggaattccrcaaaaatctaggtaccagcttttcttgaagacaacggaagctcaggccaccctgaggccatcacctctggcagtcacctgccaagcacgtggctccagcttagcccgagcgcctccacctgccccgtcaaggcccagatgcagtggcccttacccatcacacttgcgctgttctgaccacagactcacagtcatggtcccacctggccccatggacatttgggtttgcatcatcatctaatgacacagtgaagctccttggcctaccagctccctttgtgttcaccttgaccagcccccagctccttgcttctgcatcttgacttctgccgtggtcctgcccagaaccctgagggctgtttctcttccctactcccctccggcttctccttcctacctttccacgctgcaggatggggtacttctgcttgcctcagctgcctggcccctccaaagcctcctttgaccatcagcccagcttgcatggatgcccgggacacatacagcactttcttggtcttggtttacaaagtagtctgccccagtggtcccaccacacctccaatcaactccagaccccagccagccacttgaaaatctgtagtccaggccagagggcaaaaggcacagtcgaggacaaggagcaggcatcccgtgtggcgggagcaggaacactcttgctcagggtgctgtgcgatgggccattggtaggtagtcccagctggtctggygtgtgaggggagaggcaggttcacccagctgtctgtgccygggcagggcaactcccgaagtgggctgagggagagctctccgtgatctctaaggagggaggcagcgcattgcagggttagcaaacctttagaagatcctcccggtgttcttcctcccgctcctgccctgcccatagcagaaatcaacaacacgtgggcactgagctcttttccagaaactttccaaagagacccatgggtctggccaagaccctcaggggttgccctcattggcctggggacagtttttgagcgactgctctttgagaagaagtcagcatcagagggagtcagagaagaggggtaagcaagctaggttggggagctgctacccccaaatcagactgcaaagacaggcaagggtcatggccacttccgtgggcccagtgccagacagctccacagaggctcagagagggctgaagggccaagcctaaggaaaacaacaaggctgaaactccccatgtctaacgacatcgtgagcgtggctgcagagctcccacatggcttcctcctccttcccaaggggctgccccaccgctttgccctcactagccagagcaatctaccttgttcactttgcccaagacacagggaggacccytgtggtctttgcaggggcttcacccagttgagctgggaagagacctcacagcatcctccccatctccctggcccgggtttagaatactgaagacacatagtcctgtcctccgtggcctacgcagatccttcctgttcctgagatctctggccccatgcgggcccatctctgcattcctagcttggtggatgccctgcctatctggcttctacctttgattgttcccttggtcactccgatgccatggtcctatagcaatcagggtgctgagtgagtccctgcctgtcctgccttataaggaagagacaattatttgtgtcctgcccatctttgctcatcattgtcatgggttttagaatcaagccgacttggcttttcactcccttaacactgtgagctcctccttatgcaaaacaccacaggcctgcccgccggccttaagcacacacccttctgagcctcagttttcctgtctgtaaaataaaactcaatgaaatgacacaagtgaaactcacctggtgcctgccctcttctcataaatggcccattgcttctgttctcctctcctcccccaggccaggcctcccctccctagtcctcatcttatacccacacctccctgcccctcactcagggccttggctctgaagggagaccccgaggccatctgaaagtgtgagcacagctggcggtggtggctggcatccaggggacgtgagggcgcattcgccccagcgcagcattcctccttcctaagcttgcacagggcctggtattgaagggcagcagattcattccagcatgactactgcagctacctgtgtctcctggcggaaggggcagcctcaggagtgtggagttcagggatccagctttgacttggccacgcccagagccagccagcctcgagcacctgtttcctgtctgggggcacgggaaccctcctgtcctccagggaccccagcctcctcatctctgctgggcagtcatctactacccctggttctgacccctgagacctcttgtcctggagcccgcagggtccagctcagctgtgccccctctcggggccgctctggtggcttctttgctgccaccctccccacccccggcactgtgctctccctgcccccactaccactctcatctggttgcccagtccatgattgtgaacttgacctctacccctggctgcctgggcctacgatcctgcaaaaacccctccaaccagctggccccacccctcaggacttccctcctgtggcagagtcacctgtgacacctggagggactccagtccagtgtgtccccaccttcaggctaacccccttggagaagcctcccgacggtgcaggcacgggggcacagaggcagcaggacattgcaggagcagagacacgaagacaaaagaaacaaatgattccttaagatccatggccaaaacaaattgccgcaattaacacgtgccactgccacgatctatgggctgaaacgtggctggaacgacgcagaagcagaaaccacagagagcgtgcgctccaataaaacggcactaaatggcacggctgtgatggaactcgtttcgattttgttccaaaaccttgtttaagtgcgtttattgtttctgtgtgaaagaacacaaatgctttttgaaaattgcttcagcataagcctcaccttctccagaaagtctttctgatccctcccatccctaccccatgcaggtccgtgacccccacgatgcccccatatgttgcccccctatgttgccacggtgcccacacttccctgtcaccaccagtgtcctcctggcttctccacccccagggactgtgcatcacccgtctccaccccaccccagaacaatgctctgtacacagcagacagcaggcagcaggtgacacaggcccaatggaatgactgtcaaggttaagggagaggtcatttatgaacatcaagggaggcacgcaggctgctaaggggacccttgcagaacagatgaaattcttattagaaagagtcagtgttgatttctcaaaaaatctatcaatcaataaaataaaagcataaagacatagaaacacataaacagagaatcgttttacatggaagatggggagtggtgacttggcctcatagggccataatcacccttttggggttttgtcccacattagaagagcagccccatagcagagataagaaaaccaaaaaagggtaacaaaaactgggcacagagtcaggactggactgaagccccggagagcacgggcagctctctagcaggtggggcaagagggactttagctgggagcacttggcccccagcctaggcaccagagctcgaggggagacccttcccattccctgagagatggagtatgggtctcacttgcaggggagcctcgtgggaatccctcatatgggaagaaggatggcatggaatggcctttctctcccccaacgcccagccaagggaggcaagccctccctgtccgctctagcaatatggcacaagggggtatgatctgccagttctcccttgagaggcttggtggggaccacctgcaggccagctggcagccccccttcacctgctcacaactagcaggccagggggtgaggcatggaccagcatctccgctgctttgagcaatcatgaaaactccaggtccatggaagataagaaattggctatcaaggctctgaggcatgtgctatctgcgatttagtaaatctcttcccacccccaaatttaattttttaaaaaacctccctcctcaagaacttcattctcatgtatcctaatccaccccgccagctcccagcagaggggagggccactctcttgggtccaaaggcccacactagcggggaagctcgcggagccatgtctctgggggccgtttttactttgttttgccactgtagaggccactcttggcaagaagcctttttcactaaaagccatcagctgcagaagaaggcaaagggctgaaatagcatcaggtggaggaggcggccctggagagaggcctggtttccatcccagctctcccaccatctgcctgtggcctctgcaagctccccaagccctgggggcyttcgtttcctccctgcaaagggagctgccctcagaagcactcagctcggttcttggcatggggagtgattagctctgcacaaacctggtagtttcacgagaagccatgtaaggtagagaagtcgctgaaggcatctccctctcagagttaaaaggaaacagaaagactggatcttgtgtctcttcctctttttaaaaagggaattaggcctggtgcagtggctcacgcctataataccagcactttgggaggccgaggtgggtggattacctgagatcaggagtttgagaccagcctggttaacacggaaaaaccccgtctctactaaaaataaaaaaattaaaaacaaacaacaacaaaaaccattagctgggcatggtagcgcacacctgtagtcccagctacttgggaggctgaggcaagagaattgcttgaacccgggaggcagaggttgcagtgagccgatccagcctgggagagagtgagactcggtctcaataaatacataaatgggaagtcatatcatcacgaggtccccacttaccctcatgacctcatctaaccctaataaccttccagaggccccgtctccaagtatatgatcatgttggggaatagggtttcaacacataaacctggggaggccggactcacacattcagtccattgcacaatgtatcaaaaattctaattgtattgggcaagcctacactgcccaattgtaagcgaagtccctgaggccggagaaatcaaggtatccatcagtgaatacagggtattaagaaatgccaaagcttactgctcaagttcatctcctgctgaccctgcggccctgctgcctgggcctagaatggacgcacttctccacaaggccttgtctttcttgagattctcacagtgtgacccgagaagcatgctccacaatttcttatcaattgaacactaaaaatcccatctagctatgggatgcctagtttctcctcctggattttgtggttaaacccttctgtctccaatgcaatgtagcagtgagcacagctctggacccgcatcccaaggcctgaggtctaacgctgcctctgccccctcctttgctgtgcagcttaggcaagtcacttcacctctctgggctgtggttcctcatccatccaatgggagggttgaactgctctttgtttgctttgctttgctttttctttttctttctttctttttttttttttttttttgagacacagtctcactctgccacccaggctggagggcagtggcttactgcagcctttgcctcccaggttcaagtgattctcctgccccagcctcccaagtagctgggattacaggtgtgcacaaccatgcccagctgattttttttgagatgaagttttgctcttgttgcccaggctggagtgcaatggcgtgatctgggctcactgcaacctctgcctcccaggttcaggtggttctcctgcctcagcctcccgcgtagctgggattacaggcacctgccaccacacttggctaattttttgtatttttagtagagatggggtttcgccatgttggccaggctggtctcaaactcctgacctcaagtgatctgcctgccttggcctcccaaagtgctgggattacaggcgtgagccattgtgcccagctgctcttcyctttttactgtcctatgactggtctcccaatgccagctgagagtgttggtctgatctcttttcttctaagctggccacacaaatggacctcagttactcagtagcccttaaaatctggtaccagtcaccatttaggcctctggacatcatccttgggcaaaggaggctttttttttaagcttgggcctagccctccccacttatatcctggactgtgaaaatggaccgagtgggcaatagggaattcaggatgagctggaaaaaaagaaaaaaaaaactcctgctgcaataaattacatcacagtggagatctctttctacccagaaaattctgagcccagacaatggctyatttatttcagacaatattcaatacaacagaattccaggtcaatagaaggatttctgcaggttcttagagttggtagcaaagggatttaacccacggagaaaagagagctgttcaataatagattcccaggcgtgagggaggccttattaataaatccatcggtggtctgctgaaaatgctgccccctcccttgcgggcatcccacctgacgacagtgggggactgatgcacccagggccctgaccagggaggacgtttgggtaaatatttgggcagagatggctgctgctagaatggtgagcagagctggggagcgcaggaaacggcccctttctcccaggccctcagatgagacatttttataaacatccaggcaggcagcctctgaagactcctgggctttacaaacacatctcgtattctatagtcagctgagaccatgctttgagcatgggcggtaagaggagcaggaagcaggaggggcggggaggggtctggcaccagctttctaaatttaacatgcagttgcttttaggccagtggataaaaaataaattccagtgcttaaagctcttatctttgtttaccatttccccaaacagctagtgacctgctctctgactcctacagcaaatcatcaacragatgcacacgaagatgagggatgggaaatgcaggaggggtgtgcggagggcaagttgatggctctccgccttcccgtcacgtttatttggcctggcagagtgaccaggatctgctaaggtcatgaggctgtccctgggtgggtgggggcgtggccatgctgcatcagaccrgtccagaggtggagggcaccttggggtctctcgtgtggctctcctgttgatgagggacctatgaatatcccacagcgaccttttcagatgctccataacctcgtgtgaaaagccccggtggacctgggcttgcctattgcattgtgaagttgtagtcctttgaaaatcctgccccacgtggagtcagaatctttctttctgggactgatgccatggggcctggctccacccccacaactgcatggcacagcactgccttttccttggccatgggctcrccctgcagatgggtgatgatgcgctcctgcctcccttcagtttgttctgttctcccaaattctttcagtgtgcctggtagaagcagtctgccagtctcccctcrctccctctcattcatcccctctctaactactcatcctgcgaccccactgacttggttttggccttgtccctgccacagttgacaaatataatggcgcgtcttcttcttcattattatcattattattactggcaatcatagtccactctgcctcaaactcctaggttcaagtgatccttccacctcggcctcccgagtagctgggattacaggtgcacaccaccatgtctggcattttttttttttttttagagatggggtttcactatgttgtccaggctggtctcgatctcctggcctcaagcaatcctgccacctcagcctcccaaagtgctgggattacaggcgtgagccaccgtgccagccatcaatggtctctcttagtcttgaatctcccaggcactgtccaggagatctgagatgttttccagggtcccttactttccagttgccctgccaccttcccctgggaagcattaaggttcaatgcttggctctgtgcttgtttttcttacccctatcccagaggactcatccccgtctgtgcgayaccatctccccacttctacrccaagctgctcacggtctcacccaggtggggtggtggagggggcctccagcaaaatcctgcaaaagctgatctccttcccctggaagatgctgccccacccatgtggtcctctttctgtgtttctctcagccacttaggaatgaaaccagggaatccctttcatctctcttcattccctgacccgttaaatcccaacaccctcacctcccctggtagagcttcctttatgacagtgattctgaaatccaggctgcatgtgataatcccttgggggacttctaaaacaataccaattcctgcaccccaatccagaccgattaagtggaaatgttttgggatgggccccagcatcaatagggaacagccaagatagacagccactgctgataaggcttctctctttcagccccttttcccattctgactactggccttgtgattggagcacctcacttttgcctggactattgcaagaacctcctgtcttattgacctatttcccaactctttctacctcagccatcctacatgtcgttgtcagatcacacaaagccattttcagtatgttatcttgactcatcaaaaaccttcagtggctccctattaccataaaaataaatctgtgaatgaacaaataaatggtttcccaaatacagagtaagttctatatggcacagaaccgtatcttatcccctctctttccctgcccctcaccccacacactctgctaatcggagtaaatagagggaaccaggatctgtggggtgagtgaacaaaagcattttctctgcaaattaaatgtggtccactcacttcccagtgcagagaaagtgggctaggtgatttaactatcacttacttaggggcttatttctttcaacatcatatacagtcagctgtgaatgttccatactaatggaaaaaacagaatcctaaatattaccaaacagcagataattcaaagactcgaatctagttgatgttggaatgcgtttttgcttatgagtgctgagtgcttgtgtctgataattggggcaatttttaaaaattaggtaattagatgtgttttatttgttcctatttccccctccccccactatacacacacactatatgaataaataactcagctcccaaaacaatgccctatttctttctctcagtcctttcctggaatagagatagtggttacatttcagaatattagcaaggaagggagaagaaactggggaggagcctgcagttagagtaaatagaagaaactaggatgtcaacaggctgcttttcaactgattcactgttaaaattttaggcagtgtgaacaacctgtctgtcaaactgtttgcaatatctactaaagctgaacatacacatccctcatgacccggcagtgccatgcccagatgtacacccaacagaaacctgtactctgttcaccaaaagccataaacaagaatgttcataaggctttattcataatggcccccaacctgggaacaactcaaatgtccattgacaaggaaaaggatggataaatcsgggcagctcacccaatggagcaccaaatcatgaggatgaacacaccacaacacacaacatgggtgactgtcacagacatgaaactgagcaaaagaaggcagaccgaaaagcctgcatggaaatatttcatttataggaagttcaagacaaagaggcaaaagtaatctctcgtgttagaagtcaagacagtggttactactgaggggcatgtgaccgggagaggccacgggtgtgcttccaagtgctggaaggttctgtcttggtctaagtgctggttacacaggaatgcttacagtgtgaaaattcattgagctctaagtttgtgtttgtgtcatatttttccatatgcgtgttattcttccataaaatgtacaagaggaaaggaagggagggaaggctggagggagggaaggtaagaccaggtaggcccaggtaatggaaaaggcttggaatttgaagacctggattcagttccaactctaccattaactggccgtgcgacctgggacaagtcacttcacctctccaaatatctggttttttttcatctataaaatagacaataaaagctgctctacctacctcacagtgtggttgtgaagaccaaatggtataatggatgtaaaaatccattggtgagcaataaagtgtttcacaaggcaaaacactattattattctagatctctgcagacagcaatttctgcagcaggtcarcactgtcagtgaagctcagcccagagccatcatggagaagactgatgccccgtgggttgtgtgtttgtgtgcgcacgcagcctggtttatgttttttcattacatctctgcacctaatcccttaatggcctgggcctcagagtacaaaaacacctggaaaaatctctgtgtttttatgagacgggttctgtccccttctaaagcaggtataaatagatgccatgtacactctcttaattactttttctcgagtatggatgaatttcaacatctaaatctgccaaattattgaagctagcacagagaactttctgggcattggccagggaagccagcaatgtggatggaaagatttatcacccsctctcataaccaaacctccatcgtatctccctgcaagccttgaaactgctcactggacccactcagacaacagagctatgggatctagaaggtgaaatgtcagagctcagagaacctcagctccctcccaaccttgccataagaactcagggctggccgggcgccatggcttacgcctataatcccagcactttgggaggccgaggtgggtgaatcacctgaggtcaggagttcaagaccagcctggccaacatggtaaaacccygtctctataaaaatacaataactacgtgggcatggtggtgagcgcctgtaattccagctacttgggaggctgacgcatgagactcgcttgaacccgggaggtggaggttgcagtgagccgagattgtaccattgcactccagcctgggggatagagcaagactctgtctccaaaaaaccagttgcaagggtgaggggctttgcctctggtttatggtcagaagggcaaagcgaaggtcaccccattttccacggcttggtttcatattatagtcccacggtccctggagaatcagagtgaatggaaatctttattcttcatatggctgtattgccccaagctgtcctcgtgcttaagggatttccagctccggcttctagagggcaagggccagcatcacttggcctacttcttagtataagaccaagtctagtgacagctgggtaggcataactactacagatgctgctgttcctactgctctgaagaagaaaactgaagccacctctgcttctatttcctttaacaacatagaaaaatgataatttttctattaggtccgtgaatctccaggaaaaatctttgtgaaagcaatgacatttttattttctttttctcatttatactccagatgacatctgcacacacacccagtgtgtggcgtatgtgtaggtgtgtgactgtgtgtgtgtgtctagctttcagagaaaatgatacacaaaatgataaatatagaaaagagattaataggagagggcagtactgttatttcctacataaaaggatttatcgatagattgcccatagagttagttccctaaaccatcaggttaatctattgtatttaaatgtatttaaatattgggccaggcagagtggctcatgcctgtgatcccagtactttaggaggctgagactggaggatcactggagtccaggagttcaasacaagcctgggcaacatagtgagatgtccccgcatctctacaaacaaacaaaaaacaattagacaggcatggtggcttgcacctgtagtcccagttactctggcggctgaggcaggaggatcgcttgagcccaggagttcaaggctgcagtgagctatgacagcaccactgcactgtagcctgggccacagagcaagaaaataaacaaacacatattggtttctagatcctaaactatatgatggaaagactaagagaccaagaatcttaggaataaaattagaagttactgcccattgaaaatcaactacatatgaaaaagtctcccccaaaatgaagaaactctggtttgagaatgtaaatcactaggtaaagattctgtttattttctttatttccatgtttcccaatatttaatttkcaaccctctaagagcagttattttataaaataagtcccagctgaaatgaatttgataggattttagaatttctttctcccttaacacatcctattagcctagttcaatagagagagcagagcgcctcatgttgaaataagctttcccgccactgaatgtgttcaaacagaaatatcacctgcttaggaggtactttccagttgccaaagacttccaccttcatcttcttgttcactctactctgcaagatgggtgggacagcattacagacgaggggtcctgtagatactgtcctgacgactggcccaaggccatggctaagggttacagacccggaacagaaccctgccctttgcctcccttgtgggacccaaagccaggccaaggtcaaggggaggsgctgcagggggggcttcctcattgggtgtggacagcaaaggttgattttgagatttccccccagctctaattctcagtaatttggcctttgaaacaggaggcagagagaaccctgggggatggcttttcatgttatcttttggaaacatagaagcttcaggtgcttcctggcttgaaataagagaatattctgctcagtcccccacatttttgagacactccaggcccagcagacccacagcaccctcactagctgttggtaacgttggtgcctggatgtactgacagaggaccaggtgtgccaagggcctgtcacccaggctgtagtgcagtggcactatctcggctcaccgcaacctctacctcccaggctcgagcaattttcctgcctcagcctcccaagtagctgggattacaggcgcccaccaccatacctggctatttttctattttgagtagagatgggatttcaccatgttgcccaggttggtctcgaactcctggcctcaagtgacaccccctgccttggcctcccaaagtgctgagattatgggcgtgagccaccgtgactggccgataagaattcttttctaaacatgaccacaataccattatcaactaaaaccaaaatgaatgttcattccttgagagcatcaaatatcctgttggattcacagttccctgattgattcatatttgttttaggttggttgcagcagcctctgaacaaggccatccacttttcactggcttattctcactcatcctaaaaatctcagcctggacattgtcgcttcctcctcacagagtccctgatcccaaatgtgggagatgtgtgtctctcatctgttctcccatctcacccttatccacttgtttgcatcctgatagactggaagctccgagaggctaggacatgtccgtgcattttaaagttacgtctcccgggcctagcacagtgcctggtgaatcatgctcgccaattccatatgtattccttgaatatgtaaatgaaggatctcctaaacagaactggttttgcattcctcgtaagcacattcgataacactttacacatccatgtcatgatttgtttaggaatcggtttcctcaatggacagagcctccttggacccccagcacctggtcccgcacctgacccatccaaggtgcccgctgaggaactgctgaatgaaagaggacttataataaattctatgttgagactttgggttcacaggccttcctctctgggcctcatttttctcctctctgtcaaggaaggatggctgggaggatttccaaggtcctttcccgggacggggagtcctcatttagcatgcgcttgttgccctctgctggcagaatttgctcaggaccgttctgtccctgctattcctgaaagctgcagacaaagccagcaactgctgggtggaccagccagtgagtgggatagggacttgagttttgttgtctcgctggttcgactaagacatggaggtgtgtgcgtccttctgcctcatccgttcattcctcaggtgtggagaagcgctagggtaggtctcagacagacagtcggaaagacctatgcccctgagtgcacattaggacagccagggggctaaaaagggagarctggtgcccaggccccacctcagaccaacactggggagtagggcccaagcatccatctatactaaaacatataaaaatctggctgtttctggctgggcgcggtggctcacacctgtaatcccagcactttgggaggccgaggcaggcggattgcctgaggtcaggagttcgagaccagcctgaccaacacggtgaaacctcatctctactgaaaatacaaaaattagccgggcgtggtggtgggtgcctgtaatcccagctactcgggaggctgaggcagaagaattgcttgaacccaggaggcagaggttgcagtgagccgagaccgggccattgtactccagcctgggcaacaagagcgaaactccgtctcaaaaaaaaaaaaaaaaaagctggctgtttctaacatgcagccacatggagaactgctgaaccaagatggtctttacatacgtatctttttgtttgtttgtctgtttgtttgagatggaggttttgctcttgatgcctaggctgtgatctcagctcactgcaacctccacctcccggttcaagcgattctcctgcctcagcctccagggtggctggggttacaggcacccaccaccatgcccagctaattttttgtacttttagtagagacagggtttcatcatgttggccaggctggtcttgaactcctcacctcaggtgatccacccacctcggcctcccaaagtgctgggattacaggcgtgagccaccgcacctggcctacatgtgcatcttgatctaaaagcctagaagcacagttaaaaagagaaaagcctatctagggaaagagtaaagactttgattttctaatacaaaattcgcttagcctatctttaaaaattttctttctttgacaaaccgtgacaacttacaagccatacagttttcttcggggaaccaacaccatttacccattagggatgctgcttccagatccagtttttctttttgagatatagttccctatttttgtgtaccgcacctctgtttcttgtttgatacatgcatattcctgcatttgttaagattcgtttggttgcagacaatggaattcagaatgttgctaacttcagctgcaagtgagaacttgttggaagggaccaagatgccacccacagggttacctgccaggagcagatggcaacaggaactggaactccatggggcaccgagaaatggtctctctgtcctttgcttctgctttgttgtatacatctgattcatttcttctttcttgaggccaactgctgttttctgctcattaatccacaaggccgaatgtggccaacaatgggtctccacttccctgtgttcaatcgccacctgctggagaaaaacttttttctttgtcccagatcgaaatttccagactggcccctttgggccagtcaatcttggcctgcagggctggctacaggatctgtgaggcccagtgagaaataaaagcgtggtagcctttattcccaaagcagggggacrtgtccatcgtggtactcagcgagcttctttgtttcttctgcagtctctttttcgacttgtcatggtgctttttattttccatttactgttgttctaagtaaagaaaactcaatgttaaattattagcaagcattttaccattcatctttatatcaaacaatgccagttttaaatgtaaatttcagagcgtttaacttatatgcagaaccactgaaattacacaattggtgtttgtgacttgttggccagaagagacaaacacaaaccaaactcataaagattggaagcaggaagacaagttgcctccaggtttgcccaacggggatgttctttcaggcctggacatactggatgagcggggggagtccagacccttccaggcatccaagggccctgtcagccaccagacacatgcactgagacccagccagggaggcaggatctagggaaattggtccagctgtctcccctttccacagccttccccagccagccacagcagactaacctccaaggatctctaaacctctgtgctatgacaccctcagtacctgggctaggggtgggcagaggtttgcccccatcgagaaacagcctccggccggccccgccacatacactgtgtgctgccagcctagggcagggacggccaccaccatgccaacccgagatgctgcagggtgcatgcaccctatcctggccctctctgtgcctgtacccaggaccctgtgaagtgtggacagcaacagtggccataggtcagggcagaaagggggaagccaggtggagagcacaggcagctgagagctggtcgtgggaggcagccacaggtggagccatgcataagccaggcttccaaagcacagattcaaagataaagttacgtccgggtgcagtggctcacgcctgtaactccagcactttggaaggccgaggcaggcggatcacttgaggtcagaagttggagaccaacctggccaacatggtgaaaccccatctctactaaaaatacaaargttagccaggcatggtggcagatgcctgtaatcccagctatttgagaggctgaagcaggagaatcacttgaacccgggaggtggaggatgcagtgagccgagatcacaccactgcactccagcttgggcgacagaaaaagactctgtctcaaaaaaaaaataaataaataaaagataaagttatgaagactctcaagacagcgccacagaggattaacccccgcacagagcccttttcattggtcacttgctcagccagctgccccagtggcctgtgatgggagtgggaagtgtggggttgggtgataaccttctaaagttagaaccgttcccagaaatgcagacgggagagctttgggaaaaccatccaaaccttgttattttttatgacaaagtaggaatgccaccctggccctctaaattcataaacagtcacagacatgggattaaactacatataatttctgcaacgtggcttataggcatcattaaacagctgcaatatgttgaatggctatgtcatcatagattagctacgatactggctatggacttcaagactccatgtgtcctggcccctgcccttccacccctctgacccgagatgcagttctaacaggttcccgggtgatgctgctgctgctgacccttgcccatcccggagctcactttgagagctggctgagatcccaggcagggtggccagtggctgctccagggctgtgaagggctccccctgcagacggaggaactaggcctcccagygcctgtaactggaacgttggcggcttgagaatggacttgccctgaaggccggcctcctgctgctctgggaaaaagagggaacagaagaaagcaatccgccaccttggggactcctcctggattagcattatctaggtgaagaaagtgagaccatcacctaccaaccagataactcattccacctctgtgggcaaactggcagagcagcaaataagcttccttaatcccagtgcgcccacaccctgctcaagagctcatgggcacgtgttcatcttcaggccaaagatggggagccagggagtgacagactgtcactccaggagagtcacccgggggtgttaggatccccacatttgcaccccctgaaatctaatcagcattttccagctgttcctaatctgacctgtgcaaatggaatctcattggaacttgcatttttcattatagtaactcatatggcctctgtgtttcgcctgttcatagcctttgaccatttttctagctagttgtcttttcctactgactgatagtagctctttggtttttgttactgttagtcctttatagatgtggcaaacttttttatttgctatttcactatttgccttttgacttcataatgtgccatgactacccatgtgacaggctctttgagcctcagttttctcatctaagagatggggaaacagtcaccacactggcttagtggagcatcaaatgcggtaacgtctatgctgcacttggtcggccacatcgtcagctcccaataaatgctggcggctgtggttgccgctgcagttttataaccaaacttctctgtattacgaagacccctgagccccaggctagcaccgtgaaatataagcacaatagaaccactgagcgccaatcagatgcaatttgggtcataccgactttccattttgtggggtttctgtttaaatgtttgccaaagttggaaacgagattgaaatttaaggaaaagacaaaatgctgtgagatttgggctaacacgaacttctccctttgtcacgacccctccatcagatggcccctgagttctgcagcctcraggaagkcctgccctatctggacatggtgattgcagagacgctraggatgtacccgccagctttcaggtgtgtggtagccccctcccctgcccgagtccccacctcctacccctaccccctgccccagcctgcaggtcagggccctcctccatcagttaccacttgtgtttctggagggcaacgcctgagtcctgggttcctttgtatccccatggcacctcagrtatctggcccgctttcctacaggttaacaaccttctcaaagcttcacaggcattttcttaacaccgccttcctccccagcccaagctggccctttggtctcctagcctttgctggcttttgccatttcccctgcctgttcgttcattcattcattcattcgttcattcattcattcagcaattgtttattgagcatctactctgtgccaagcattgggaaatcagctgtatataaaacagataaaagtccctgactgatcttggagctggcattcagacagtaggggactgtctgagtcctgggagctccttcctgccatccaacacccccagctgtcccatcctggagctccaacacgactcaccctccaaaacgtctcactgcccctcaagacgtctgtgttgggcttgcctcacctggtcctccctgcccttcctcctcagcactttgagctgtaactatacacttcatgttatattcttggacacatatctgccactccatgacatttcactaatgtacacaccaaccagccggtcacaccaacctgtgggtatcttgagagcaaaaccaactattgtgcttcgttcaaactctcccaaacaaggcactccatagagaagggcatcttaattcatgtccccagacccctacagagagtgaagtaacagccagatttcaggctctagaaacagaagcagcacaaagcattaaccgtatgtgataaattccactcaacacttttatgaattaacagatcacataaaccatatggaaatacctttcaccatttttaaagacaatatgtggatgatttgagggtatctcaaaacgatatttcaacacaaaagcattacaaagaatgcaattgtagacattgtccaaatgttcaagtccagaagcaaatacagaaaattccggtggcgtgattcgaactgcattgtcctcaagcacacaaggttttgggtctcagtgtggaagcaggccagtcactcaggggctctgtgccccctctccccatgccagcattaagacctgatgtgcagcccttccctgatctcctttggagcctcttgcaaactgtcatccaattctttcttttattcttttttttttttttttttgagatggagtcttgctctgttgcccaggctggagggcaatggtgtgatctyggctcactgaaacttctgcctcttgggttcaagagatcctcctgtctcagcctcccaagtaactgggattacaggtgcccgccactatgcctggctaattttttgtatttttagtagagacggggtttcaccacgttggccaggctggtctcaaactcctgacctcaggtgatctgcctgccttggcctcccaaagtgctgggattacaggcgtgagccaccaatcccagccttatttttttcataattgatatccagctttcttccaaggggattgtgggaagctggtgtacatgttaaaatgaagttcaagataaagcattcagggatcaaatagaacaaaggccatttaaaggaaagaaggccttacagggccccagagctggctggtagctggggtccagctgtggcttggtgaccagggctcctggccaagagggagagcagccaagccaaacaggtgtgttctccagcaagaggacagcacagaaactgatcaatggacacagtacttcctggacctaaactcagccacgaatccatcagacaagaccttattagctgtcatgttgaataacaaagggrttaggctcttcaacatgaaaatgcggtggccgattctccactgacccgttataaacagcagagcagaaaaggaagttggtgcaggtggaccaggaagctggtgatctcacctgaggaccagacagaaactagagaacctgggtgaagtagttagaattcatctaacaggtctagagggcacgtcagaagaccatcttggccctggccttggcatactgcgtgatcgtgagcctcatgctgctccgtgcctctccttcctacgggttaaatggggacacacacctgcttggctggccctgcagaagcaggcaagaggcagtgggtggcacaggtggaactgtagtgcccgctcagctgcctgcagcatgatgtgtgcagggaggagcgccggcactggtcggacagtggaatggacagcttccatccagcctcgctctcctgagccgccccttccccacacatgccccacacccgccccacaccttccccacacccaccccacacctgccccacacccgccccacacctgccccacacccaccccacacctgccccacacccgctccacacctgccccacacccaccccacacctgccccacacccgctccacacctgccccactcccaccccacacctgctccacacctccatacctgccccacacctgccccacacccgctccacacctgccccacacctccatgctggccccatacctgctccacacctgtcccatgcccgccccacagccgccccacacctgctccacacctccatgcccgccccacacctgccccacaccttcacacctgccccacacctgccccacacctgccccgcacctgccccacacctgccccgcacctgccccacacctgccccacacccgctccacacccgcttcacacccgctccacacccgccccacacctccacacccacaccacacccgccccacacctgctccacacccacaccacacccaccccacacctgcctcacagctgctccacacctgctccatgggcatttttcaccctatcagctctgctggcttttcttattgatcaccagatatgagagagacaaggtgtcacaattctcacccagaccagaggacaatctgcttctgctcaaaggatttgggggtgaatgtagggagagtgagcatttttattttattattttatttcatctcaaaaagcgtgttgacttttcccaagtgctgacacaacttggacttaytcataaaagaaaatcagaatcgcccttgtgggaaacacagcagccctgtctgagcgccactgaggtgactcccggatgctgtgcggtgcagttctgaagcttctgttgatctcttatgaggttcagtttacggggaagggaaggccctattttccagcttccagggggtctgcctccaggtccaggctgtttccagaaaagatgaacaagcagggtgccagggaacagcttcatctgacccctttggaactgcgggtacagacatcacaaaccccagctgcctgccctggtttcagtgctggtgtttgctatcagctccaagcacatataattgcattagcagcttagcatctcaatgggttctccacgccctggcctttttctgttcctgtctgttacatgaaaggctcataacagagagggagcagcaagaagccacaggctgcttttaatctcttacgggcaggaacagggcataacagtaattactgtaatcattgcatttcctttaggatatttagggaagtccaatcctacagcttgaagtaaaatccagcatagaattattttgaatttttaattatttatattgccaaaatagcatgcttatacaaacaaaacaaaaccaaaaaaaaaaaaacagtcccggccgggtgtagtggttcacacctgtaattccagcactttgggaggcaaggagggaagatcacttgagttcaggagttcaagaccagcctgaccaacatgatgaaactctgactctactaaaaatacaaaaattagccgggcatggtggcagaaacctgtaatcccagctacaagggaggctaaggcaggagaattgcttgaatctgggaggcggaggttgcagtgagccaagatagtgccactgcactccaccctgggcggcagagcgagactctgtctcaaaaaaarcaaacaaacaaacaaaaaaaacagtcccctaaacaatgaagaataaaaaaaaaagaaaaaaaaaggccccctgccattctccatcccaatcccatcccctagagaagagaaagatagaaatttaagtattcttctagaaatgttatgttcatatacaagcatatatagtctaccctttaaaagtaaagcataaatgagattgtgccaktgcccttgggtaaaatgaacaatctgatcaaatattttcctctctgggagaagaagctatcggtagagacatagacaacagggaacagattttcaaacccaaatttccttccctcaccaggactcactcagaggagccaaattaacaaagaaagtagaaggctgtctgccagggaccagggagaggggaggggagggagttagtgtttaagggatccagaatttcagtgggggaagaggaaaaagttctggagatggatggcagtgctggttgcacaatgaatgtactaaaaccacagaactgcacactgaaaaatggttcaaatggtccattttatgttctatatatatatatatccacaatgaaataataaacaggtgagcagataaataactaaataaacccagcctcaccaggaccaattctgatgttccaatattccagaattatcatggcatttgatggacggtttgagcctgtcctcattagatgttctcatgtcctgtgttaaggacttaagactcagaagatttttcatggattccaggcacgtgggagtggtacagacaggagcaggagtgggagcccgtgtacgggattcattagggaaacagaactttgctacgttgggagggtatctcgaggacaagccttgacagagggtgtgaccagcgtctcctcccaacccccgtgttacctgggataggaaatggcctgaagtctggaaggtaggaggcaggaagtggggcttggttttcttgctgtgagccagatctgttggagtgggataatgctgaagtcagagagagacttctcaatcgaaccctatagtcacaaaagtagttgggaagggggtgggctgagaggtgcagggaggtgataaagagaagctggggctgtaattctgccctcgtcctaaaaggctctatctcatcctttaaaatcccaaatcacctgtaaccagaactttttttttttttgttttgagacggagtctcgctctgtcgctcaggtgtacagtggtgcgatctcagctcactgcaacctcctcctcccgggttcaagcgattctcgtgcctcagcctcctgagtagcagggactacaggcgcacgacaccatgcytggctaatttgggtatttttagtagagacggggtttcaccatgttggccaggctggtctccagctcctgacctcaggtgatccacacacctctgcctcccaaagtgctgggattacaggcatgagccaccacacacccggccatgaccagaactcttgagagcgtgtgctcaacactcgaagtccaaaagtctacccaagttcaggaagagagcggttcttcacctctccacctcgaattttgtttctagaatgttgcatgtaggtctgaagagtgacagcacgtttgtttaacaggaactcaaagccagcagatcaggaaaggacacttataaggtttggagtttgggttacagaggtttaaggtaggtcttttgtggcaaggaatatttgaaattgggcaagatgagtgagctgagatcgcgccactgcactccagcctgggcaacagagcgagactccatctcaaaaaaaaaaaaaaagaaattggggcaagatgtatgacataacaatttaggaatgagtgaatacaggtaggtgagttgaagggagttctgacaggtaagactgttgtctggcaagtgaactgtttgctcacgcaagcaaaccattgtcctgataggaaagtggtttgctcagacaaattagtttgcattaatttcctgaagccaacagtgaagctgtttcttsgttcagaggtttatcttcctcggcaagaattttctggagcagagaggaagtcactgacacaggtggtctcgatgctcactccaagagttgagttgtgtggctccaggtagactcatttcccagggtcacctgctgggccataatcaacaaggtacaagcttaagagagccatgccgggatttcaagttgcaaggaagagagattcaatggtgctttcttgagtcacgggtgttggttgtaagaaactggtggggtaaggaagctagaactctcccaggaaccaggaacggctctcactggcaggcctcacggaggagacccaagctgggggactggaaggtggttcagattgttcacaagctgcagtggctccagcagtcagattggggtgtgatctcacagcaccaggagccctgaacaccagcctgaggctcagccctgaaggcagcttgaccaggcaaacctggagactgcatcaacaccagcagcctccaacacacctgacctgctcatggccttaatcccaaacccaggtcctaaactacctctcactgtgcatcgcaagtcactgcccatcttcctggcttctgatctgctgccgtccccgattcatggcctcacttcacccactgattgcccttgactttgagctacaggtttcaccagctaactgcgactctagcctcagctctggggccatacagcctcaagcacctgggtcttgctccagctccagctccctgttctaggcagcccatccttgggaagaagcagacaaaactgcatgtcagagacatggctctggttgtcatgagaagactggattgcaaagaggtcaatgagagacgagaatctaaactaaggagatggcagtaaaactggagagatggcaccatacgaaagaccagtgatgaatctgcagacggggagagacgagtacaggatggcttctggtttccggctttctcaagcctgtgtgggaaacagaaggaggagaagattctgatgacctgctgctgctcaggccgacttcgaggattctgtggaccgcccagggaagaggccgggtctgtgggtagaaattggaacctggggttcaggctggggctgaggtaggaggcttaggagataatggaagttgaatctgggagggcagacgaaatccctgggaagtgccaggatttaagaggctggtggatgcagaagagcctgccaatgagggagaaatcaaggaaagaaatgtgtgtgtgcatgtgtgtgtgtgtctgagagagagagacagacacacacacagagaatggtaaagatgatggacacaggccaggtgcagtggctcatgcctgtaatcccagcactttgggaggccgaggcaggggatcacttgaggtcaggagttcgagaccagcctgaccaacatggtgaaaccaccccccgtctctactaaaaacacaaaaattagccaggcctgttgacacacacctgtagtctgagctactcaggaggctgaggcaggagaattgcttgaacctggaaggcagaggttgcagtgagcagagattgtgccactccagcctgggtgacagagcaagaccctgtctcaaaaaaaaaaaaaaaaaaaagaagaagaagaaagaaggaggaggaggagaagaagaagaggaggaggaggatgcagcaaaaaacagcaggtgaatctgggtaaacgatacatgggtatctaatgtactattcttcaacttttctgtaagttcagaattatttcctaatgaaaattaaaacagaaaaacaaacaaaccaaagaaatgtgcaagaggaagacaatcaatgacatagacagaccaagtcagatgaagactgaggagtattcatcagatgtacccataaatattctttggggatcttggcatggggaccatccacaggagggaggggacagatgccaggcagcagggctagtcagtgaaatgggaggagagggagcgagagggtgagcaagggcaattttaagaggcttggctgtgaatgggaagataggataggctgtggcccaggaatgaccctccaggcccccactatgaaagcaatccttccaaagcagtttgcaccccgacatggggcacaagaggggccctttgtgcttgacaaatggatgcatgaagggatggatgagtacattttcatcaaggaccaagtgagcctagcctcggggctgcaggctcctgggcagtgagtggtaatggggtrggggcttggtcaccctgggaagggggctgagcagggggtcctctgtccccagcctcattccacacaccatgctgcctgcccctgatccccttcacactcagactctgcctgcccagcacgccccaagctctgctcctcatctcttctctgtatccacccccgacctggtgtttccctcagattcacacgggaggcagctsaggactgcgaggtgctggggcagygcatccccrcaggcrctgtgctagagatggcygtgggtgccctgcaccatgaccctgagcactggccaagcccggagamcttcaaccctgaaaggtgagtactgccccttttaaaaagctctgaagggatgtgagtgtgtgggatagaaatttaccagtggaggcagcagccgggaggcacagacttagcaaaattgtccccaaatagtcaaaagttatggcaattcagatagatgtttgcaagacataatttccaaaggaaataattataccattttttagccacgcgtggtggctcaygcctgtaatcccagcactttgggaggccaaggtgggcrgatcacaaggtcaggagatsgagaccaycctggctaacacggtgaaaccccrtctctactaaaaatacaaaaacttagctgggcgtggtggcgggcacctgtagtcccagctacttgggaggctgaggcaggagaatggcgtgaacccaggaggcggagcttgcagtgagccgagatggtgccactacactccagcctgggtgacagagcaagactctgtctaaaaaaaaataaataaattaaataaaaataaataaataaataaataattataccattttttcaaggtccaaactgaatccagagatttagcatttcagcagccctgcatgcaaggaacaaggcaatttcaaatgattgtcttccattcattcaagccaggacatgggatacaggattgtatttcaggtctgcactggaaagtaacggaacatcatttcctttttaaaaaacgggcatctatgccaaaacaacagcttcagctgatgtctccatgaatctaaattcacgtgatccactggttgacctgggtccccgccttccaccacctggctttggttcattgtctcctttcatttctgggctctgtgattggaaacatctgagcaggcggcccacactctggtcctcatcagaaccagtcaatatcctgtgtgtgtgatctggcaagggaagggctggcccggcaccagttgtgttttcacctttcatggctccaactgagttcagcccaagcctacgacccagtcactgggaaaacgtgagcaatgggatctacacaacaatattccacagtcagcagctcctgaacgtgccgcagccacagggcttacagcctcacaataaagcccaggggtagtaaaaagtgagctcgctgttacagaacagtgagtgccacctagcttcactgtcatgggacacacgctgcaggcaaatgcactacttggtaggagattcagcagttctgaggaagggcctccagctctccaggtactgcagcttccagtggttcaagtgtccagtgcaggggcctgcaaagcaaacacgggcaggagaggggctgccagtgtggcccaagagacctgcagggcaagccagcaggacacgccccccagggagggcccaggaggtgctgaggtgcccggtaccctgccaaggaagcaggtggcggctgggtcatcctatgggaggggaggtggcgccatgggcccaggtgagggtgatcaccaaaccctggggttcagggatgccgtgtttagactctgattgtgggyggcggtgagtctgtgggcttaytagccacacactgaattcctaaggagaggcagggagggagctgtggacattccaggtgattctgcgaattcagctctgcctctggggctgtgcaggaagacaggaggccaggagcagagagggactgaggctcaggaatgagcagccatcagctcccagagccttggagacatccttgtctcagatgcaggggtggctcagctggagcacagggctgcagaggggagggagcgggtgttctgggccagccctgaccacacggacctgcaggttcacggctgaggccmggcagcagcaccggcccttcacgtacctgcccttcggggccggcccacggagctgcctcggggtgcgtctagggctgcttgaggtcaagttgacactgctccacgtgctgcacaagttccggttccaagcctgccctgagacccaggtgaggcccccctgctcagaggcagrggcaggggcaggggygggagggccaccccagttctctgcgtgagagcaggccagcctgggggcaacatcaggctctgcctccgtgagcttgggcaagctccttaacctctctcggcctcagtttcttgattcgtaaagtgggggtgataataataacaccctctacctctcaacatcctgtgaggatccagtgagttcacacagcgctcaggtaagccctggcaagccaacccgagcacgtgttaaccattgttattagtattgttctctgcacaccagggctggacctcaccttgctgtagctcttcccacttccacaaagggcacacagacaatggcatttgcagttgtgacatgtgcctgcctttgcggggtggggggtgcatggcttgtcctacagaaggtggggacacttcctctggctcctcctgacagagcaaggtgctgtctgcttggaggggaagctgaagggtttcagctccttgaasggtacccccagctttgccttccccccttgtgcagacactcacgtgtccccatggccacagcctggtccctctcacaggtggtgacacagcctcttcccaacaacatatgccttcattcctgaggtcctagactggtgcacagaccctgtcctcacccagagagctgagctctcctgaaatggggcctcacccacttttccagccctatctcccccccacatcacacactccagaaccagcagaccaattcctcaacaggtcagggagcttatatcccctgctttcacactcacagcaaccctgcagagtaggagtgactattcccattctttagatgaggaatcaaagctcagagaggttaaataacttgcctaaggccacacagcaggactgcaggcttcgtgatggcagggacccagtctgtcatattcattgttggactttccagcatctagcttaatgccaggcgcatgacaggtgctcactcattcattcaacaaacattaatgagcaaatggataagcagccagagatgagagaaacgggggtcctcacccakatcctgcccactcccaagctctccctccttcctgacatctggctacgtctctgcacagcrttagctattccctgcctatcctgaccactgctgtcccctgcacctatcctcatgcttgtcctgccacccggaacccactgttcagctgcagacctggacaggcaggcataggaaggcataaggacacagttgacagatagcaacaattctagattgagacaggcagtgcctctgacagagaacctgggaccagctgctggtcctggaggaataatgagcttggatgggggacatagagtctgagatactgaaagtgaacgcatccacatactctgggctggagacagggaggggcagatcggcagagcagagccaaaccaagtgaggtcaaggggcagacggaggagcagccccactgcatcggggcttccacgtgtgcggggcttgtctcacttccccacgatctcaacatacagtrcagcagccagaccagtctcccaaaacgctgcttatgcctggcactccccggcttaagaaccagccaggagtcaagggctccccgttcttccttgtctgctcagacaagtgctggggcctgcagctttttcagatgcctttgagggctatggctcccacaggagacacgtacagccccaagcactaagaccctggtgactctttgctgtcacattagccactggctcatcattttactcagctccagaggaaaccsaactcctcgagtaattctttggtttttcttcaaagtccccagtccaccactggctctgccttttaagctggacataggaaagctttctggatgtcagtgaggccagaccacagcacacatgagcaggaacagcatgaagctgctttccccagagcccctgggccagagggcattgctcagttactggccagaactggagagtgagatggggaggatcagcagggacggctggagtcactgaaagataggtttggggctttgctctctgctttcttcttgtgtgaccttggacaacggacttggccttcttgaacctccaagtcttcatttgtacagtgagatgctactatctctttgacaaatattttaattttctctattttaggtaccgctgcagctagaatccaaatctgccctaggtccaaaaaatggtgtctatatcaagatcgtatcccgctgacacagaaggctgccgggtsgggggagggcacccccaaattcaaagaaaaccctaagtgtggatgttcagaattttggaaaaatgtcactgaagtgattgaaagagtgcctggcatgcaaggrtaagaggttctttacataacatttcctaaatgcttaataaacrtttgttgcacttggttttgacattgccaatggggtttgaaccagtgctctctctaaatgaagaattgctgataaataagtgaaaatgtagttttgacaaaacaactgagaatgtggggttttaaaggaagtcccaggcttgtgctgaaaggaatccatggtgcagggcacatgaggacccccaggtaagcctgtcctgatggcactagctcgtggctctttcagcttctcgtgcattgtggagttgtagagaatgacatttatcgaaagttcaacctcagcagtggttccaaagctttattatgctttgattttcctaggtagggtagtaccaactttacagtcaagtttcaatcgacagaaaaatgagagtctgaaaaatgatatactttttcttttaaagaacactgtatcggccgggcacggtggctcacacctgtaatcccagcactttgggaggctgaggcaggtggattgcctgaggtcaggagttcaagaccagtctggccaacatggtgaaaccccatatctattaaaaatacaaaaaaattagccaggctgtggtggcgggcacctgcaatcccaggtacttgggaggctgaggcaggggaattgcttgaaccagcgaggtggaggttgcagtgagccaagatcgcgccactgcacgccagcctgggtgacagagtgagactccatctcaaaaaaaacaaaaacaaaacaaaaaacactgtatattaattttgatcaaagaatcaaaatatagaggtgattttttttgtaaaaataagtattgtgttgctaagcagttcacattcaaccaagcacttgcaaggtcagtctcacgatcagccaccagcagctgcgcattcatggctgctggtgaagagccgtatcacctccctgtgcctcagagacctcttctgtaaaataaggaggctggcctcgatcaaaagaccacttgtcctctagttgacacctgagcagctttaagaggttgaatgttgtatagagaacgatcttgtagaaatctgtaagccccttatgtgacacccagatgctgacgacccacctttagaaacttcaggccattttgggagagttggcagaatgagtttccacatattcactgctgggactgctgcttccactgtttggtggtcccccatccccttcagccaggagcacccactgtatccctcaaaatcccccttggggggccccttctcttattctctggccctccaggcaggaagaggacaccccagctgcccagcactgggccaggcctgtgagtgactgctgcctcaaggtgtagggctgtcctgtggccctccccacacccttgttgccaccacctgcccttctccatcacctggcccctctgcaatgcccagcctgggactcagactcactggagaaaaccatccacccctgggaacctgtcggcctccctgcctgtcccacaatccctgacctccccacggctgccgccaccatagaacctcagcctgcagacaggcccaatggcgcactcagctccctgcttggagcacagccccacaacctgagtcctcccttgggacctccggccccgccccccggcctgtcagctccatccagcttccctcgccttcccagctcagttggtcaccaccttcagacacagtggtagaggcttcctcatgtgctggggtcactggactccagtccttctactgtgtgaggccaccaaccccacctctgcttaaatcccactgttcacatccaacaccaggtatcacagggcagggaaccgcaccgcctggtcctccaaaaaaccctcttgctagattcccaactgagtcctcacaaagattctggccaatcccacacacatacacccatgtcccagaccctaccacctcttggcaccaaacatcttgagagtcacagtcatttccaccccttcccatcacaatgcccaccctttctgcaccggcaggaacggctccctccccgtcatcaagcaatctggccatgtggctcccaccctccctagcattgctggtccaaggagttgctcttcctaacctgctttcttccaggtcacccagccatggctgccagagtcttcacagctcagtggacttttccggagcaactgagcatctcccaccggatccctctggccgccctccccatctacacccccagtgaaccagttctgctccccaaatctccccagctcccagatgattcagaagcatagaatcagttcacttacatgcaagaccttagcaacagacatgcatctgatttaatggttttctctgacacctctttgcccctgcccaactacaccatagcaggaccaatgacttaatgaaaaagcaatgagtgaaatggcaggatcagtcaggctgtgaggaaatttggagggggttctgaaaatcataccatgggcaaccatgtggctgacccagctgcwgggtgaagctgtgttgttcttgctgttcctctggtcatttaccttggctctcctccagcttgactgcacttgcctgtgttaaggtttcagatcactccaaagatggaaaaatgggttcatattcaccttggacctgagaaatacaggcaagccaactgaagcccaagcagcaagtcgccagcagacacacgtcctcaggaaggtggaggctgggcaaaaagcatgtagtgaggaccgagtagggagggctgacagcctggtgacaccagtggccccgccagcccctctgccaacagggccagaaccagccaaagcccagaagggaggctcctgtaaactgccacgtgtgagggacacacacaacactctctccacatgcacagcacattgctcagtggtgaacctgggtcttacggggcctgaaacttatctacgaattggaggaaagagaaaaaaaaagtgtaacatttgcaaattttatcaaaacctatgaccatgtgaccatattgctagggtccctcctagggcctggggaggggctccagcaagtgaggggccctgaaccttcagcttcactgtcttcttaataaatccatacgtagctcaccaagccgtgtcatcagctctgtcacagccctgataacggtctgaatgttacgacccccaaaattccaatgttgaaatcctcacccctgaggtgatagtatttaaagtagaggtgattagaccaccagggcggagccctcatgaatgagattcagtgcctttataaaagaggcccttccaccgcgtagggttacagtgagaagactgaatctatgaggaagcaggaggttgcactttatagactccaaacccggtaaataaacrtctgctgttgatgagccgtccagtcaatggtgttttgttacagaagtccaaatgaacaaaggcaatccctgactctcagaaaaacgcctggcactcagtaggtgctcaatcaatagacgcagaaaaatgagcttcagtcttcatccacttcggataaattttcttttatttccatactcttttgtgacatgtgtgrcacaagtattcaatctcacagggatgttaaaacccacactcgaagggtktccagtgtgcttaggaaatgtgggtttgcgcaatcacaggccaagcctgggggtcctcggggaagctactcctccaggtcacctgccaggtggatgcacttccttgggcaatgggtgaccctcccaggacaaggggaaccagcagggactcgatggcaccacacagcagccacctgttctgacaatgtgacacagaccaactaatgccagagcccaggagaagccacagcagagctgcctgggttggtgtcagagcaacaggcagaagtgactgtgccgcccgtgggctgtcatccaccggtggctactgtgtcattctggaaaaactatgatgccatgagactctgagaaaccgaatcactgcagagacaaactcataaaaattaaaaccaatccataaaattgtatctagaaactctgtccctggtgccaataagcagcaaagtcaacaaagagtaaaaactaaaacttcaacacattattaaaaagcaaaactggactcaactacaatcacttctggttagtccactagtgaacccaaaagtgacttaaaagtaaaaatcattattagcaagagattaagaacataacttcattgagagrtcaatgttaagagaacagttcattaraagtttctgtttaaaaagaaaaggaaaggcccaaatagccatttcaaggcagagcaggtgaaaggcctggaacactcctgtgcgctcactgtcggctgctgaacagggagcccaaggccagcaggatggagggtgtgaccgagggcttggaggaggtggtgtactggatgacatactctgggtagacctggtgtttctcaaagatcacaaagatggaggggtcggacacactgttcacgcagctatcatagaaggcgttgctccagccctccttggccggbggacggacaaaggaggcattgcccctgacgaactcgcccaccagcacccggrccaggaacatcgtgtgggtctgcgtgtcggatttgctgtagtggtgggaatatgcagcatctcgggcaaagtagctccctgaaatgacacacgagggctcagctggtggaggggcctgcagccaggaagggtcagcacactgcgaatagcgtcctggtgatgtgcaacgccagggcctctactcttccaccccgcatctccctccctccctctgtgccatgtctccactctccctcatgaagtcacatgcatcagtgataccaacacccttctgagtggcagcatctgaggagttaccaaactgagatagcaaattcctttcaagttccggatctgccccacgaaacctaaaggcctgtggacacgtcactacttaatcccccaaacctcagattcctcaggcataaaatggggctgttcagcccaaccttacagggttggcatggaaaatgaatgagatcccatatacggaagcagtctgtagactctggcagcccaatgtatagaattatgagccttgtcaaatggaaatctgagttagaagctgtcacctgtacatttaaatccacaagtctaccactggctgctgtccatcttgaccccttgccatcgctgcctcagacggaaactgactaacaaagaactgatggacccggaacatggactgctgggcagaaaatgttctcaacttggtaagcatattgtggttacagaagataatgtcctgttcttgggatgtgttaaagggtgaaaggagacaatatatgccacctacctgaaaatggtgcagaaagagagagggagagagaaagagagaagtggcagcatgttaaaaccaatgaacgcaggtaaaatttacccaaagaggttttttttaattattattattccaattttcttgaatttcgatttccaaagaaatagtattttaaaattttctttggcaagtttaaaaataacagacaagaaaacactcagataactcacgtgatagctagaatacatgtttacatgagtatctctgagggtttctggtttctattctaaggaaatcaatagtaaaggcacagtcagggacttcatcagggctgggaaggtatcccctctcctctcccgtctctgtcaccatctcccagggcctctgctccacagggaagcaacaccccagcctaggcaggccaccctgcccacacctggggccaagctcctgaccatgcccagaggagcaagagcaaggatgtgactggtagctgtgcccaggtaccaccacacatggagtctgaacctgctcatcagctcaggctggtcccctcatgccctctagcagtctgttcctatgcaggggcaaagcaacatgggttttgctggtggaggccagtcatgccttacccttgccgtaggaagtgccatgaacaccacagacccgccagtcaaagttctgctggcagatggcgtccacaaaaatggcgctggtgccgtggaacagctgccgctcgtccacggccttccctccgttctgctt

SEQ ID NO: 93214 - DNA, 24305 bp, Homo sapiens
tttacctctgaaatctacttactcatccaatcaacatcatttaatattttgcaatgatattgcagttggaagttcatcatttagccttcctgggaggaaaaggtgccattttaggatcaagcattttccctcctctgttcaactgagagctacaactggggtgttgaatctaaacatccatttctacagcttgacaaaatttgagatatccaccgtttaagctttttctcaatatcagttttctttgtgtgtgtgtgccagggtggaatttcaggcctaccagggcctgagatgttcaccatcttgagagaggcacactcctgtgatttcacaggtataattcttacccagacacagacttgccctgccctagtccacatatttacagatggcatgagaatcactggagacggcccggtgtgctcccagccagcgacattctctggtacagatctattctgcatacacctgaaaagactgatttttaataactttttatttcaggcctgtccctccctttcacttaaaacagcatgtctaagtcacagcaactataaccatgagggtcttcagcattgaagaaataaaaatacataacagctgagtggttggttttctgtcttggcttgattgcacagttcaaagccaggattacggaggtcattaagcagcattgtctckgtgacatgattagtcaggtagcaaagtccatttgtcacctgcaccagcaaattgagttaatactgcactacaggctatggggactgtataatatcaacgtgattacatcaagcgggatgcaaacttgacagctcactgaatttgtccgcattaatcgttacgcctgtcacaaatccatcaggtttacagataattaggggcctgttaatgaagctggctaaacaaccttaccttttttgataattaagaagccgcttcattacgaagggaccatttcctctgagcagtatttctttattttttttacataaggaggattcatttggataattttcccttcctctctcatcactgtgaagtattgctattctacatctgtcatccaccaacttcctggctaccaaacaatcaattatttgacactaagataytctcaagaaaaactcatcagttacggatggaacagtgaggcaggccaacatgcagctttaagaaaaaaacagtcaggatgttataataaaaacactttggaaaatcgcttgactcacatatgtatatcattgccctctttcttttccagaaaatgaacaaataatatttgctaccaatgcattgtggctactttaagagggaatctgactggcttctgcagagattataaacatcgacggctccttattaaacgcttaagatgaaggaaatcaggattttctcacctagcccattacaaatataggaaggacttatgccaatgtaaatattagtgaaaataagcaagtgtgaaccaacgtgtgttaatggaagtaattccagatgaaagcaaacagccttattttgctaggaatccacgttaatgctttttatgagtgaggggggaagagctaaacaatggctcatytaatgaacacaagaatcccacaggtttggaatcaargtagagataataaaccctgtaattaaacttacacagaaccttctagtatggaatctatttttgaaatctcacttcaaaacacaggacacttggaacatgtgctgtctcaatttcctctcaactaaaatatattttggctccattttttagggttttttccctctcaagttcctgtacagcagatgactcagtcatcaactcttcatagccatcactttgcagcattttgattaagtatgccaaatgtcgtgtagaggaaagaatggaaacactaagcctgccaacttttgattgaccattaaagccaatgatatatgtgcctgtcaaaagacagacaattaaatcaatattggaaaaaagtcgccttgacggcttgtttttatgtaagagctgccaggatggattaccatgcaccatcatgcccttgtcaactttcaaaccttttatttaaaaaaaaaaaaaatgtggtatttaaagttgcagtacctcattccctcagcattttgtttgtccttggaaatattcaccgcaattttaactgcaaaagttcttaagagtacaggagtagttttctgaacacaactttttattgtacattctgtcatttaaaaaaaaatccctctaactgtgaaaatgtaaagacctcttgtttctagcatgagcaagtggcgaatatcttgagacactgagctatattatttgggggctaccagtggcatagatactctctttgaaaggtttcttcctccattactcaaagttattccaaaataaatattctccattctgttccttttatgttgtgaatactcagcataaggtaatctccttcaactctttgagagcatctctatcagtgatctaatggaaatgatgaggttattttactgaaccattcataaacgtagatactattcccaaatttttttagtagcagtaatctctgctttaagtgcttccccagaaaaagcacgtataaagacttgaacacgtgcacattactgaatgtgatactcaaacttattcagattctattctatactgcaacagctaaagagtcgctcatgtttaaacataaaacactccttctaatatttttaccctaagagcttggagagagttgatttactctattatttagcgataactcactggcatatgggttgcattctcagccccacaaacgcaatgtccaaaactgagacaagacttgagcaggcagcagaatcactgggctattttcaaacctgtgctcaaaaacgcacggcagctgacccaccccaggtttagcaatggattagtaggtgagctgagttaagggatgctgcagcygtaaaacttcygagacaaaattaaaatggagcagcaaaagggggagcgagagagaaaagttgccctgatagtggcggagctgtcaggagcatgtgtgtttccatggtgagtgatttattgatgtttatcaggaatgaatagatcaaaggctgccagatgacaggcgatcaatcacacatcaaatcaaggatggcaatcctctaataaaacagaaaacaaggaaaaccagctcctgccagttcctcctccagagaaaaataacttttctgttcaatcagagtctgcactatcactgccttgtgctggcctgatcaaaagacatctttagaggtaataaaaaaaagtgggggcggggggcctcttgcacaggacattaaaggctgctgttttccagagaaatcttctgaacacattctttgcgtcccagcctggtgaccttgttttcaagtgtcaggttcagcctccccgcctttggaggacttttccagtgcgctccggcagccaaggagcaactacttcccctcagcgcacgccccctcctgaggtagccagaagcacccgccgtcccgcggcccccggcctcccccggccatccgggcttcccgcagcgcagagaagcaccgcgaactttctctgctccacgcgccggcccaggttgggggtgtgggggaggacggcgaccgcagcctccagacgactgtggccagcgcaggctgggcctcccctccccagcttggggcggcccgcggcccacgtcccgcacctcggcccgcgaagccccctcctcctgctcctcccggcgcccactccccgcggcgcgggccgcgcgcccgttacctgccgagcgccggggggcctgctgcttcctcctcggcatgctgctcggccgccgcagccgtcgcctcagccgccgccggagttcgcggggcgcggggacgcggggccccgggcgcgggcgcaactccgcggcgcgcccaactttggcctcgtccccgcgggctccgggctccgggcgcgccgcggaccgcggggagccgctcgcatggaccgccgcgcccggggccgctccaggaggcggcggcggcggccggcgcgggccgcgtcccggccgccgggctgcgggcggagcgcgcggggcctgggcgccgagcccggagtcatccccggcgcgggccgcgggcgcagcagcgggcgctcggcgggccggcccgcggcccgcgctccatgctgccgcctccccgccgccgcgctgctgctgggcgggcgctcctcccggcgcgccgctccgggcgctcccctgcgccttcttccgcgagccgagagtcgccgagcgcaactttctctccccctctctcctcgctgtttgggggtcgcggcgagtgtttttagtgcgcgggtcgcagctttctcattgtgcgccagcgaggccgatgcaggctgtccttttcctccccgcacttagtctaagaggaagaaagcaaacaagacagaggagtgaagcccccgtacatacatgcgccggggggagatgtcaggcgctgctccaccttccaaacagtcacagatcaaacagtgtcaccccgccggagcgccacttggtgcsccgcgcttccacccggggggcttggccgccaggatcgccgcttcttccartgcgaaatctaatgcaaacacattttgatcatggatttttggccggtcttgatcttccaacagaaaaaaatttgaaaaatacacaaaaagcaccccccccctccaagaaaaaaaaaaggcaacaacaacccggagagtgtgtgcaaagggggtgaagagcagacattcactgggtgggcgagatgagcgtggactgtccccccccccctcaaactcctgggagagagggagatgcactctcgctctctcctcttttcagtgaaatataacacacattcggatcgcagagctttcagacagtctcaactgatagacagacacatcgagctgcttttcctgcttcagtttttactcctcctcctctcgccaacgtcaccctgacaattacaaataggtctctcacaaaccatacctgtcaatctttttaattgctttgttttctttttttcggagctaaacaatatgacaaaaaaaagaaatcttaatacagcataacataaaagattgtacattggaggaattcattcagtgttgttattgtaacccactggctgataccgggtaaaacccatatgctctaagttaagtagacattagttcctrmagatttttaaacctgttagttcccccccaacacacacacatacacatacacacatttgcacattcatacacacgcaaccacgtgcatccaaactacccttgggtgaagcatgtcctacatttggggggaaaaatatctgtgtcgcttttgcaatctcaggttggggggttagatttggctggggaggagcccagagtagcttttatattttggtaattcgtgggtaactgaaaagcaagatatttttaaaattaaattttacaatttaaataaaaatgtaaagatggacttagttcatcacagaaaagtgtggaaatatttaatttggcccctctataaaaagtgaattgacatttggtccatgcacgccagtagggagaaaacggacacgatggaacgacagatctttctagctgggttcgaaaatgaggtcctcacacagcagtgcaacgtctccaattcagttaagtccctcggcatccccacgtagaactttaaaatgtgtctgtgctctgggaatttggccttctggttttctatatgtgtgttctctcccaatgggaaacctgtaacagtcttgtagatctacttaaaacattcatggaaaaacatgaaatctaggccaaaataaataaaatggcttagttcctgcaacttgcatgggacagaccgtggacagaaagcacgcgcaaggggttccggggacaggaagccaccagcctggggagcgggaggcactggacatttccccgccccgcggtcggtacgggtgcgcgtgcggcagcggcggcaggggctccccgccctgcccggggtccccggtcgtgccccgccgcccgggccgcgctcggggttgattcgtaccaccttgsaaggaagtgaacgcttcgcacgggaaggggaggcgcctgcgccggccgccgcgcagctccggggacgcccggggctgccgccggctcggggccgcagacgaccgcgggacgcgcgagtcccccgtccccccttgcccgccgtcccccccgccacccttgcccgagaggagtcaaatccggcttttagagctcggggagggtggggatatccggtgcctctcccgcgccaggaggaagggggagggcggagaggatccttggccagtctgcgccgagcagattcaaaccaaaacaaaaagattaaaggagcagcggccggggcggcagcggtccccaggccgggacacccggggtggtgcgcccgggttcgcgggggctgcgccggcgccggggaggcggggggagcgggagcgggcgacgcggggaaggggggagccagggggagggcgccggccggaggaggggcggacccgccgccctagccgagcagagcacagccgagccgagcggcccgggcgggggccgaccccggccagcgtcggcgcagagagcgggcggaggcgcaggccatgctgcggctggtgcccaccggggcccgggccatcgtggacatgtcgtacgcccgccacttcctggacttccagggctccgccattccccaagccatgcagaagctggtggtgacccggctgagccccaacttccgcgaggccgtcaccctgagccgggactgcccggtgccgctccccggggacggagacctcctcgtccggaaccggtgagcccggcgccccccaaccccacgcccccgttctcgccccgggctcgcgccgcgccgcgccgctcccgcagtccccagcccgcccgcgtgcccacactccggcgcgcgctcgggcgcacagcctgagtttgcgagatcccgggaagttgaacccgccgccatctggcgaaggcgaatgtgatgtgactgttgctggtgtgaatatccgatgccaccgaacgtcctcataactgagggttattttaatttgggattcccctcccctcctccagccctccctcctccccctcccgctcccgaaataaaaccgacgggacccagaaggggaggctccccgccgggccgcccgcgcgcacccacagttcctgcgttgacataatctttagggtggagcgggagcagcctggacgcaaactgcgacgtttaggtaaacgtgcttcggaggaaggaggctgggacccggctggctttccctgttccctccaggttggcagccgcctcgcagtggcggagcctgtcgttggatgtgtgggtgtgcacctcgccggtgttgtctgcgtgctgtcagtgcagtgtgactgttgtctgtcccctgagtgttaacgaccgccgcgtggcgcgtgtcccgggcagctgggccagggtcggggtgggggcatggctgcctttgccggcacgttttgcagacattcaggtgayaccgggttgttgcgagaccttctggcttttccattccycgcgctccccaccgtcgtgtttccgcctcactcatctttagtaactggcgaagcaacagggaggaaacggacctcactctttatcggagccatgcccgcttaggtctttgctccgtgggtccctggctgcccgacttgactggcaaggcgctcctctatgccctctgcagaggcctgcaaagtcccatcgaaatgtttacggtgctgcatgtgtcaagttgaataataatatcgaaagggaggagtaagttctgactgtaactatgttgtaaattgtgtactagaaagtaccgtaaagtcccttgcacggactgaaggacaaaatgtaccttcctaagtagcttgatgcagcatttaatttgtccattttcgagattcctattagccttcctaacaagactgtagtatggaagaatgctgatcacgatataaaacttttggaaaccttttgggaagaatgattgaaccatgggtaggattgtgtggaggcgggggtggggggctggtctggaatggcttaaaggggagtgtgtagggatccttgaaaatgtttgcattggctgtggacacagcagaggattgattcattatgggatgaaatgccagtgctgttgagagtaagagcgtgcacccagcccagctaaaaagaagggcttgagtatgtgttcacgtggagcacacagaacgcatgagtgatttgctagaagttgagatgacaccagactgaaaagatttccaaacaaactttaacgggcaagaagttccacacagggtttttccctttttctccttctgataaagtgtactcttgattgcaaacactagtataaacacacacaaaagtttgtgaataaaattccttttggaaatggtgtgatatggggaggaggcgactgagagaggaagggcagggggaaggtgaggcgttagagaactataagccacagcctggtgggaccacctgcctttggtggagaggtggagagggctcccgccgggctgcgctgggtctcctgggcctctctacctgcgagtgttaataaactctgtggggttttttttcctcctgtgattcctctcccttcaggcttactgctgccctgggacccctccctttccccttccccaaagggcaagttctcccctggggagagaggcacagccagggtgcctaggcactgcctgccctgggtcaccagggttggtcctggggcgggagacaggtggatccctgaattttgtggtcagaacgcgggagtgcagactcccatgtttggagctccccaatgtgctccactttaaaatccatgcctcttttttccctgcacacacgccaagaatccttttaatataaatagtatctccatatgaacaacctaacccctagtttcttccttgaatccttaasggaaaagaatggggacagttttcttttgagttgggaggggacagaatctttgcctcccgctttccctactctgttggaaaatctgctcccaccaccacgttgtaggaagatcctgtgttcttgcaaacagtgtcagtggatgtgacattttaccgaattttttaagaatagaggcttaataattcactgcaggttagttcattttaatcctagaccaaatctcccctaagcaatgttaattgctttaaattttatgcaagtgcctctcatttttatcatcttaaaatccgctctagaatgaattgagtaagcctaaattcccttgttgggaaagatgtttggtggttttaattgtgctctgattttttttctttcagtgaacaatttgcacatttcattgcatcttagcacaaaatacaaattcttcattcacagggagggatgtgcttgtaagctagacattgatttaggataataaagtttactatttagaaaagatgtaagaaggggcatataaaatccctatagaatgtataattgatggtcctttatccagttcttaccttactgttttatgtatccgagaacaacttcccatctccccctctatgctcagtccttagaaaagaaaaagagagagagagacatccccaggttaaatcagtttatgcactattttcagcttttttcgtaagaaggtgacagattatttcgtttccaaatatttctaacgattttctgctcaagtgtaagataatggagcaaagagtttgtaggaatggctaagggacggtgggggatggggaaggcgtttttgataaacggtttgttgcttacggraggggaacagtgttttctgctgactctccaggccgagattcccaccccctcccccccgctttttttcttgtctttctttcttgtctttccttctttgtttctttctttctttttcttttctttctttcttttttcttttttttcttaaggcaggtctggtttggacgactttgttttgtctcccagtattgaaggcttttactctggacttgaatcctcgcctttggtttttgttcagaggaaagcgttcctctcccctgcgcaggatcgctctgtttctcagtaaacatgacgagggggtttagcactttttaagtacatataagctggtgactctagaagggtacagatttggagaatgcctgcgccggtcctattcttttttcctggggtttctggattttagtcttttaagtggatcctcccgtcggattactagaatcctgcgctcactgcatgcacacagtttcaattaaagggggggtgggggtacaaggagggtctccaaatgcgcgaatccttcccagtgtgtctttcttgtctttctgtggctccctggcccttccgcccctgctccccrtcccgagccccgcattcgctttgcgcctgctgcgcttgaacttgtttctggtggagcggaaggcgcgagctgcggaccctcacgcagaggtaaggactcaggcgggtcccgggctgtggagggtcctcaccagccgcgggggcgaagccgcgtcaaagcagggatcccggtggaggtgggggtccgcgaaccggaggcagggagaccaaggagacagcgcggcgcgaggagccacccgagccgccgcgggctcctgccgtcagccagcctaagcctccttcaccgacgacgcagacaatttagaagacggcggggcgggagagcgggggtgagaaatgggggtgcctgcgaggccaaggtcacggtcaagccgccggcgggccctgtctgtcggccactgcgctccggcgcgccgagtgcacgggactcggagagaacttgtccacccaggcggagctgcgcggccggcgctgggacgaagggcgcggactgggcscgcctgccggggcccccgcccgacccggagaggccgaggtcacggtcgcaggcctgaggaatctcaactccaccgcggcgccgggcctgcgcggtcccggcccgcccgggagttggggtcaatgaatcccctctccgtggtggcggtggggatgccgtaggactgcacggctggagctgagggctgcagcgggcacttctgagggagagggagttcgatggacggagcctggacgggcacgcgggccccgcgcgtctgctgccaccgctccagcgcttgcccttgcgaataaccacgatgtttggtgtggtttttcaagcaaaggcccctggcaaactcaagcagccgctggctggctgcagccgccccagctcccagcagagccccactcccccctcccaaacttggcctctgctaacccggtccagcgcgtgtgcgcgctccccaggctgctccggtgtgcgtcctgctccatctctccacctcttcccaggaagcggcaaaccacmgcctggggcggggagagrgggggttgcattttccccttgcagagccccccagggcgcgcccatcccgaggtggggaggactgccgtcgcagaggggctggccgcccgggtgtccccccaaggcggggtctccctgcagaggagcggctactgcctttgggactgtggagacaccagggggacaaactgggagggatgaagggcgtgggaagggttaatcgtgggcaaaggattgcacagaacacaactggcagtgggtcggctcctgtccccccacttccagagcaaaccctrccgtcacttccacccccacgggcacctttcctggagtttgctttacagcctaaggcagaggcactgagacgggctccagctggctctgccctgggctgctgctgtgaagtccagaagcaagctcccagggaagtgggccctttttaaaacgccaggccttgagaattatgtaaatttaaaggaaagatggcaggttctttcccttctctaaaaatagaatgtaggaaaaaaaaaatagaacgtaggcatcttgatattaaattccaaataagaaaccagcaaaactcatcttcccccttctcatgattgtgtatcttccacgggtatggaattgtgtggggtgttattgaggctgtgtggtgtgctggcgtctgaatgcagcttgacrtaacagaaagcagttgctccctgcgttcttatttctacaatatacagagacttttctgtcctgtagatacatgggggatgatcataagtgagcttttataagcgcagagtattacctatatcaccgtgaaagtgtatcgcatacaggacagttttggcttattaagttaaattaaaagtgaattccttttaaatgacctgcttaacggctttcctcctccaccagttactattaccttttcattctattacaggtggaaatgacatttttagggtcttccattatgtgtctaagccaccttctgacattcttagtagatggcttttttcctcctatgtatcaggatatttttgttaggaggtatactgagatgaaaaaagctgggaaaaatactggcctcgcaattaaattgactccggataccaagatgaaaataatcatctggtattaatcaagttatgtctctgcttcttgttgaggaaaaatatagtaacgatttgctttccttttcatttgaaaaggactgtgaaatgttgaatgtttcataaaaatcgctctacccaatttttgttcaattaatcaaaatgcgtattttcacactggatgtagttacatcagaaagaaaatttgcgacagccactctaacagtgcttcaaacaacccctgcaggaacatgtagcaaccagtgaccttgcacattccatcaatctttaataatatcattgtcattactcttattatcttaagtgttaaattgttgccagaatcaatacaagtctacttctttgaatatattttatcccagtgttgtttttaacatctttgttaagaggccaattaatttccaactcacagctccagtgaagtttatatataatgaggatttcctgactctttttcttttttccttcttttcttttttttttttttgcttatttctacttttgaaagaagacaaataaatggcatgtgaaaatgtgaaacaaacaacttgccatttaaaatgatatgaaattatttctaaactgatgaaaggaaaaaatatgccaaaaactgagacaaagcacattgaactaatacttgtttaatttctttttttatctgagcagcaggactaaktttctcaaattcgatcagattgtatagcttagcaacccctccagggtcgccagaactagaggaatttctctaagcagaatctaaatgcctaacaaaaaacccatcgtaacatatttgtttgtttgttttcttttagatttgttggtgttaaygcatctgacatcaactattcagcaggccgctatgacccctcagttaagcctccctttgacataggtttcgaaggcattggggaggtggtggccctaggcctctctgctagtgccagatacacagttggccaagctgtggcttacatggcacctggttcttttgctgagtacacagttgtgcctgccagcattgcaactccagtgccctcagtgaaacccgagtatcttaccctgctggtaagtggcaccaccgcatacatcagcctgaaagagctcggaggactgtcggaagggaaaaaagttttggtgacagcagcagctgggggaacgggccagtttgccatgcagctttcaaagaargcaaagtgccatgtaattggaacctgctcttctgatgaaaagtctgcttttctgaaatctcttggctgtgatcgtcctatcaactataaaactgaacccgtaggtaccgtccttaagcaggagtaccctgaaggtgtcgatgtggtctatgaatctgttgggggagccatgtttgacttggctgtagacgccctggctacgaaagggcgcttgatagtaatagggtttatctctggctaccaaactcctactggcctttcgcctgtgaaagcaggaacattgccagccaaactgctcaagaaatctgccagcgtacagggcttcttcctgaaccattacctttctaagtatcaagcagccatgagccacttgctcgagatgtktgtgagcggagacctkgtttgtgaggtggaccttggagatctgtctccagagggcaggtttactggcctggagtccatattccgtgctgtcaattatatgtacatgggaaaaaacactggaaaaattktagttgaattacctcactctgtcaacagtaagctgtaaaaacagaacaatgacataartcaagggagaaagaaaatgggcactttatgtctcagaattactcaaatcaatttatttttagttggtaatggatataatatttcttaaaacaaaagtaaggtgttaatgaataggtctctccttctcctcctcctcctcctcttcccttgggggaaaaaaaaaaatgtgctaataaaacttccctccatggctaagagggaaaacgcttacattcaattctttagtcatggatggtctcgttccagatgttattgttccagggaactaaattcattcctgatgccagatctgatcgagtcagtatgtcttcagcttgatcagattttaaaatcagttttgaaagtggttcccgacttctttgctttgggagaatttggtcttatgctcataagcagttcatgagtgacaagtgtagcaaaagccagccatatattttcagaatctatatcctcaggaaatggtcctttttttttctataaatcaccaaccaactatctaaatggacatttgggggaattccctcccaaatttgattttgttattagaaaaatgattccgtgaacacagatgtgttttgaagaagtagcacgtaatggcttttatctaccatcaacctgataaggcacatgtgaaatggaaatgttctctttcctctgaagcagcaaattaatgttgaaaacttacatagacagaaagtaggttttggaaagggaaaccacagagattagggggacttaaaattaatataggcacaggaaagagaaaagtgtgcgctccattctcagtgggggttcaccacaaaacacgggccccaggagggaagcgctgtctaggcacacggcaaggccttagtaacagcatgctacactgctcgaggtacrgtatgtcccatcgccctgtgcaccgtagagacctcagtcatctcaaggaagaatacatttgcttctccttagaggcgttcgaactagaagctatgcgttacctctgattctggaaacagaatagcagccactcattctgcattcccatttttctctccacgtgttctggtggaatgagatgctccttggcactatagcctgatgtcccacattgacccactgaccacacaggaaaagcagcgaaacctgcaccctctcttctgagtcacgcctgtggctcatcggcttccctcttaacctttagtgccctgaagactgctgccgctgtcaccgttgcgctgaaaccccatgggcccgttctgattgaaggtgaagcccaccagattatttttcaaagtcttaggtttcggtgtatctaacctgctcagtaaatatggacgcaattaaagatgctctaggaaatttggggactgtatttaatttttctttccttccatctgaggagcraggaaatcctactgctgaatagctgttagtatctattttacaagatttactcattttcaggtacctaatgtagctgctagcatgcatgcacaacaatacaatttatatggtaaatggaaccaaataatggcttcactgaatgttatggctgcactgaagggaaatgtcacggtaaatagctgccaaattatggatcatgccgaagtgtcacaactgcactaaagacaaatagcactagaggctattgccactgtgacgcttttgagttatgaagaagggtagcggcctgatgcgaggctctttgtgtcctcattatagcaaagggttactggtgcaggggactaggaaaaacccgtccagtgtggtgcttagttattcatccatccctttcagacctaacagccacagccacayggaaagagactttgcctcacttttacattcacaaacaaacaaaggaggggggagcaggttttatgaatgtaactgtgcacaggaaatgactggtaatggaaaaaatgttgtaataaaataatctaatcaaagaatattattaaatttaacatagtctatgtccaaaaggcttagttgcttcttatgcagatagatgtgtgaaatctaagcagtaatgtactttctccctttgtaaagacttggggagtaaggacattaccaactaaattgcttcttcgaaactgaagtgagtcccggtttgtttcattttaatgggagggtaataaagatgaaagaccaacattttaactgatggatcccttaagctacagaatagaaatttattgtgttttgagggaatatactaaatgcagctatgtaaaaataaaattcaaacgcccaggattaaaataaaatataatctgaaaacctcatgttctctctttccccaaactaagaaagtgcactgcatgctgttttcacttattcttagaaaacaagcatgaaagattcckcccattcagataatgccaaaaatatgtttaaacttttttttattcttttgaaaaatgatttgtaaattgagggtcatagttcagcatcagtttcatcttctgggattattgttcaagaccagcctctaatgggaggtgaaacggtacgatggtctcaacacctttcttctgaactgtaatacatatcacaaaaagtacatccataattcagggcaattgtcagtctttttagagaaggggccagggtggaacaatcccagtgagtaaattatttctcagcgtggacttctctgcatgtcgggcttarggtcaccagccgggcagggtggaaggagcttgcctctttgagaaaccaaggagtcccagtgatctgttaccatttggttatgacttctaaagagccaaatgctattccttcaagcctgttttgcaggcagaaaataccakcagtgtcatttaggggttcctttgatgatgactactgctgttaactgacctcagcattaaaaaaaaaaaaattcagggaatagtttgcaaagaaatgaaggaagttttgcatgatatattctataacttgtcattatatgatttcatctggatgaagttcctcaggagtaggatagagcctctgtaaatggtcattagtattacattctgtgtttatctaatgaaagtgcagtgacaagtagctgcttcttattaaaatgaaaatcctgcattatgtacttgaggaacattccagctaatgaggatgtaatgtcctcagtacaacrcagaccttctttttgtgttcaccaccacaagatgctggaagcttgacaaatgatatcatttaagacacatgcctgccttagggacctggtttttggcttcctgtttctggcttttatttgggtaacgtttataatggccacccgacttgtacctgggtaatgttttaaccccttccccagagttctcaattagcatgaatttactacagtcagagtttcctttaaattggggtgggggtgctaagcactgaaaatatctttcttgattactttaccatgtggacatatgggataaatactgtatttcagatttacataaaagtagattagtaatgcacagctttcagaataaaaacaatgataaaaaagaccaagcactatcaactttggacagtaatttcctaggtgttaaacaagttttctgaatrcaatctggatgcaaaacggcctgatttgatgaattcataattttcttctgtatactttcattttattaaatattttattacttggttaaacacaagaattatctatgtaaacttcatgggcttttttgttgaaagttagatgttcagtaactaatttcccagttatggcccagaattaaacatttatgatcatatttcagaagtcaaaatacaaaactggattatcaaaacggttggtgtggtcactttaaactggactatcagtatggttgccgtggtcactttaagckggattatcagtacggttggtgtggtcactttggtttatcatcaatacagttggtgtggtcactttaaactggattaccaatatggttggtgtggtcgctttaaagtttgttttcattttttttctatttttaawtcttacgggtatatagaaggtgtatatatttatggggtacatgagatgtcttgaaacaggcatgcaatgtgaaataaataagcacatcatggagaatggggtgtctacctcctcaagcatttatccattgagttgcaaacaatccagctacactcagttatttaaaaatgtacagttattattgcttatagtcaccctgtttgctatcaaatagtaggtcttactctatttttttcattttaaactttgaattttatttttcctaggcttatagcatcatgctatcccccttgtaaaaggaggaatgcttggcatgagaaccttactgctgttaccatgaacaaactatggaatgttggcaaaagaaaaaaaaaagttacacaaaacacacaaataacattttaataatatgtatcagatcaagtgattcttagtagtagttgatattcacaggaagtcaaaaaaggacctatttcaattatgtctgcttgaatcctgtttaattgtttccctggctgagtagctagtgtgacacagcagcaagactaaaggggctctgtggtccacattgtcctcgagtctattcttgcccattatagacctgcccattggtgctcactcactgcatcccaggaggcttgactgtcctcaggaagcatgttggggtgcccttaagggtaagtatcccggggagcacagtttggagaaaaccaatacgtcttcatgtatgttgagaagcgctgggccaaagtacagactttttttttttttttttttttttttgggacaagacctcggctctgtcacccaggctggagtgcagtggtgcaatcatggttgattgcaacctcaacctccctggttcaagccatcctcccacctcagtctcctgagtagctgggactacaggtgcacatcaccatgcccggctaatttttttgtatttttttactagagatgaggttctactatgtagcccaggctgctctggaactcctgggctcaagcaatcctcccacctcggcctcccaaagtgctgggattgcaggcatgagccaccatactggcctaagtgcagaaatttgaacatgtgcctccaccccaagccaaaatttcccttgaggagcactatctatctgatgatgtctttgaaacggtatgaaattaaaataattaaaacatcctgcacataggtggtagcatctaatatgaaagatggatttatgcttagagctcagaaaaatcctcataaaattattgtgtcttatcctcggcacctaaagaactgaacagggtcttagaatgatcaaatggatggtttgtttggttggtgggagatgttgaaacgtgggtaaggaatggtgtccttagaagagaggttgccctagatgccgaaaccctggaggtccatggttgccagcagaaacttacagctgggaggagcctgcacccatctctggctcttgtgaatgagaagactcaatttgtgtttttgtttttttgagaaagggtcttgctctgtcacccagactgaagtacagtagcgtgatctcagttcactgcagccttgacctcctgggcccaagcgatcctcccacctcagcctcctgagtagttaagacttcaggtatgcattaccatgcctggctaatgtttttttattttttgtagagacaaggtctccctcgttgcccaggctggtctcaaactcttgggctcaagcgactttcctgcctcggccatccaaagtgctgggattacaggcataagccaccgcaacatgccccagttgcttttaaactgttaaatgtgggatttaaagaataatctagttctacccattttatgaatgaagaaaagaaactgggacccagagagaaaaggtgcccggtccaaggttacagagcccgttggactcagaagtgaagctggaacactggccaatgccctcccatccgccaggtgacttctctgcagtcccctttaccatctgcccgggtcctttgggatacggctgactaggggtttgaagaacagcaattggcctttgttatgaatctttttgtggagataaacccagtagaagtatcacggttctgaccatgaaagtgtgttcaactctaatccagcacaattaggattccagatcatttgattctgtgtcgtctaaatatcacagaaagttaaaaacaaattagcctcaatggaattaatggcttaatatccataatttagttttaatgctaggaggaagggctcctgtgaatgtgttcttacaaatcaaataaagaaaatcaaatagagaaaatcatgtgtagagcgttcattctctagaaggatttcacctacatgtttttgcctatagaaagctgataatgtttgactatcataatctttgccttcatagcagaatatctagaatttgaatttgctcttctgcccaaaatcaaattctgaatcctgtagactcagctccttgggggatgaattcactcattgatggcaggaagtattttaaggtgaaggggatatgtgtggggaagacatcagtgggtccacgtttcatgctcacatgtggcaagaaccctatattctgtataaatgacagatcataattaagggtcagaaacaagcccttcaaaaccacatgacattgaacatccatgtctttccacatcgtttctgtcttcccttgaactcatgcataacaagcgtaaactttcaactttacatgaacaaatcccttcccaatagaaacagcttcttttaacattgaaaaaccacttcacaggaacggcaacaatgtcaaaggcaatcacattttgtagaaaacctcatttctcaccaggggactggtagcgatagtgttccctctatatgttgttggaatttacatttggaaattgaattgtcyccttgagggtttttactcaaagtaacttggagaattgcttgtggaatgagggccagttgaaggagccccggcatcaagtcaactgtagagaatgctcattctccagcagcaggaaaattaaaatgccaccattatcagtattggagaatatttgtcctttcaacttgtacatatactttttgtaacattttagaacttatttgcgcatttgacgtatttgattgcaattttgctgttttcacttctttactgttaattgggtagagatgaatgattcccactagagaaggaaaaattaaagcacagaaaaatgacttgcccaagatcacttatcactggttgagcagagcctgagtccgtggatagttctcagaccaaggctgtccttcactagagaggggtgcttcctacccgctaacatccgtatgagtcacctgttcaaatactggtcccaattcaggaggtacaggggacctgggagtcaacattttccaggtgacccccccccaavasacacacacacacacacacacacacacacacacacamgcacacatgctgctggtggtaaggtcctggattattacgctgcctttggagagattcccatcttgcaaaatgctacttcatcaggcatttcagagcaacgcaaaggctacctggatatgaattgcaacaccagggcttaacacaactatgaagatggttcctttttatcatcacacgttcagcttcgttaagggaacctgctttctgaaactcagctgtggcacctgattgtatgtctgatattcggagggctctggtggcagttgttttcatacagttctaaacagggcaggaagtaagtccagaaaggtaataggagtggcctgcagtgggccccagacctccaccttcactgcctttcagatcaaggcagggctcgaaaggacctaaactccttggtgtttcccttatgcttttctagtcgaattctttgtcatgcccgtgttctcccccctggtctggggtcaccagttaaacctcactcttttagctggagtggtcagtaaaactcctagcaggcctttggggggtccgctgtcactgggcttatgtcgtcattagcaagatactaaacaattatcctgatgaaggggagaaacatcccatttatatcacctttgaatcgggtcacttggaacaagcgatgcggcgacacatgtagcatttatttaaagattggcccatagaaattatagtaatgtaagaggcagtagccttcataagggaaacgttataaaccatacaaatgcttcgtaaatacatcactgtagccattggaataacacctgtctgtctaggacaaatgcaataaaacatcttgttatcaaaaaggaagccaattgagctgtagataaaatctagttttaggaatttgcagatagccctggatgcccaggcagggagccagcgtctgtcctgggcactcacatagtgctctgtggaaattgggcaggcccccacgccatgcccctgagcacctgaccttcatcctttgtttggggttccgactgtggtcagcacagcacagtctcctgggaacacgtagccaggcttgatgtgctttttctgcatgtgccacaacccacaggagaggccacggagccgagcaggaggttctggggagatgcctgtgagcagcggcagcaggagaataagcacttccacttaggcactccccagagtccagcacagactggaggcagaacaaggaaggactggaggcggccggtgatgacctcagaaaattaggggcagcagggcaggtaggagccagggtggggagaatgggagtagaaagcttttggaaagctgggctgagctgggctggggacaggaaggctggacctcttgtgcatgtcagcttcttggggcctttgtagaccatacatgagatctgaggagccctggggtctctggctgccaggtgggacctttgctttgaccagcaaatcttaaaaagatgtggctatcatttaataatgggactggtgggtgacagtataggcagtttgtcacttgcctaacttcagtgagtttattttcataactttcccagtcctgtggaggcaaatatcttctcactgctgggttccacaagcacttcattcagatctcatctctaacactttctgcagtgtctccctggagactgcgggctccttgaaggcaggacccatctcacctcactgtcatctctgtattcccgggactttactgtggggttggagcatagtacctgctgataagtgttagattaaggtatgcttttcactttcattttaaaatggaacaaaagtccacacccagtgcctcacaagtgtatactattgcaggatttcaggacaggcactccagttttttccagttgtaaatgagaccctagagagctggtgctggttcctttcagtcccacaccacagcctcaggcaaatcacgggccttcactgcctgaggctgctcacctggaaaaccaggtgaaccgatctgtgcaactgggaaggcgaaagaagatggatagcacaggtctcgggtgtccacctgatggtgcaaacaaatacatatttgattcttcagaccagtttgaatgttctgttgccagcaaacccatgtgcttccttagcactgcccagaataaacccaagtgctggatttttcaaaagtctcagtagtgcctaatacttgggcattggaattggagtctctggactattctgaccctcatgtgtcagagaaggttgtactggaactgaagagggtcccaagaagtacccagtggttagtaggctgccaatatgccagatgaatgattcagcaagtgaacagaacactgaatactaaacccttggaaagataagaaggactatcaaagataaactagaccaactttcatccttccactaagagtctctttaggattctgcccatcgtgcctggctcacatgtgaggaccccgttccaaatggacaagggtgctgtctggggagactccactgggtgatgggacttgtgtcttgcctgcatgtgcctgcaagtcagactggcctaagctcaaa

SEQ ID NO: 93215 - DNA, 17288 bp, Homo sapiens
ctttggtccactggagaagtaaacatataatatctgctcataagctaaataaatgctttgaagtgttattatatttaggaaattagtaatcgtttaggagcaccagaaccatttgtggttttgtctgttgttgggtgatagtttttttttgttttttgttttttttgtttttttttgcgatggagtctggctctgtcgccaggctggagtgcagtggcgtgatctcggctcagtgcaaccgcygcctcccgggttcaagtgattcttctgactcagcctcctgagtagctgggactacaagcgcctgccaccatgcccagctaatttttgtgtttttagtagagacgaggtttcaccatgttggccaggatggtctcaaactcttgacttcgtgatccgcccaccttggcctcccaaagtgctgggattacaggtgtgagccaccgcgcccggccgggtgatagttttttaagccaagaatcactgcataggagtcatacttctaaaaaaaaatctatctaaaacctcttacatcttcgttatccataatattgtgatcatgggaatttagttatcagaacaagggcagaatagcagagactgagaagggagatgttctgttccaaaagcaagccaaacccatgttgaggtacaccctgtgctttttttagtcactcttctcatagtactttggttttcaacaattgcttttcatagtgtcctttccaactgatctgttactgtttccacttgaatatagggaaagaggcctaggggttatgtgaacgcatcccgtgttcacattatatctgtaacagccaagaggagagcttgaggcaggcataatattgaaagggcttcctctgagcctcatcggggaacctcacaggtctctcaggcttcagggctgtagctcaagtctggccggatctcccatttgtctcttctttctgtagctggctgtagagccttgcctgcttctgactcctttctaaagttgctgccgcttactctagtttttaggagttttactttgaggcaggtaagacatactttccctagttgctctcccagaggtcagattcatttcattttgattctagttaaggggaggagtgcaaattttaaaaaagggagagagagaggtgttacagattatgaaatcttatacatttttatataataacatcttaatctctaacattggttctcaaacttggtagatatcagaatcatctagagggcttgttaagacagatttctgggttctgctctcaaagttgctgattaagtagttttggggtgaggcttgaggatttgcctttttttttttttttgagatggagtcttactctgttgcccaggctggagtgcagtggcgcgatctcggctcactgcaacctccgtctcctgggttcaaccaattctcctgcctcagcctcctgagtagctgggattacaggcatgcgccaccacgcccagctaatttttgtatgtttagtagagacagggttttgccatgttggccaggcttgtcttgaattcctgacctcagatgatccgcctgcctcagcctcactaaaggcgtgagccaccacgcccggccgaagatttgcttttttaacacattctcctctgtctctggagcactcaatcttctttgcacacagtatagccctgaattattttattattgttttgtatgttgattttgaatccctttttctagtttcttcacagaaaatataggatttaaatcctctggcatttatcctacttactgaacacatggtcagtacttggtattggttaacctattaaaatttttgccaagtaaactttttaatatttcatcctcccgtgtgcagtgttttttaaaaacttttttttcttttctaggtatttaatacaaggctgtttaaggtcaaagaaagacacttgtttcttacctatttaggaagagcacagtatgatccagcaaaacctaactacatctctttggacaaactagtatctattcctgatgaaatattttgtgaagagattgccaaagcatcagtacaggactttgaaaaattcttaaaaacgctttagatttttatgtatgttaaaatgcagtattgtaaagtgaatatatatatgaataaatgaatatatttttaaatgcctcgggtctcaactgatattggaaaccatttgatactgtaaatttgggtacatatactgtggtagaactttcatcaagttcctagtgacttaattcttgtttgactttttccttccttcttaggaaatacagcaagctcagagaaggggaaagagttggtttactttaagttggtgctttgtcattctcgtgaagatgaaaacagtggaggatttttaaagtggtttcattataaaatggctttatttcctttgaactgttacgagtttccagagcatactacattagtcatctaatatctactgctcagataatgctacaaaacacacttcattttggattatctacattgttaacttcttgaacacagatattcacagttggctaagaataaggaaaaggaaagtggagtttaaagattaggggcaatgagatatagtgaaaggcttaactagcctttgacttattaccagtaaacaaatatttgttttccatttacaacatgtgttatcctgggcaagtgatttcatttctgagcctttgcttttttatttgtaaaacgaagcatcatgacttcagttgtctgccttatgatcaccagattgggtagactgttaacactgggggcccccatgaaccatacctggtatttgcactcttgtgtagttagtcctctcccacactgactctgggccgatgtgatttggcccagaggacatttgtcaagcagaggcttaaggatttgcacatcagggcttgccctcttggaacatttgctcttggcaccctaagctactgtgtagagaggtctggttactctgctggagaaactaggtggacagaaagatgtctggccaaacccagctttttcagacatgccaactgagcaccagacatgcatgaagaaattatctgggatgtcccagacttagtagatactacactaagcagaacgacccagcggaattcagaattgggagaaagtgttttaagccgctaactttgggggtagtttgttgtgcacagggttctgtggtgtgctggatgccctttaaaaaacctcatgaaaaactaaatttgtaattggtcagggccaggtatagtggccttcctgttacatattttattcatgcaaccgacatttgagttctataatacagtggtgagtgtggcatagatatgtgctttcatggagttctccaatggatgagatcaataaacaggaaacaataaaaaataagctggggacaccatggaaccatcctgtcctctctttctgtggctcacaacctcattttgcctttatgaataacccagtgaacaaccttagcagtcagaataggcaagttgtgttgatacaatgaacaatcctaaaacctcaaatgattgaaaaaccacaaaagtttttatcttatacatgtttcttaggaccacaaaggctctgctccacatcatcttcagtgatacaggttgatgtatcctgtctccatcatttctggagtgttgccagtctatggaaaaggaaaggaatgtgaagaattgctcttaaaaagttatcacatttttcttggccaaagtatcacatggccatgcctaactttaatagggcagagaggcaatccctaatcctgtgctgggaggaaagaaaaccaaaaatagtttttgaatcaacaatcactaccagcaaacattcagtctctctagcttaattccttaggagctggattttgtgacaattttgggtttcagatcttttgatatgtcttttcttgccaccttcacctgtaaccagcaagctaaaacttaaagggtggaagggaggagagtttattgagtacctaccctctgcagggcaatgtgccaatgtacaaatgtactgcatttcttcacatctttcagacttcactttggctagtgtaagatagatcattcatcagctttagtgctgtatacaggactgactaatgaagaaattgtgacagcatggagatagaagaaaaaggaaaatcaatataattttagaactggaatgtgactaagatcgttaaatctaaccttttgaacttaggatgagacaaggttctactctatattgtcccagctctgagcttaaaactgaggggaaaaaaaagatatcactgagtaatggtagaagttcaccagtaactatcagtcatgctagctccccctaattgttttctgtctctagatgtttatgcctaagacttcgcatgttggggttgagaccttaaaagtgagaaaatctatatacttctcttttgtcttaaaattgtgtgcaaattctgcaatacatcttagatttaatctttaaaaaccttttctgctgggcatgatggctcacgcgggtaacccagcattttgggaggctgacgtgggtggatcacttgaggtcaagagtttgataccagcctggccaacacggtgaaaccccgtctctactaaaaatacaaaaattagcgggcatggtagtgtgtacacctgtagtcccagctactcaggaggctgaggcacgagtcatttgaacccaggaggcagaggttgcagtgagccgagattgtgccattcagcctgggtgacagaggctgaacaacaaaaaaaagggtgaaaaaaaacaaacaaaaaaaacccaaaaccttttctgacctaaccttccactaaaatagctagatatagatcttcagctggagaaacccaaggcctgaaaggcttggtgtctttcctggattagtagtgtagcagtatagcatatgaccctagaattaaggagccccaaatttgcatctggattttcagattctggaagaagaacctggactcttctagtcatgtgctcttggacaagttattcaacctttctgagcctcagctttctcctctctacaatgagataattacagtacttttagaattaaaagatagtttaggggagtgagagatcacctccaaccctccctcccctttgctcttatgtgggctctttggttgaatctaggaaccaaattgacacatggcagattaacaagagaaaagcatactaattttactagttttacatgtacatggggatccgcacaaaagagtgaagtggccaatgtaagatgcctttatactttttacacgaactacaaatcagaagaaaggggatctggctaggggcagtaaatttctcgcggagtcattaggagaaaagtgtgtgtgttggggtgtaaacttagtggaagataacggttacttcggaaagtatattcaggtccaaagcagcccccagtttcgtctctggtgataggtgctattttctccctctggtaagggacgggtactccagaggaatcctggaggaagctttatggcttgctgcatgcaggaagagataggtcatcaaaccttttctgaaactacaatttctccaatattttcaactcgaaataatcaatgtaccaattccatatatttttgggatggcacatccatcagtccttcaatagaaagtaagacgatgcccttaaaacatttagcttcctgcctggcacaaagagctgaattaatactgtccacgctcccatagctattaacagcaaataacagaacccagctttaagccttggtctcctaattcctgacctgtgttcttcccatcacatcacaaccaatacttcttagaatgtagcacgcaaaatgccccgcctactccattggcctcaccctggccgagaggtgcttacgcaggtgctgaacggcagtcgtcagaactgcgcctgcgcaagcgkcctttctctgttcgcgatgtgacgtaacgcgcctgcggactgggcccagcttgtcctctatgacttacccagaaggcaacgcttctctttctggtcaaaatggctggtaagcaggccggtaagtaactgggggtcttcttggccggcatcgtcgcgcttcaccgtttatttttgctgcagcttgctccgttttctctcttctttgtaagtggccaagtttgtcgcggaagggaaattggctgcttcagtccagtgaaaaggatgtgcttccccactcgtttgctgtccccagggcgggcttgcctgtatagggttgggatgttaacccgctgtttgtgaaggtgcccgcggtggctctgacagccctggagttccagctgcccgtgctyggaagtccttccccttggccttagaaaagttaaagggcacaagaggataactagtggatgactttcaacccgaatgagctcagtgctttctatgacccaagtgctctatcgtgtgcattggccctataaattttcttgccattgcgacgagggagatattaatttcccttttacgctgataagataactgaggcaaagtgacccaaggaagtagaattggaaatatcattgcacccctcgcgcttctcaaactgcgaatcagagacagttgagcaagggatacgagcgacgcttcaggttgaccttggattatctagagcgtcagcttgatcagtaggtttggagaaatttgaatttattgtaggttctttttttcttttttctttctttttttttttttttgctaatctctgccctctggcggtacaagttggagtagccgttttgtttgtttgtttgttttgtctttgagacggagtcttgctttgtckcccaggctggagtgcaatggcacaatctcgtctcactgcaatgcaaccaagttggagtagcttaaaaaatgttgatccttttctccccgcccccagcaattgtgaagctgttaggaaacatcaggttgccagaaacatccgttaacctaattgacattgagctttttgggggtgggggagactttttaaataattattttattaatttggcagatattgaaggagtcttactaaattcaagacactgcttctgtgcgtgtttgggaactacatagaccagatctcaactcccattagctaactctgaccttgggtgggatcacttctgtaagccagcttccccttctgtagtaacagacatgtaaataaatcagctaatgttggtaaagcaaataggaaagtgtttggtgcacaataagtgcttagtgaatattattatagtcactgataggtggttgaatataatctgtcttccacaagtatgtttgtagattgttgactgatacttgtttttctagcagcagttttatacatgactcttaatttccaaggagatttgctaaagccacgtaatctgtagtgcactgagtttgcaagcaaggagagttgagtgaaaggagagtttgctttccttccttggtaagggctaaccctagacaaaattttaaaagagaatacaaacctgttctacctctccttttgtaaaatgtctctcctaaaatgtcagatacggtcctgctgtacttggaccctgctgggttacttcatcaggctcagccctgttccccaaacagttttaaaattacctatttctcatcctttttcaatatccattcccttggggggaacttagttgcttaggaggaggtaaatggacttcttttacgaatccatattaatgtttaaatgactaatggtatcaaaatcctccccaaaatacatacatttttaaagaatgtggccaaatgaaataactgtaatatcgagtaaaaattttagaggatgagggtcatttagacctgccagtctatgctgaaatctcactgtcttttccctacaactccagctctcttgaaatgaaaagtttacaattatttcctgtgatctatttatgaaactacaaatgatggaaatttccaagtccttttcctatctcccaccccttcatttctgaaggtaacagggcaggcataagggcacacgatgtacctatggatcttttgtacattcagtgtttgagtttacccttttctttcatgacttgccaccattttcctgcaaccacttttgctcataaataaaataagcactttttaycaacattttatagagtataaacttttttcttttaaatctaattcttttgattaaattcttgctgtatatactatatacttttaaaaggaaatttatttctatgtttgcattcatcagcaagataactgagtactggttgcttgcctatcaatgtgttcatatagtataattaaattgtagcaattaacagtgtgacaattatcagtttcagcatcaggcaagtggctggatggtattcgaaaatggtattacaatgctgcaggattcaataaacygggtaagcagctgtgctgtttaatgttttttgttgttrttgttgtttctttgtttttttttttgtttttctgagagtattgcttttgcaagtgttactgtggttccaaaaaccatttcagttcttgtatacatcagaagattttaaaattaaatcacattatgttaaatccagttcctttttaaagtttttttgagagaagagggatgaaagcctctaaaatgttcgacttggtaatgatttaagtagtaagacattttccttctacaccccctttcccaactcttccacttaaaattttatttatttatttatttatttatttgagacagagtcttgctctgtcaccaggctggagtgcagtggcgcaatcacggttcactgcaacctccgcctcccgagttcaagtgattctcctgcctcagcctcctgagtagctgggattacaggcgtgtgccaccacgcctggctaattttttttgtatgtagtagagacggggtttcaccatattaggctggtcgcaaactcctgacctcaggtgatccacctgcctcggcctcccaaagtgctgggattataggtgtgcactactgcgcccggccttccacttaaaattttaatttaaattatataaacattgaaagtagagagtttttgaatattaaaattttatcacgtccatgcaatcatatgattcctaagcttttttagaactttgtaatttaccatgaacttcatcttttactattgaagcttgaagaaagtgtaagcaaaagtcactgttccttagtatactatcattttaagattctttaataccttgatctcagatttaaactatgagaaaaaagagatgtggtttattaatgtgtgtttaaaaacaaagtaaacatttaaaatattttgtaaatggtttagataaaatatgaattttgtggcattggattttaagaggctcatatattgtttccatagtctagttcaagaagtaacccattatatcaagtaataactcattacttttaatggcaaaactgcaattacttttgcaccaacctataatgtatgaaatgcattgaatttccattgaacctagtgatttgaattcgatagttcaccaaaagttgtaagttataagtcataaaggtattttactaatttaaaaaaaccgcgatttttgagatgcatgtgcaatctaactttgtcatctatcatagggttaatgcgagatgatacaatatacgaggatgaagatgtaaaagaagccataagaagacttcctgagaacctttataatgacaggatgtttcgcattaagagggcactggaccygaacttgaagcatcagatcttgcctaaagagcagtggaccaaatatgaagaggtagcacagctttatctacctgacagtgttgctcattaaggatggagttttagaaacaagagaaacatgttcatttgcatagtgttagagttctctgagtcatgtcaaataaatatgtgaggttaataaagcaaatgttatttccgttttagaagaaaaccacattgagtcttacgtgtgaaatgattcttctgaaattactaagcaagtctctaatatagagagccaggactaaaatccaggtctgttgcctcccaggtctttgctgttccagctctgcaytctgcttcctacttagatgaaaagatcagcccattgagtgtccctccagatcccaagaagagcttctgtgaagcaaactctcaccycttgaactgcattgaaactaggcaaaggcctgtggacattcatttctttttcttcccgaaaagacttccccctcataacctatcaaagcaacttatcacaccatcaccacagatttgacattttaaaaagcagatagttcttaggttgagaatatgttttctaaaattggaaattcaaaagtaattgcttttttcttgttattgaagacctgttgagtgtttgggatatatcagtacgtgatggtaacatataatatttcattcattctttaggaaaatttctaccttgaaccrtatctgaaagaggttattcgggaaagaaaagaaagagaagaatgggcaaagaagtaatcatgtagttgaagtctgtggatgcagctgttatgaagatggttaaacttgaaacaaacaattttaagaattatttggtctgaagatgttttactttaaataaatgtctattgtaatggctggagtttttgaattccaaaccttatactgaataactactgaatccctttactgttaaatttttttccaaactttcaagatatatttagttgtgtttaactgctacttggagctcagaagccactttatcagttttcctcactggttggatagcctatcagtttatggaaggatataacttccgtaagttacatccttatggaagctactgaataaaagaagggggtatgcaccccctagtttgccaagattgagaaatagcctcttcactggtatgcaaacagatttgattttgcatcctatcatttaaaaaraaattatgtctgcaccccaacataggcatacttaagtaatatacatactcctgtgctaacatgtatactagaaaacaaaaagatgttagaaaaataaaagtataaagacaaatcatactgtccccatatcccagtgacttttccactttggaaatgattgttatgaagtttaagggttggatactagtcagttaaaagttttaagattatagggtaatttttaaaaatataaattagaatcattggcaaggcatggtggctcatgcctgtaatcccagcactttgggaggccgaggcgggcgggtcacctgaagtcaggaatttgagaccagcctggccaacatggtgaaaccctgtctctactaaaaatacaaaaaattagctaggcgtgatggtaggcacctgtaatcccagctactcgggaggctgagggaggagaattgcttgaccccaggaggtggaggttgcagtgagcctagatcacaccactgcacttcagcctgagcgacattgactgtctcaaaaaaaaaattaggattattcaatgttgtcatcatttccactcctaaattctgaaatgctttctttggtagaggtgagagtgtggagccacagctagtagagaaggaacagtaggacctgcagcctccctggttttccaggacaagtcattgctgtgtgtggcaggaatgccttacctcaaataacaaaacagtgtgaaaaatgaatttgtgttacatttaaagtttgtaaagcaatgagaaatgtgtgtatcataaagagcatctttaaatttttgctaaaatattagcctcttaaattctctaggaaccccctcccccgcttttttttttcctttcgctggtcgttatttttctaaacctatcctgaaatcatgtcaattttcttttgtatggttgaagacaactagatcacttgataatggttttgctcaggtcacattgtgacaaggttttaatgtagtcctactttgcagaaggaggccaagaagatgggctgtctagaaccccctttaaaagcatttgtctattcagaaaattttcctgagtagatctctgcaaaggctcttttaatagtgatttcaagatcacgtttgcaggactctggtctattcgttcagacgtctactgtgcacaattacaaggagactacaactgaggcatctcaaagagcactgtcaaggtgtgtagggagccgggtgggtggagggaggctgggctctgaccctagaaaccatgcttatgaatgctgttaatgtttaaagcaagcctaagggcactgctgaaggacaggggaacaaatagaactgaccaagactgaggtataacaggaacccccaggctatccacctgctcaaggtaaagtgtggtattacataaggcaacctctgattttgtaagagttcttcctaaagccaaagtgtatgcctattctatgtttccagattacttcattcttctaaatgagaacaagtgtgcaaaagttctttgaacactagatcaatgttttgtgttcattataaattatggttatcgtcctgcttgttatgaagactaagaaagtagatctagtatttggctcacacaggtgaatgggtgagaatttgttaatccatcagtgaagtcctttcatttgaaagagagggcctttctattatcaaaagccgtcctgtgtggaaaatcaccatgagagtgcctgaaacacaggcactctgcattgtcctgtagaccaaatctacattgtcctgtagtctggtctacattgtcctgtagaccgaatggtagagtgattcagagctaattctgggttagactgcacaggtctgaatctatttgctcactgtgtagtgctttaggaatacaatttaacctctccgtgcttcagtttgtttgtccctaagatagagctaatgatagaaacctacttcacccagttgtgaaaattaactgactgcatgtcaagcactaacagtttctggcatatagtatgcataatgtaaattatgtgctgagaagcgagaaagaataacttgggaaaacgctgaatatcatcaatgtcgaatagctaaccagtagctaaggtccaaggtctcctctcttccttctatgtggcactcttgtttctggttcatctactccccttgggtgtcacctccttgagtgaagtacctgctggagatgagaagagtggaactggatctgcatgacagctttgattaggatggagctaagacttggctatctccctgttttgtgttttggatgggtgacattttaaaactgccaatattcaaatcctgctaatttgctttgtacagtttaaaatgtttgatatcttttgttgtttaaagtttgagattggttttgaatatacagttttcctacatcttgaagaaagttatgtttgtttactctgaagtggtctatgttctgtttgtttgttttactatactttgcaaaaaaacagatggctggcttatgttcactgttgtagtgcactacctagtatcacttggccttcctgttgtcaagatgtaggaagcagcgtaagggatgtcgggccttcagacccccaattgccagctgtggtcctagttccagattgcatggaaatatttgataacattcctgcactgagttatcatggtctgaatatttatgtgacgctctacgagtggtaccaaaatgttagtgatggagtttttactaatggcaccttttcctgtttttaaattctagaatcttaataaatccaaagtgtacattttggtagtgatttcatttagttatttactttaaggactcccttttcaagcattaactctgcactaattttgacttatgaaaagattcagcagtaagaataaaaactgggccaaagcccaaagtaataatccttcacaaataggatggagttttaaaaatatgggcatcctgtgtgtagctttgaaaataaccaaactacttggaattaaaaagttaggtgaacatgaagattgtcataaccaaatccttgacagcttgatggatgaagagcagatgggtttatggtgtatgggaggaagcatggattttaggagggacagtatcagagagggatggttagaaagtgagtaagacaggttgctctttggaaaacaaggaaaatccctttattagaacaaggcatgaaattctgccactaggtggcgatgccctataactttacaacttagtgtacatcacacgagcactatggaagatttctccattctgcgccccaccaactccctcccctccttcatttttcaggatgacaacaccttagaggtttatggccatcaggagaatttactactaagctatatactgatgtaatgaaatctaatatatgttgtgcaatgaattatgagatgttatttagtttcaggattttattacttcaatcagttatgaccatatttccttttatatgattgctcactctttaaacataccagatgactgtataaggaacacctaataaagtctatagatgttaaaatattttaaatgttttaatttatatgccataatttgtttacattctggttatactggcgttcatattaaaagccataacatgttagaatctgagatctcaggtcggatagtgcctctaagttatattttgctaagaaattttattgtattagcaattgagcaagaaagaagaactgaatcattatacggtggttaatttttagcatagatgtcagaaagcctgttaatattccagaggcttatgataaactatttaaattgtcattctggattctgattatatctcctacaaagaaagagtgtattatttattgaactttttgtttgaatacatgtgcctatttttgcataaatgtaaaaatgtaattttaaaataaacccctgaaaacttctggtaacattatccagttgaataattgttctgttagtattctaaatattttaagaaaattgtatacatatctgtgacaattgtattcacaagccaaaccaaaaaaagataattatttgttttacaaaggagtcagcttacaatttttctcttatgcatgcatttaaaatgtggtttgccattaaactggaaacactgatctgaggccaatgatttaggcaagtcattagtctaaagattggcttcctcagctagaaaatgaagggctttgactaaaaagtctttttcatttcagtaccaaaacattctgggtctgtgatttaacttacgctctttattgttgggatgaactaatactgatggaatactagctttgtactaggcactgttcgtatgttgtctcttttaatcctccctgcaaccttctggcatggctattataatgcccattgtatggaagaagaaattaggcttcgaaagtccattttatgcttgttcattacataattttctggattttttaaattgatgtatgtgtttatgttccaggctaggcagaagctaggaagaatatagcagcctcgtcactgttgaaatctggggctagataattctttgttgtgggggcctcctctgtgtgttacaggatatttagcagcatcctggcttctacacgataggtaccagtagcgcctcctgcctccaactgtaacaaccaaaaatgttttgagacattgtctggaaatgttcccctgggggagcagaattgctcccagctaaaaaccaccagtgtagggaatacagagaaaaaccaagatggtagagacaggtatgtaatcagatgcatgaatatgtaaacatagatgtacatactgtgtgaattgtccacaaaaaatatgtactgggtactatggaaacatggagaaggtaaactaactaaacctggatgggaatcagggcctctgataatgtggctgattccagaacagtaagcaaagttagctaagccaagaagatggtgaagggctttccaagcagaagaaaatgagcasgaaatgctcaaaggcatggaagtgcaggatgtatgtctagggaaggacaggcagttttgcactgatggagtggcaaatatcagctggagagacatgggagatgcaacctgaaaggtgtacgccatattgagatgcctggacttcatcctgtgagcagcagagtgtttggatagattctgggaagtgaaaatgttggggcaaaggggatgaatatttgaagtttttcaatactggacttccaatttgcttttcaaaagtttataataatttatattcatctaagcaatcacgagggtccctttattgcattcctgcctgcactgagtgctctcattaaaagcaatctttgtgaatttggttggagagtttcttgtttaaacttgcatttcttggattgagtagctagacgtttttccatatgctattatcaagttgttatttctctttcatcaatcttgttcatgtccttcacctatgggcctatttttaattttcacagccttttccttatttgtttagttttcctcttagctccctcttcccccttcccaaacctgggtcagttcttatctatttgtatgagacctttatatgtttagatagtaccccttttacttacatttgctgaaatgatatttttatttcatcgtttgaattttatttgaggttttttggatgccttttcaactttgttcatggtgggttttgtcaaatggaagtttctgatttttatgtagtacaaactctcagtcctctcctctgtggttttgcctctgaggtcatgctttgagaagtcctctctttactccaagttttcataaatatccagcaaggtttcatccagtacttttaggtataagaaacaaaaccataaatcttcaatccctctggagtttagggatatggtgtgagcagagtatatttttgagagatactaagaagtccagttggcctgactggatatcagttagatgtgtaagaggtggatgtgaggaagggtaaaagagagaggtccggaggggctccacaaacacgggtctgttgagggtgatgcagcctggtaatcagccccttctgtggcttctcattctgtgagacgttggctgtgctgcatattctaaatctactcttgtcccttctggattcagctctgtaccccaggagagataaattgatgtaaagactgcacaaatagacacttttgccttctggcttctggcttgggcttggccagccagtgtggggagggtggccacctgcaagagagggcagatgagagagacagagatatttattccccagcccacgttcctctgaagaaagctacagctcctgtcag

SEQ ID NO: 93216 - DNA, 40263 bp, Homo sapiens
actcaaaaaacaacagatgttggcaaggctgtggagaaaaaggaacatttctacactgttggtgggaatgtaaattagttcagctaccgtggaaagcagtttggagacttctcaatgaattttaaaaagaactaccatggtcaggcgcggtgactcacgcctgtaatcccagcactttgggaggctgaggcgggtggatcacctgaggtcagcagttcgagaccagcctgaccaacatggtgaaaccccatctctactaaaaaatacaaaaattagccgggcatggtggcgggtgcctgtaatcccagctactcgggaggctgaggcatgagaatcgcttcaacctgggaggcggaggttgcagtgagccgagatcatgccgttgcactccagactgggcgacagagcaagacttcatctcaaaacaaacaaacaacaaaaaaaactaccatttcacccaggaaaaatcccattactggccatctatccaaaagaaaacaaatcattctaccaaaaagacacatgtactctcacgttcatcacagcgctattcacaatagcaaagacatggaatcaacttaggtgcccatccatggtaggctggacaaagaaagtgtggtatgtatataccatagaatactacacagccataatgaaagaatgaaatcatgtcctttgcagcaacacggatgcagctggattattctaagcaaattaatgcaagaacagaaaaccaaataccataccacatgttctcacttaaaagtgggagctaggctgggcacggtggctcacgcctgtaatcccagcactttgggaggccaaggcaggtggatcacttgaggtcaggagtttgagaccagcctgaccaatatggtgaaaccccatctctactaaaaatacaaaaattagctaggcagccgggcatggtatttcacacctgtaatcccagcactttgggaggccgaggcgggaggatcacgaagtcaggagatcgaggccatcctggctaacacggtgaaaccctgtctctactaaaaatacaaaaaattagctgggcatggtggcaggtgcctgtagtcccagctactcgggaggctgaggcaggagaatggcgtgaacccgggaggcggagcttgcagtgagccgagatcgcaccactgcactccagcctgggcaacagaacgagactccgtctcaaaaaaaaaaaaaaaaaaaaaaattagctaggcatggtggccctcgcctgtaatctcagtttactcaggaggatatgacaggagaattgtttgaatccaggaggcggaggttgcagtgagcggagatcaggccactgtactccagcctgggcgacagagcaagactccaatgtcaaaaaataaacaaataagtaagtgggagctaaaccctggttacccatggatgacaagatggcaacagtagacagtggggactattacagaagggaggtagggagcagagcaagagttgaaaaactaactatacgatactaggctcactacccaggtgacaggatgaacatacccccaatctcagcatcacgcagtatacccgtgtaaccaacctgcacatgtacccccacatttaaaataaaagttgaaattatttttttaaaaaatacttattaaatatctattaaattgttgttgttgttgttttgagagggagtccaggctggagtgcaatggcgccatctcggctcactgcaacctccgcctcctgggtttaagcgattctcctgcctcagcctcccaagtaggtgggattacaggcacctggcaccacgcctggctaatttttttttttatttttagtagagactgggtttaaccatgttggtagggctggtcttgacctcctgacctcaggtgatcagcctgcctcagcctcccaaagtgctgggattacaggtgtgagccaccgagcccagccaaaattaactgttaatgtaatattaaactattatttgtaatgcagaagggcttatctaaagtaaagcagctcagttatgtagtaaaatctcagaagtctaaaatgccttgcttatctttttaagataaataattgtaagacagctcaagtaagcagcctaatatccacgtgtataggagtatgtgtgtgcatgtgtgtgtatgtgtgtgcatgtgagtgtgtgtgtaagctcatgggtttttttcttttcctttttcagagtaaatatgctttgaaaatttgacatccatgattaaatgtaatatattgctttgcttcacatttcataatagcatgctatttgatctgatttattcttattgtctagttccagaaagttttttccctctggttccatcagttaagtcacacttgaagaacaaattatattgtgagaaacacatgactggtcttttctgtttctctcctgtcctccttttgtcatggccacagctcagaataaaagagttccacaaaatgtgtaccacagtggccaggctggcatggcaaggccagaggtgctgggacaccctgaccaacatggtcaaactccgtctctactaaaaacacaaaaattagccggacgtggtggcacacgcctgtaatcccagctactcgggaggctagggcaggagaattgtttgagcctgggagacggaggttgctgtgagccgagattgtgccactgactgcactccagcctggctgacagagtgagactctgtctcaaaaaaaaaaaaagaaaaagaaaaagaagagaaagggcagggaaacacccagcagctggcctcactttctcagcaaataagtaattcaggatggaaaggagtttttaaggtgagattctttcaagtgtgacaaagctctttagagcatgagaatcctaaactgtgtagttgtgccactgctctgccattggaatggccagcaccagatatgggctgttcctaccgcctgggttccagagtgaaaaataccgtggaccacagtggcatctgacgcatagccagcatggaatatgggcaaatgaatgataaatgatcaacttccgtttaagtgagacactgagatttgggggcggtgtattattgtagcataacccagcaaaagctggcatggaaacaggaaacctggagctaatgccaagaagaggttgtgtggtgaaagtatcttggtctcttcagaattaacaaggatttaaggatgtctgttcatagacatggctgttgccatcctgtccccctcccctctcctaaggacatgtttctatacaagccagcagcatcttttaaacctcatagtttgtacccttttacactatgttgtgtgagtcaatgtaattcccactctggcccctgcccacctgcttgatgctggagccctctttgttttcgtaaagctgggcggcttccagacccaaatccagcctttacagccactgcctcttccctacgtagggttccgtttaggatcctggtaggtggacaagtagtgaacaagacagatgacagatgctccaggttcacatccaagttttggggggttgagagcttttccatttggatgtccttctttaagaacaagaaggtaaaattgtgaatacggaatgagatatggggtcttggtggggcccatgccagcaaggggcctgaagctcctcattagcttccgatgtgggggtgggggagtagaagtgggcagtacaggaggaagtgacaagaattctcaggggtggggagaactgtgtcgaaaataaacaaggaagtgcaacaggaaatgactgggtggcttcttcaggctgggtaggacgctgctgaatttatctgataaaaatctcctctctgtgagttgtggaaagtggcttgctgcgagagacccccttcttccccacataacataggtaagagtgatagaagtgatgcagctgggcgctgtctccaaaaaaaaaaaaaaaaaaaggaaaagtgacggatgctcccctcactccaccccctacccattacctaggacaaagccagacacagatcctccaattcccattcttcacctcatcaatgatgagccagtcaatagaaataacacacttgttaagcaaacttggtgaggctcctctcttcccccgaggctgaggacttttggcctcatcttagcctgagtcagtcccccctgagaacaggctggccacggggtcaaccttctctgatctaatgtcctatgaaggcaggttctcatcccacttctccattcccagttcattctttctctctctttctttttctctctttcttctttctttcattcattctttttgttgttgttgttgaccgagtctcactctgtcgcccaggctggagtgcagtggcgcgatctcggctcactgcaacctctgcctcctgggttcaagcgattctcctgcctcagcctccagagtagctgggattgagggaagagagagaccctctcatattgttttatattgttttatactcagtacctgttttaagaaaaaaacaaggaagtgaaatcaaagacaggcagcccggcgccaggcccaaaaccggacctgggcctgcctggcctaaacctagtagttaaaaatcaactcatgacttagagaccgatgttattcatagattccagacattgtatagaagaacattgtgaaactccctgccctgttctgtttctctctgaccaccagtgcatgcagcccgtcacgtaccccttgcttgctcaaatcaatcacgaccctttcatgtgaaatctttaatgttgtgagcccttaaaagggacagaaattgtgcattcggggagctcggattttaaggcagtagcttgccgatgctcccagctgaataaagcccttccttctatagctcggtgtctgagaggttttgtctgccgctcctcctgccacaggattacagtcgcgtgccacccccgcccagcaaatttttgtatttttagtagggacaaaaggcccccaggcccctgcaataatggtcctcataacaccactcctccccgagtccagatttgctttatatttggcagtggtcacaacagccctccttgacaaggggctgtttaaacacaccggactgtgatttaaaggaaaatgaggattctgggaagcacttttgttttaagaaaattatttttttagcttaaaagaaaagagaaaaagaactgtggcgtgtgcctatattcttgagaggaaggaatgaaaggagccggaaagaaacaaataagtcgttagggaaaaggagaacgagaataacaccatgacctgtaggaggtcctggaggagctaaggaggtgtcagccattttccccccccatctgttccacaggtggcattttattgagcaccgactgtcccccatccactgtgctcagtggcagggactcaaggtgggcaaaatagacatgggccttgccttgcagtctagtgggaaaaacagattaatcatttaaatattttgtttcaaagaatggtaatgcatgcaggcaaggtccaggcctgtgggagagcaggctacaggcccacctgctatttagacagttaccagtggcagaggaccccgaggaaggcgcagtttactcgacgtgtaaataggaatagccttaactagctgtgggtgtgcggacagggaagggaaagaggagaaacatctgcagagacaaygccgggtgcasagcccgtgggcggggcsgcgggtgcaggggaacccgtgcctctgaagggctgggaaggccagggtgttgggggaggagaccgggcctatgggactggccctggctacgccaaggtggggctgacatgaagtccccttcatccgtggggggtggcccgtccctctgggaggggatccctcacaagatgacttcccaggtcgcgccccgaggcggctctttgctgcccccacagagatgacttccgggctcctggggcccgcggggaggggcaggtgaggcccagggctgggtgagggccaggcccttctaggaatgttggtgctcccagcacctagcaccgggagactggagaggtttccaggagagtgacccgagtaggtcccctcctaattctggagccgtccctcgggctgcgcagtggagcgccgaggtggcgggaggctgcggggagcctgsgcggccaagcaccatctgcagtcaggagctcccgggcagcttgcagggcgcagtttttgaaagcgrgtgctgcgtgcggaccgcgggcctgcagggtgcgcgggtcgggctgggrgctgtccctggagagtagagtggccctggggcccgcacgcccacttgctggcgggggatggcgmagacacgggcggtccccccgagggcggtcctcacgggtggtctaggttagctcggacccgggagtgtgggagtggcgcagagctgcgggaaaaggcgcggggcgcctgcgtggcgaaggaacrcagccgcctgacacgccckcaaggcccgcggagctgctcctgcctcggcctctctgagccaaccacggggcggggcgtgaacgccgggcggggacgtgccgttctggggggcgtgtccaccggcgggggcgtgccgtcctgggggcgtggctctctgctccggtgcaggcccgcagggcgccctgggctgggagcaacgcgactgaccgtggtcgtgggcggacggcggctgcagcgyggaggagctggggtcgctgtgggtcgcgaagcagagcccgggacgtgcgcgcttggtgcacgatcctgaaggggagctccgaggggcccgggtckccagggctgctgcggccattcccggagcccggcgcggggcccgcgagatactggtttaggccgtcccagggctccgggcgcacccggtggccgctgctgcagcggagggagcgcggcggcgcgggggctcggagacagcgtttctcccggaagtcttcctcgggcagcaggtgggaagtgggagccggagcggcagctggcagcgttctctccgcaggtcggcaccatgcgccctgcagccytgcgyggggccctgctgggctgcctctgcctggcgttgctttgcctgggcggtgcggacaagcgcctgcggtgagttaccttgcgaggtaaagtggggagcgtgggagccgggctctagagctttccactgggtgaaggctgcagctctcggggtcggcggtcgctgagccccgggcagcgactggggagggcggggggagccgagcacgctccggggtgacccctgggaagaagttgggaagttgagcacgcctcggggtgacccctggagggagtgggttggggggagcccttagcacactcagaagtgacctctgggaaggagtgcgatgaggggagtcctgagcacgccccggggtgacctctgggaaggagtgggttggggggagccctgggcacgctctggggtgactcctgggaagaagtgggttggggagccctgaacactccccggggtgacccctgggaaggagtagggggtagggtgaggtcctgggtacactccagcctggagctggactggaaactcatcccacagactgctcccagcctaggacgcgacaaagcaggtggcaggcttggtggagcactgttcctgcactcgaagttctctcagaggtcgaagaagtcgtggaggggacacttaatttcagctttcactgcggcgggtggtgaaacgacggttcttcctctttttgagtatcctgttctgaatcccttcccttggctcgccctccgcgtgtgtgtgtgtgygcgcgtgtgtgtgtgcgcgtgtgtgtgtgtgcgtgtgcgtttgtgtgtgcgtgtgtgtgtgcgtgcgtgtgcgtgtgcgkgcgtgcgtgtgtgtgcgtgtgtgtcgtgtgtgcgcgtctgtgcgtgtgtgtcgtgtgtgcgcgtgtgtgtgtgtgcgtgtgtgcgtgtgtgtgcgtgcgtgcgtgtgtgcgcgtgtgtgcgtgcgtgtgtgcgtgcgtgtgtgcgtgtgtgtgtgtggcagccgcccaaattaattaggggtaaacaggcggtgctgcaaagaactccaactttaattctgtggaagataccaatatttgaataccatattatttctttctatttgggtaatgatcgggttaataggatttcttacttacatagtaggtgtggaaaaggtgggttttacttatttatttttttttagacagtcttactctgtcactcaggctggagtacagtggcgtgacctcagctcactgcaacctccacctcccgggttcaagcgattctcctgcctcagcctctgagtaggtgggattacagatgcacaccaccacgcctggctaatttttgtatttttaatagccaggctggtctcgaacttctgacctcaggtgatccgcccgcctcggcctcccaaagtgctgggattacaggcgtgagccactgcacccggccagggttttactttttaaacaccttaggtatatatttttaatcatgtacattaaaatgtagcattatatttcagtgttccggaaagtgtattttctgaaaaagagctacatttatgtccttatttattggccatgaggttcagagcctctcactggggaagtctgtggcatgctggcccttgctggctgagtggaaactgctagttcacacccaggtgtgggacctttgagctctctatgccccagtttcctcatctgtaaagtagaaatagtaacagtcagcctcacagagttggcttcaggagaaatcagttaaggtacagaatgtaacttggaatgatgtctggctggaagtaaacattagcataaaacaggctgtcatatgtggatcccccaccccagcccataattcatgcaactgatatgatcggacaaacttgagcaggcaagatttgcgagaacatggttgattcagaccacgagggcttcataggtcagcgggcattttcccaagttctaactggttttgagaccttggtgatttttctttcttctttgactttctttagcttctccattactttctccgtgaataggggaggggggcatctgtgtgggagggggtctcctgcagtcacatcactctgcctggttttagatggagagtttgttacaaacgtctgagtcttggtagttttgttgtaagcatattgatagtctcatcttcctgggtgttgctaagctttccagcctcaggttccgactatgtaaaataaggtttttcacccaagggtaaaaaatgctttaccagctccaattctcaccctgcagctcatcctttttttttttttttgagacagggtctggctgtgtagcccaggttggagtgcagtgatgtgatctgggctcactgcatcttccacctcctgggcttaagctatcctcttgcctcagcgccttccaagtagctgggactacaggttcatgccaccacacctggctaatttttgtagagacagggtttcaccatgttgcccaggctggtcttgaactcctgagctcaagcaatcctcctgcctctgcctcccaaagtgctgggattataggtgtgagccaccacgcttgaacccttttttccttttatactgagagcttgcataattagttccaatgtacaactaagttttcataccatcttaactgtaaattctatacaaattcaacaggactcaattatttacaaaagctaatgtgtgacaacttgatcttcttacttggaatcttcccttctaaaatttgatttatcctgaagtgtctgcttgacttatatcctgtgttgctgctggctttttccatgtgcattttttgcaagctgctctttttacttcagtctcgttaagtcttgcagttctggctagaggcctactgccatgaataagctgccgctccacagtggcttctttgaagtcttagagtcagatgagtttcacggtgttcaggtttgtgatccagtgtggccccaggttctgggtaacacgtgtgatgcagtgctgtgtgcataccatgtcgtgaataacattcatgatgcagtgcacataccgtgttcaagttaacagtcctggtggcatctgaagtagcaccctaaaatcaaatgacacaaattctgcagagaagcaagtgaagtctaaaaactgagttggggtagtaacgataaatagcgttatgctagttcaggttatgttttgttgccaaatgaattacaaaaaactaccaggtttcaggcttttatgggtttcacgaatgcaggggagggatcgtgggtctgcrtttctcttgagcatccttaggagaaaggtgcttcgtggctcagtggcttcccttcagtgaggccctccctggctgcactcctagcttgccctgcctccgcttcccctcctctcccctcctccccttatcctattcatgttctccgccactcagcactggacgccaccacacgtgccttcttagtgtaggggtgtaccgccttcctcacgggagtgtgtgcagcagcagggcaggcagtgttcctcctcccacagcactcagtgctgaatgaatgattgaagggatggatgggtggatgaattttttctgtaactttaaaaaaasttcttgaaaaataagtttcttatgttttaacagtgacaaccatgagtggaaaaaactaattatggttcagcactggcctgagacagtatgcgaggtragtgtttctgccttgacgggccctggggcctggggagccctgtgaagaggggtttgtgtgcacgtgcccgtccagggcacccacgctgctggtgcgggaggtaggcatcgctctggcgggtgggcggtgtctcctgcagagactgcctccaggagggctgtgtgtgagcttcccagggctgctgtaacaaaagtgccacaagctgggtggctgagagcctcaggaatttattctcacggtcctggaaggggaagtttcaacctaggggtcagaagggttggttcctcctggaaggctctgagagagtttgttctgtttctctgctagcttctagtaaggacccgtggtcctctgcgttcctgggctgacccatcaccccaatctctgccttctccttcacggtgtgttctccactttgtgtctctctgtctcttctgatgaggacaccagtaattggatttagggcccaccctaatctggtatcaccttttcttgatgacatctgcaaagaccctgtgtccatgtagggtcatgttcacagatgggaggaggggttaggacagggatatatcttctgggaggacacggttcaacccacagcaagcctcagtttgtctcctccctctgtgggcggcaagccacccaggtgccaaggcaagagaccgagggcataagctgttccagtataataaagaaaatatataaaatgagaacagttatactagaaatagattatagatatgatgatatatgaatattattaatcatcagtttgtagcattgctctttattccaatattataataatccttgctctacaattacagcctaggaaaaaccaggccatacagagataggagctgaaggggcacggtgagaagtgaccagaagacaagtgtgagcctctgtcacgcccggacagggccactagagggctctttggtctagtggtaacaccagtgcctgggaaggcaaccattacttagctgacctcggtctagtggtagcgtcagtgcctagggaaggcacccgttactcagcagactgggaaagggagttagagcagactctgcttcaccatacctcttgtggataggcctcatatcagtcaggcctgcccacagccatctggaggcctaaccatctccccgtgatgctgtgcttcagcagtcacactgctgtttcactttcatgttccacccagtacacctggstctgccttctagatagcagtagcagaattagtgaaagtactaaaagtctttgaaatgcatagaagaaataatggcgtaagctggcctctctctctctccgcctccgctgccatacagggaagggccctctgtccagtggacacgtgactcacgtgaccttatcagtcattggagatgactcacactccttaccctgccccttttgccttgtatccaataaacaacagtgcagccaggcattcggggccactactggtctccgcgtcttggtggtagtggtcccctgggcccagctgtcttttcttctgtctctttgtcttgtgtctttatttctacaatctctcgtctccacacgaggagaaaaacccacagtccctgtagggctggtccctacatccctccatgtattggacattttattaacatgtcctgtgagtgaagaggacccaagagcttccctgcctcctttgctgtgcttggcacccatggcactcacggccctccgggctggcccctcatcatctggctgcgttttgctccatgcccacatcccttcagtgcgtcagtgtccaggcccttctcattggagcacccagagccaggacactgcctggatctgcacctcagggcgtaccctgctcggtgtgtcaagctgaccctggtgtgcattgcacacttctcaagtgtttgaccgtgttgctgagctagcaccacattctgtcaggagcacgcaggctttatgttttgcctctagcactgagtggtagtgactttcgcttctacttcctcactgatttttctgatgacaaaygaaaatgaaattttgcttatctggctcaaattatgctcttgctcacttctgtacacgagattgccccgttttcagttttgcagacttaatgttgcgctcctgctgctgtttccttgccttgggttggggcagtggacagaaggagccggaagctgcctggcatcaactttcaattgttgggagtgtagctggcattctgagatagggagggattgctggagtccttggttcctacggaagaaggaccgtggaggaggagctggaacttaagcactgtctttgacccacactgaaggatmtgcctccagggcctgagaccaggctgctctgcattcagggaggcatttacatgacaaaacgtgggtgtgtccctgcacactgaatgtaaatatgggtggaggcacatctttgccttgaggctttagaaacaagatttaaaaaaaaatctgtagcaaaatgtccttgttaaggagtgtatttcctactgggcagccatggtgaagggttctgtttsagcccaggtgtcctcctaggcagtgagggctrtccctggtgccccctctgatgagatgcttgtgtcaaagatgctcagtctgcctgtcgggttctcagtgttctgggctctcccacagctccatgcaggcaggcctgggaactgagtgctgtgcagagccctcagagccccgtgtggtgcaggctttgctctctgcattgcctccaggaaaggagcccagcttctggctttgaactgggttccctgagggatagagttgagtggcagaggtgaagttacaggttttggcctctgaccctctttctccagcactgagcagtaaggactttctgttctacttcctcaactgatttttctgttgacaaatgaaaatgcagtttcacttatctggctcagattatgcccttgatcatttctttctttttttttttttttttttttttttgagatggagtctygctctatcacccaggctggagtgcagtggcgcgatctcggctcactgcaagctctgcctcccgggttcaagctattctcctgcctcagcctcctgaggagctggaactgtaggagcccaccaccacacctggctaatttttgtatttttagtagagacagggtttcacaggttggccaggatggtctcgatctcctgacctcatgatctgcccacctccgcctcccaaagtgctgagattacaggcgtgagccactgtgcccagccttttttttttttttttttttttggagacacggtttttttcttgtcacctaggctggagtgcaatggcatgatctcggctcactgagttcaagcaattctcctgcctcagcctcctgagtagtagtgactattagcgcctgccaccacgcccagctaattttgtatttttagtagagatggggtttcaccaggttggccaggctggtctggaactcctgacctcaggtgatctacccgccttggcctcccaaagtgctgggattacaggcattagtcactgcgcctggcccataaaaacacctgtttctgttaagtcaaatatttgaggaatggcttaacaaaaatggctgtttctgttaagtcagttgtttgacgtttggcttagaacatccagccctagtgtagcttcctcatggatgtgttgttgtaagcaatgtattgtgaagtagccctggctttagcttgtgttattagtgcagtacctgtatctygttggcatatgttgcaactagctgctaaatgtattttaatagggttcctaagtgtatttgaataaacaaagagccaatcattttcttgttatattttctccctagaaaattcaaaacgactgtagagaccctccggattactggacaatacatggactatggcaagtgtctcacacaattaaatcttaggcagaagaggcttgctgactgggaaccctagcttgaatgtggtcttaatatttattcttgttttttatttttaggagtttatccaatagactagattcttatttaaaaatatctttagtctttctagcagaaccctgattctcttgttctttaattctgtcttcatagaacaataacactttttttttttttttctgagacagagtcttactctgttgcctaggctgaagtgcagtggcacgatcttggctcactgcaacctccacctcccaggttcaagtgattctcctgctccagcctcccaagtagctggaattgcaggcacgccccaccacacccggctattttttgtatttttagtagagacaggatttcaccatgtttgtcaggctggtctcgacctcctgacctcaggtgatccatccaccttggcctcccaaagtgctgggattacaggtgtgagccactgtgcccagccaataacactttttaaaatagtgtttacagattctcggtacatgtcagggtcactacattttaattttctcattttgttcttctcttggggtttattataaataactacatgaaaatacataaatgcacgtctcgtacacatttcagagacactcaaatttattattctggttttgtctgcgttttgttcagttaattcttttctatgtaacatggacatacttgtgacgctgaactgtgcacatyaatcgccccatctgaaggaccygttttgtcccactgcctygatgccgggattgaaaagggcccttttagcttaattggtgcctcctggctccttaggaagagggattggtggaaaacaagttaaactgggatgtaggtacttggcttcgggtttcactttcttctctgtctggtcagataaccttgacctcctgtctctggggctcctggctttgctagactttgcgtggtgtcctctcccctgctgtgaccaagtgctctgaatgtacctctgcccatcatggccgtttcatttctgaggctggaatgaagctttgcaatgctgtccagtccagcggatagaatcaggcaggtttcacatgctggtccagctgttgaccctgaagacactctcctccctggcctctttggggctctgaggggtcggggtcttaggaagttagtgaccttgtggagtaagcagcactcaagagtcagagttgataagtccagaattagatgtgtgaggatggagttaaagttctagacagtgtaagtgcgtttgctactgaaaatgaaatgaaaatcctactagctgatcttytgccatacgccaggcactttctgacatgttttatctgtcatctcctggagtcctcctcaccattgaaaggaacagactctcgctgttctcatgctggatctgtggtgcggagattggccgggggtcagcttacttaggtctcggtgctagggagcagcagaggttgccgtcaacccagccggggctgaccccagagtccccgctcctcggtgctactaggctatccattgcacttcctttactaagcagtggcctgtctgcattactcctggacggtttaacacaatttcttttcccttctaaagaaatttgaactctgactcctcttacctgcrtcttctttcttaagcatcctgcctgggataaggaattcccaattagaatttctctttttattctttgcagacttcaatgaaagtgttttctaaggtcatgtagaagccaccccaaccaagcctaatatttcttattttctcttttaaatttgaatttccaggcccgataaaagtgaaggatgtaatagatcgtggcccttcaatttagaagagattaaggtattgacttttaattatatttctactgcagagtgttgacctagattaactcttttcttcacaagygtaccttcaaagtcatctttaaaattaaggggtcatgaatgtattcaccaggattgagcccttgctgctgttttagtaartatwgttatctcgaccccacaaattacaccaattgaccttttccctctcctcccctcccctgccctgtgcccaagccactgcatgaggggcctgagcgaggggctccgaccggagcaarccctgacactcccccatgccagacctgtgcagatcctgacgctcgcccgccagccccgcctcgtcccaggccccaggacttctgggtcagatgaccgacgtgggaatctggtcggtgtgccatatcgccaggcatctccagacagctgaggctcagagagcacaggcctggggccgtcctatctggtggatgggtttctgagcaggtggacatgctgggcctttccagtacaagagcttgattaaagaaaactcacagggcgggaatttattagagatactagcagaggcgttcctttgagatacccgtaccttatatgtcatacggagtcttcactcacacacacrccctcatctttccttaggggtgccaacagttcctgtgtgtaaccagtatataccagggtaactggacctggaccccagggagggggtggtaactgaggccttctttaaaacgtgtggtagcattgaaggcttgcgggagttgtgggtctttcctaggaatggtacattccccaaggtcattagttgcaaatccatcacaagttctttttttcytttcttttctttttttttttttttttgagacagagttttgctcttgttgcccaggctggagtgcagtggcgcaatcttggctcactgcaacctccacctcccgggttcaagcaattctcctgcctcagcctcctgagtagctgggattacaggcatgcgccaccatgcccggcttattttgtatttttagtagacatggggtttccccatgttggtcagactggtctcraactcctgacctcaggtgatccacctgcctcggcctcccaaagtgctgggattacaggtgggagccaccgcgcccagcccacaagttctaatccatatggaattgttttctttttcctccccgtgaagaccttcagtgggatgagccaagaggctggggactgccgtgagacttagaagggacaccccagagcctggtgctgtctctagctcctcacacagactctcctcctctcctccgggactcactgcagggaatggtttctggggaggcgtgatgaagaggccacttcaggatacattgagtttgaagtgcccttgagacctccagggggtgacatagaggatcttcagggtcagaggaaaggtggctttaggcatagttagcatgaggatggtgaatcaaaatgacaggtgtggggatggacatgggtctgtggacatggatgggtgaggagtcagggccgacaggtgtggacgtgggtggatgagggggcagggctgacaggtgtggacgtggatgggtgagggcagggctgacaggtgtggaygtgggtgggtgagggcagggctgacagatgtggacgtgggtgggtgagggcagggctgacaggtgtggacgtgggtgggtgagggcagggctgacaggtgtggacgtgggtgggtgagggcagggctgacargtgtggacgtgggtgggtgagggggcagggctgacggatgtgggtgggctaaggggacagcgctgacaggtgtgggcctggtrggcagaggggacagtgctggtggagccccgtgttaacagccaggtggaaaggggcatgtgtgcctgcagctgggaaaggcggaaacccaggagtgkagagatttgagaagaggcaccrtaggactgcatatccccggggggtccaggacaggaaagctgaaatgctttttgagtgggggcgtgggtgggtcgtgggtctgtggtggtgtgagccgctgctcctcagagtrgtcctggcttccttgttgtgtagcagtaggaacacctttgcattgtcccaaasggaagtagcccaatttgcacactcaatcatatcgtgccctaggacatctcggagagctgatggggctgaagccagcatggtggggcaggagaggtggggtggggggctggaggggaagaggagggggacagagctgcgcccacacaggcaggggctgtggggtaggggctgagttacaaatgggctgagaaaaggaccctcatatagggtgctggaaaacaggagaaagggaaggaaagtgaagttatccgaagtttgttaagcacctttttactgacctttttggggtttttttggtgtagagggtgtgtagaaatagaaaagtaaactccagttctgttggatttagcgcgactggtgcccaggctgcccagctcacacaagctcttctctgggaaaaggagagcttgtcctttgtttgtttgtttgttttaactgatggtttygttttgtttttttttaagatggagtctcactctgtcgccaggctggagtgcagtggcgcaatctcggctcactgcaacctccgactccctggttcaagcgattctcctgcctcagcctccygagtagctgggattacaggcatgtggcaccgtgcccagctaatttttgtatttttagtagagacagggtttcaccaggttggccaggatggtctcgatctcctgacctcgtgatccgcccgcatcggcctccgaaagtgctgggattacaggcgtgagccaccgtgcccggccaatgtttttagaacagttataggtttacagaaaaattggatggagattacagacagttcactcccttccccctcaactctcccaatcattaacatcttctatagtgtgttacatttgttacaattaatgaactgatactgatactttattattaaataaagtttagcattaacattagggtttactcctgtgttgtgcggctttggacaaatgcaggagagcaagtcccacccagtgtgctctggagcagccgctggccctaaaccccctgagccatacctccccttcttcctccccttgaacccccaagcaaccgcgaatctcattcctgtctcttaagactaccttttccaaattgtcacgtcgttggaatcatacagtatgtagcctctgcagactggcttcttgcacttagcaatgtatgtttgcagttcctccagtgtcttttcatgactcgacggctcattggtttttgttgctgaaaatattccattgtttggatgtacactttatcccttcacctataacagcttgtattttcgtgtgcagttttatgattactcaaattgcacttgtagatatatcttaacaaacacttcatacaaaataagcataggattattttattcaccaaagtattgttaattagcagagctcaattctttggtgtcagtttatcaaatttaccttctaggttttgagtttattattaagaacctgcgtagacttattttattttttaatgcataggatcttttgccagaaatgagggcatactggcctgacgtaattcactcgtttcccaatcgcagccgcttctggtaagtcccagcctctgattgctgtcttgattactgtctgagcgggtgtggggagcgtgatgaatcgctagaagtggaaactgtgtgggaagcaagataacagaatctgtcttctggggctgagcagtttgaacaaccttttatgagatatgattctgttacggcatttttggtgcctttctccaatgtataaaaaattgaaagcaagtggaatttaccatataagcctgttttctaacctgtatggtatttattactttgctttaaaacttttctcggccagtcacaatggctcgtgcctgtaatcctagcactttgggaggctgaggcgggtggattgcttgagctgaggagtttgagaccagcctggtaacatgacaaaatgccacctctaccaaaaatttaaaaggtcagctagatgtggtattgtgcggctgtggtcccgggagatcaaggttgcaatgagctgtgatcagctggggtgataactagcctaggtgacagggtgagaccctgtctcaaaaacaaaataaagatacaaattttctcttctgaggcttaacaaagtccaatgcttgcatatctaagaattagtccatatcagacaggagagaatatttcttaaggaaattgtgctcctgtcttcaaatacrttaagaaaaaagagaccaggcacagtggttcacacctgtaatcccagcactttggaaggccaaggcaggtggatcacttgaggtcaggagttcgagaccagcctggccaacatggcaaaaccccatctctactaaaaatacaaaaattagctgggcatgatggcgtacgcttgtaatcccagctacttgggaggctgaggcaggagaatcaattgaattcaggggatggaggttgcagtgagccgagattgcaccactgtactccagcccgggcaacagggcaagattccatctcaaaaaaaaaaaaaaaaaaagaagatgtcttctaaaatgatgatctcatgcctatgacttagggaggagagaaagtgagacttagcatgtgaggctgagacctcagtcatagtgaagcacctttaagttcagcagaagctaagcctagggcataaacgccatgttgaattcaagatagcttttaaaatcctggcttttttaagaacataaagttaaattccttgtattaacattatattaactgaaggtaattattttctctatcccacttcaatattgcaatttataattcagattacaacccatcaaattttaggtgggaagattaacctagaaatatttttgtgtataattttcaggaaaattaaaagttaagtttagaagaaagcttttgaaaacaaaatgaaatggaagtgatgtccccctttctggttcatcggtgtggcagtgaagtggccttaggattcatggaccctcagtctgtgcgttgaatcacccttgaaaattcgggtggtgaatggttcaggtctcagtcacctgttctgcacagcctgtgttctagaaaattatttcaaaataatggccatgataagttggaatggaagaagataggaaaaaaaattatatgtcacttcacagtgtacttcagatgatgagtttatggtaactgagttatgtgaaagagaatttttccagttgttacaatgttccatgatagagtctgtcagattttagctaaatggcttaaaataaatcagcaaacatgcaaaggccttcagtgagctgggtcttgagcatttaatcaaaacagtgtgggcacagtatgcatttatttttgggctctgataaaggcaagatgacttactttaaattttcaggttgatagttgaattacacacttaaaaaactggttctaaatgaaaaagataaatctcacacacaaattaatatttatatttttgagtgctcctaaatacaaaatatcagctagggaggagctcctgtctgggctgtgtcacccagtcctgtgcctatcactcaagtcacctgactaactccatgggggttggcctctggcttctccacctctgctccttgggcaggggaaggtgtcacagcactgctgtggaatgtgtctttgggcataaccagccccgaggactggctgcctgttgtggccgagcgggctgggtgacagygggtgggtgagcctgggacatccgctcctggctgcatctgctcttggtgggtgagtcagggtgtctctcagcacagagggcaacacgctgagtcacttcgcattggtgactgaccgttctgatgcttaaaaaaaaaaggtccagtccaaatgaagtgtgagtgaatgctgtgagctccatgaatatcaatctatttccaacatctgttgagttaagcttgctccaggaataatgatggctgacatttactgtttattgtgagccaggaactgttttcattcatgtggaagggctcagcacacctcatctcacctgcagaattacccctgttttatagaaactaagtcacctggaattcaggttacatttcaattagtttaaaataatctcctttttctaccttataggatataggaagttatcaggtaatttgctctggaaaggcttctagatgaagacagttactcatccactttcatcgttcctgttttcaacttttcatcattttctgagagttaaatcaataggaattatttaaaactagtattttggatgaattttgccagtgaattaatgcacatttagattgtgtttttaagactgcatataagtgctttataagtggttgcatgaatgttatttattaaaacttcatgaattcatcacyaataaagctgaggaaatctgattcccattttgtcttttcatgctaaagatgataaacatctgatgacacgccagtcattctgaaggtggctgtcaatctcgtcagcagttgattggatgacagcccagtgcagtgggaagggcgctgaccttggacttgagcgtggccttcaagggcaggctctgagtgaccttcagcaagtcccctggcccttctgggcttccattccctgtctgtaaactagcagtgatatttccgccttgcagagttttgagaaccaaacgaagaacgtgaaagatttttgtaaacctttaatctgcagtaaaatatcaggaatcattctcagtgaccacatttttctggaatacaaattgctgttcacgtgcagccctttagttataggctattcagttgttcttattgtcctctatgtagaatggatgcttaaactataatttgtagaagctgaaatggaaaatgggcctgaggtgtttcctggtaattagctgtcctgcctttccatggctggttgcttagaaatgacagtttgtgccactctgcgaaattccctgactgcaaagcacccactcactgcaggagaccacacgttgctttgtgaatcagtgggggttggggcagcagcatgttcttttttctcagctttgatttgttgttaattgagcaagctgtaattgtagacgtgaactgaaactgattatttaatcgtgggggattgaaataattgcctatgttgcaaataaggaattttatccttcctactttgtaaaagaaatgacatgcctaccacatgggaatagtctgtgctgagagaaaacatgcttgagcattttaattgggaatcagtttcattactttttttttgagatggagtttgtctcttgcccaggctatagtgcaatggcatgatcttggctcactgcaacctctgcctcccgggttcaagcgattctcctcctcagcctcctgagtagctgggatctcaggcacctgccaccacactcggctaatttttttgtatttttagtagagacagtttcaccatgttggtcaggctggtctcaaactcctgatctcaggtgatccacccccttcagcctcccaaagtgttgggattacaggcatgagccactgcacgcagcctgtttcactacttttaagtggagatttttcctaatcctcacaggaagcatgagtgggaaaagcatgggacctgcgccgcccaggtggatgcgctcaactcccagaagaagtactttggcagaagcctggaactctayagggagctggacctcaacaggtgggtgcgcccttcccccggctgcacttcccagtggggatctctgctgtcgcccaagcctgacagctggatccagkggagtgggtgtagacctcactgccctccagcagcttctgcatgtgcactattcggctactgggatcattcctgaggaatgttctgagcctaccaagcctttccagatcattctacatcacgatcacacagagtgggtgcagagtattgggatgcccatctgggcaccatctcatcatcagagtcggccatagggaaaacgakgactccaaccagcatgtgccgttctcagscatgattcctgataaaggatagtgcattaataagtcgtttccttagaaagacggaaactctggaagtctgtaggtctttgccgcagaactcctggaacaagcaggcaggaaagagatgtgggccagggttctttaagccccagaaatgaccccaacctgcctaaatcgtccctgcctgccctcacctctattcttgagaagtggaatacgttgtcccacttgagccagttgacttgtaaagcaaagtgccttctgagcgccacaccgagcccactcactgtccgaatctggttgctagagagccagggtgtgcccttacctctccgtcgggacgtttcagggtgtcagcgtcttagctgctctcactgaccttcatcataagaggtcataataaaccagtgaagtcgtgaaaaacatgacaggcaattgcacagcctctgtgttgctgcttttggaattcacgcagcttgttttagagcaattctccttcaaatcagaataataccaggagccttagctaatcagctgtatttaaggtttctgaatcaaaactgcttaaaagatgaataaacctccattgcttatctagacatgtgctttgcctcctcaacgtacaaaatcgtctcacacagatggtctcctgtgtcatctgatgaaacgcagtctaacagctgcaacttgggtgggatagagctcaggcactgatagaagaggggcttggcacggttagcggggatcaagattacatcaaagaatgccctgtgaataaacttctttaaaaatcacctcccagagcgcgtggcattaggtgtgccttttcatcctggttctgacactaactagttgtacaatttgtgtatctaacctctagctcttttttccatgctgtgaaataaatggataggttgccctcaaccctgaagtctcttccagctcttaaaatctgcactaccargtatatacactaagaaacgtacacagacctatacactttgatttgtatatagtttgtgtatataatttgatctatgtaatttaatcttaggtttttaataaaggaagcattgctttcttgcagtaagagcaatattttaggaaacattttctcaccyaacaaatgtagctaattagctgttcagaaatcattatgggccatgtgtggtggctcatgcatgtaatcccagcactttgggaggctgaggtgggtgcatcaccagaggtcaggagttcaagaccagcttggccaacatggtgaaatcccatctctactaaaaatacaaaaattagccaggtgtggtggtgcatgcctgtaattccagctactcgggaggctgaagcaggagaatggcttgaacccaggaggtggaggttgcagtgagctgagatcgtgccattgcactccagcctgtgcgaaaagagcaaaactgtctcaaaaaaaaaagtcattatgaggattaaccaagagagtgtcttaggtagctcctggagcacaggagacttgcagttaaaaagaaagtctgacattgctgaaagactggcagggtaggacccactttggagatgacaagaaagatgccctctgtttcaaaacaggggtctcacagtcctgaccctgctgcagagtgctggtgttttccaggctgactccataaaccagttcatttaatcaaacagagaaaggataaatggatactactgaaaattttaaaatcaatcatctaaataattcatctctgtatccaacaaatagtttattaagtggctcctacttacactcgttgaaactcagtagctttcctgctatggtttggatgtggttggtttatccccaccaaatctcatgttgaaatttgatcaccagtgtggaggtgggaggtgtttgagctgcggggaaggatccctcatgagtaggttaatgcccccttgcaggggtgagcgagttcccactcagttccccagagagctggttgttaacaggagcctggcaccgcccccaacccctggcttcctctctggccatgtgatctctgtacacaccagctcccctttgccttctgccatgagcggaagtttcctgaggcccttgccagaagcagaatctggttccatgcttctcggacagcctgcagacccctgagccaaaaaaacctctttttttaaataaattacccagcctcaggtattcctgtatagcgacactagacagactgagacacacacacacacacacacacacacgacacatgcaaaactctaagtcctggagttcctgtggggattcagcagagcccagtgctgccctgccattgctgtagatgggaatggtgcgtcctccattcattcattcattcattcattcagtaaatgttcactgagggcctgccagggcaaagcactactgagagtatgtttgctaaaacctataaagaacaattataggaaaattatattcttagtttctccaagggaaatctataattcttagtgccttcattttaatctaaaaattaaattaagaagtcaaaatttaagacccctcatttttccttgtaaactggtatcacaaattatctttttctcataggttggcttttcaaattatcataaactggaacaggctgggcacagtggttcacgcctgtaatcccaacactttgggaggccaaggcgggtggatcatgaggtcaggagttcatgaacagcctggccaacatggtgaaacccccgtctctactaaaaatacaaaaattagctgggcatggtggtgcacgtaatcctagctactcaggaggctgaggcaggagaatctcttgaaaccaggaggcggaggttgcagtgagtcgagatcgcaccactgcagtccagcctgggccacagagcaagactctgtgtcaaaaaaataaaatagaataaaaaattgtagcttgtttttcttcacttcataatatgaaggcagcaaacctgaaaaaccacaaatcatcttgaagcaaagttgtcagggttcccatagacacagatgagctgatggcacgtgctagagtacccacagataaagacctgggatgcgtgccaagctcatctcaactcagcagaaagcatgatgctgggttaggtgctgcatttccccacatctttctctctttgccgtattcccttgatcacccaagtcaggagcatgctacccaatagacgtgtaacacgagccacagatgtcattttaaattttctagtagcatcattaaaaggagcaaaaagaaacaggttaaattaatttcaaaaatattttattaaactcaatatatcaaaaataggatcatcgaaacttaggataaatattaaaaaattaataagctagtttacatttttttttttaactgcaaagtctgaaacctgttattcatacaacaccaacagctagggtaggcgaggtcctgtgggttcgggccatgatggggctgaaaggaccctggtccggcatctcggtccttgttccaggaactctgtggccaagacagtctgacaataagttattgcccacagaggatgtctaagtctttgtgtccactctgtgatcgtgatctagaattttctaccaaggcttgatggggaactaggatattcttctgcaatgattcagaattttacagtgtacctttatamtttaataagtgaattctatatatggtagtttggtaggattctgtgtagaagtgctttaggaggtgattgaaagctgtagggacttaccatacggttatgtattgcttggtgatggggtataaaattgtcatgtgaacatcttggagtgcacttacttagctgatacagcccacgacacacatatgctttgtggtatagcctgttgcttcgaggctacaaacctgtacagtgtgtgactctactgagtactgtaggcacctgtatgtaacacaatggtaaggatttgtgtatctaaacatatctcaacatagaaaaggcacagtagaaatgtggtcatatgggaccgccctcgtacatgcaggccttcactgactgaatgtcgtaatgtggcgcatgactgtgtttaaagatttgtccaaatgcagtttaccaggataagcctggaatccgatttcaattgctgtcttttaaagcaggtgtggcaaacgggtggtgatgtgtgtgccagctccactcggtggtggccccagcgctccyatgctcygaaggagtcaggaactggaaagggtrcctgcctggagcagtttgtgtgtgtgcyaaggggtggggaaggcggggactgggaaccatgtatttgcagtccatgttgacacatttgttgcataaagtcatagaaaacactttcctttaagagtgtcttaatttttaccatgaaatatgatacctgaaaagaacaagaaagsaaagtggaccttcattatacagctaacttttttaaatttaaattttagtgtgcttctaaaattggggataaaaccatccatcaattactaccaagtaagtcttgcttttgcttcttttctcgtgtgtctctcccggggacctccagtagggccgtttcagcctctgagtcaatgggctgtaaattgccccagtgcaaacccccttcctacttaaatgttatcatgtgaacagattttatttgcattttattttcctgcgcatgttgagtaggagctgaaggctgcttagaccagtgatttggaagcacagatttcatggctccctttgtgagaagtgtgtgctccagggtccggcagagcaggtggaatctgcagtttsaagagtcacattcacttttataacgtagtcttatatttgtttgtggtttgttttcatgataaaattgtgatttgttttatgataaaagaaactatagatatttaagcatgacaagatgttattagctggtaagcatatacaaaaagttgctttttgccaggtgtggtgactcacgcctataaatcccaggaccttgggaggctcaggctggaggattgcttgtggctagaatttcgagaccagcctgggcagcagagtgagacctctagaaagaagtaaaagtagctgagcatgatagtatgtgtctgtggtctcagctattcaggaagctaaggtcagaggattgcctgcgcccaggaatttgaggctgcagtgagccatggtcgccccactgcactccagtctgggcgacagccagatcacgtctctttaaaaaaaaaagaaaaagtagttgttttcaactcttggttgcctgtttttgtaaacaaaattgtactcctttgttacctggggatgcttgtgctcccatggtgtagctgcagtagggaccgatgtgtcatccacaaatcccgggatatttacgacgtggacctttacggaaaatgtttgcagactcttgccttagagaaaggtatcagattctttgagatagttttcgtatttatcacaggttgtggatttagaaaaaggttgaaagtcactgatcttagtagttctggggcgatggctggatgttgaacaattattttggtatcttgactgtttgtgaaataaattggcaacagtgtctttgctctcatggtgtctgcttacctgtgcagccatttttccagagtgtggggagcagtggacttgaggaaggagtctaccagccctttccagactccccctcaaccccaaccccaggaagccgtaagatgatcgcttgcagggccctcaccgtcctcacctggactcatgtgcgaatagatgagggacatgtgcctgccatgtttgcccagagctcggtgttcagggaactgattacaggggtggcaaaagccacaggggccacacatttgctgagctgcttccaggtgcgaacggcgcttgtttgggcatcagaaacagcacggtggatactcggagtcctgtcctttgaaaggagtttgatttatcatcaggagaaatttgttgcttttgcatccagcatccagccacgtatccactcatctgttttatggggaaatcagggctgcgggagcacccaggagagctgccgacccagacatttcctgggaaatgcgttgctgagatggaggcctgcagcctgcccaggccctgaggggagtggttcagtggagcagagctgggggctgggggctgggagatatgggaccagttgcttcttgagggggctcaggggcagagcaggagggttgggaaggggccgggtgggagccatagacatgaggrcctcatcctccagcagcgctgagctctgagtaggccggggtgtttgcttgttgctgtccccgtggtactggggagaggctaggcacagagaccctccgagtaggtcacatgctgggggaatctgggcctatggctatgcagctggagaggaagggatagtgtggggagcttggacttggccgtttgggacagggggatgggagaggcagaggtcctgcctcaggcctccataggagtgacatttgctggtgtcagaagcttggcaagaggggaggatgatcagaccctgcatggacagttcgaattggagctctctgcagagtccaggaagagagstctggatgggagggaagccatggggtggaaaagatagcttccaatggaaggcagtgaaaactcgccataagtgaaggagaagaaggaggccaaggagakggggcaggaatggcagccggcagccaggcggtcagtggagcaggtgctcaggaggcccacaggagagcttcgtggaaggagtggacagtgtctgaggcaaggggcaaaaggcatctgctggagctggtgaccccagcttggtgccccccaaagccagagtacgaggctgagaggatgcaggtgtcctcctaggaggtttgagtcagaaggcacgaggcagaagcagtgggggaggactccctcagtagagcgaggaggaggcccctcatccaagaggaggttggagcacaggggggtctaggtttgcagtttcgggaccggtagctgaggggtcccagggcctttcttctgtgaaggagaatgtgtccaccgtggggagggggtcgggagagagagatacttcagagtggacagggctgagaaagctttatgggccgcgaaaggcagagtagttgttggtggatgagggtggctgtggcaggtggcgtttcaggtgagacagctcrgggcccagaaagacactgggaggaggagagctctgctctccagagaaacaggagcagagaggaaaacagagccgcagcgagcggcttgtggtctggggatgaagcccaggttgacagcatcctctgcttcgctggtggaggtgggggcatcattctcacacctgtgctgggtcctgtccctgccagccaagggagaccaggaccctgccactgttgcgctcaggatagtccagaactgtcagatcttttctgttgaagtttaatttctaatacacttgtatttaaaatcaggttgcagattttaaagatgccctygccagagtatatggagtgatacccaaaatccagtgccttccaccaagccaggttagacagttatgttttgtcttcctttttttctcaagaagacaggttctacttttctgatggccttgtcttcaccatgcagttccctggggcagacttgtatttgtgcatttgtgtctgtatatgtgggcatgtggtgtgtgtgtgcatgtgtgtgtgtacatgcatgtgtgcatgtgctgtgtgtgcatgtgtgtgtacatgcatgtgggcatgtgctatgtgtgcatgtgtgtgtacatgcatgtgggcatgtgctatgtgtgcatgtgtgtgcatgtcctgtgtgtgcatgtgtgtacattatgtgggcatgtgctgtgtgtgcatgtacatgcatgtgtgcatgtgctgtatgcgcatgagtatacatgtgcgcatgtgctgtgtgtgcaagtgtgtacattatgtgggcatgtgctgtgtgtgcatgtacatgcatgtgtgcatgtgctgtgtgtgtgcatgtgtgtgcatgttctctgtgtgaacatgcatgtgggcatgtgtgtgcatgtgtgaatgtgtgcatgcatgtgaacgtgctgtgtgggcatgtgcgtgtgtgtgtgtgtgtacatgcatgtgggtatgtgctgtgtgtgtgcatgggcctgtgcctctgtgtgaatgtgcatatgaacatgttcatgtactgtgtgtatgtgtgcacatatgggcatgttctgcatgtgtgcacaggcctgcacatctgtgtatgtgagcatgcatgtgtgtctgtgtgagcatgtgctgtgtgtgagcaagcatggtttcttgacagcatgctaggacagggtttgtcttcttgcttatctttaacaagaatatacctgttcttttagcaatagggtactgttgcccttttggcctacaaaagccatttcttctcctaatatcttgatagatatgttgagtgctgttgtatctgtgtgtaactttgttaattttctctaacataaaagcagaggcttttcaccagggcaccaggctggcctctggtggtgaccaggggatccaacccccaagcccagctccactgcccacaggcgagtcacctggggccactccttccaatttagtgcacagcagccttctgctcaatgaaggggtccgttcttggaacctagaacctgtggtgtggagcctctgcttttgttatcttctaaaagttctaaaagttcatgatcttaagaccttgatgataatccaagatctgaattctaaagcgtctttcattgtttacttttaggatgaggaagtacagacaattggtcagatagaactgtgcctcactaagcaagaccagcagctgcaaaactgcaccgagccrggggagcagccgtmccccaagcaggaagtctggctggcaaatggggccgccgagagcyggggtctgagagtctgtgaagatggcccagtcttctatcccccacctaaaaagaccaagcattgatgcccaagttttggaaatattctgttttaaaaagcaagagaaattcacaaactgcagctttctaaaaaacaactccaaagtgaagtctgtttattttgctgtttcccctccatgcctgtgaattggatgttgtggtccctgtagagtgagtgcatgtggcgtacacggggagaaaggagctctcccacgcctgagtggctgttttgtgcttgggataaagctcacagattgtttttttttttctctattaaactcttcagtgccctggtagatcaggcaggcatacttggaatttagacagatggcaccgattcaggggactctcttgctcgagttttcccctcggagcctgttgccttcttggcgcagggaccctgtcaagacgaagagctccacgcatggcaggagcccacgctgatgcctggtgggcctggggggtgtctctagctcagactgggtctgttccatgtgaccagagccccaggacatcgttccttagccagctgctccgttgttggaggcctggtgtggtcacaggtgtgtcctagaacggtgactttgcccctcctgccctaggagatttgggtgtattcacagagcagccatctcctgtctccgtcagagcagtctcttccaggttactggaaggtcagtttctgtcaggcctcacttccttcttatcagagggtagccaggtccctgcactggtatctatttagaaatgtacatggagcccccagcgaaatgtgcctacattgtgtgttccagaaccggaggtacccttaccttctagatatgtgatgacatggctctcacgtcaggcagactgctgcacccacgctctcggcctgccgtgcagggatttcactcgtggagtgaggcatctgggggctgtgcagtgaggagctttccatgtgttgttaagacaacctgttagcattgtcttctcccgcgtctcctggcctcttctctctttaaatccttttctctgtttgtcttaatcacattaacgtcctatttatgttttattcaatatacatttaaaatagaacttactatgtgccaggcattgtgttcaacacgtgaaatatttaatccttagaataaccatattgtcagcataatttacaaaaaaaaaaaaaaacagctgtatcaatgcctgtgaatattcggctttactcgcccatttaaagaagagattttcaaattggctcaaaccaaaacctcacttcatggtgtctacaagacagtctgaaatgcagaatgttcagagagagacaaaggtttaccaggcagatgggacggtgagaaagtaggtgtcgcagtcctgatcctagactcagtggcctctgcgtcccccgcaggcattaaaggagacacaggacggcctctggccctctggaaacaagctctgcagtaagagcctgagacaggcagcacccagccaggcctgacagcttctgcagacagacagagtgagatgatgggggatttgatggaagcagtccctgtattttgtctcttctgtaatggaggagctgagccctcttctgcaagctgtggggaaggctagcggagcccaagggtccagggtccccaccttgtcattgtccctcggcccttctctgagctcatttctgtctccagtgtttttctgttggcttggcagggcaggatttgtttctgtcgggaactgatgatttgtgttttgatgcctgtgagagggacaagatctgatttgttttgcacctggaagggcgtgatttcctgcatttgctctgcgtcctcagggagtgggtgtactttagagttggactcttaagcctcagagtcctttaaatgatgtcaattctttttttttttttttttttttttgagtcattttgcgaacacagggatcaaggcttgggttttatcttcattattcccagaggagctggtgaatttgaacagacttcctattcaaattgcatttattttatagccttggggggtcaaggaaagcagctcttcagaggctgtctgcagtcggctggcctttgcggtttttaaagaagccattcttttttttaagtagcgtgtatttattatatgagtgtgagcatttgagagcggatggggacgccaacaaggtagcatcctggtgggaggcatgggctgcggagtgctggtttcctgccattgtcacgtcagctaaatggaagaaggcactggtgaggggctggatggttcaaaacatgagcacaagcaaatgcttggctctcttaatattcctattttggcctagagctcaggagcaggtagaacatgagcgtttgataacctgcctcagatcatgtaagtataaggcacttatgagccgcaggagacagaaggggaagactctgcgtttaaggttcagtgatggagatcagatccaagcacatgtttttacatcattaaacaagtaggtcgtgcattttccagattcaactcaggaagatgcaactctgaccacacggttctcgctgtaactgggcggaggtgactgagaaatgcctcccatgtgagcggggtctcaggctcgtatgtgtggaaggaggagcaggccaggctctgggatcagagctgggggtacaagtgtctcccagggggacaaaggagcaggcgcatctcaggatggagagcagccaggaggggcagctggcccgggtctcagccagagcaggcgtctgcctggagcatctctgcggcaccatggaaaagaggacccgtggactaggccacagggatgagtggaacttatggtggaaaaagacaccataggtaaaagcgagacaagaaaaccaggttcccatgaaactccttcagaccagccccttctcagcagggctattgctgtacccaagagcatttctcttggcctgggaggggacaatgctttgtcacctggaaagcaatgcctctctccaagctagtagtgggagatcattatgcgcttgaataactaacagtagcaattgtatcatattcagaactagatatcttttcttttcttttcttttttttttttttttgagactgagtctcactctgtcgcccaggctggagtgcagtggtgcgatctcggctcactgcaacctctgtctcctgggttcaagcaattcttctgcctcagcctcccgagtagctgggactaggcacgccaccatgcccggctattttttgtatttttagtagagttggggtttcactgtgttggccaggctggtctggaactcctgacctcaggtgatctgcctgcctcagcctcccagagtgctaggattataggtgtgagccaccgcgcctggcccaggtatcttatctttccaccgaaacttttgcctccatctcggtgaatgacatcaccatccgcttattccaggtagaaacctcaaagtgaactggaaactttttaaaaaaattttgcctaaattgtgaaagtattctgaattatattcagcttatccttctcattactgacttagttcaagcctcagtctcccatctgggccatgcattgactgccacgccacctgactgtcagtgctggacgctggcaccgtgtttgtgccactctccgtaaccaaccatggctctctgctcccagatcacacctccccagtatggcggctcagggacattccctcaatccctcctgccctgttggcagtgcctccacccactccccacagcccatgagggctctgcttagcacttccttgtgcctggattctccgcgcagtttgggtggcctggagtgctcttctgctcacctagtttagcaagttccatgggatatcaacacccagttccatggttggccgttaagagttcttttgcagtcctgggtggctctgcgcctccacgcccagggaccagggcctcttctcttccagctcttgttgtgttacatagaagatgccagctggatggcacaggggagggccgtacagtgtagatgcggacaatgtggcataggtgaggactggacagcagagacagtggctgcatgatggaggtgagggctggacgggggaggcaagggctggaccggggaggtgagggctggacaggggaggtgagggctgggcagtatagatgaggcctgggtggcagaggtgagggctgtgcagtgtaggtgaggacgggctggacaggggaggtgagggctaggcagtgtagatgaggcctgggtggcaggaatgatgcctggatggaggaagtgagagctgggtggcttgagtgagggctagatggcatgggtgagggctaagtggcatagatgaggcctgggcagcggagacatggactgcgcatcgtaggtgtcggctggacagcaagggtgatgcctggacagcagaggtgagggctgggcggcaggagtgagggctgggcggcaggagtgagggctggatggcgtagatgaggcctgggcagcagaggtgagggctgtgctgttccggttttgggctagacggcagggagaatgcctagatgactgggtagaggcctgggtgggagaagtgaggtctggacactgtgggtgagggctggatggcgtagatgaggcctgcgcggtggaggtgaggcctgtacttctcctgccactaaatcaagagctgtttattgattcattccacacttttttcaacccttcctatgagccgcctctcttctaggcactgggacatggccataagcagggatcttttcctcttgggcccactccaagagtggtggcatatgccaccatgcccggctaattttgtatttttagtagagatgggttttctccatgttggtcacgctggtctcaaactcccgacctcgggtgatccacctgcctcagcctcccaaagtgcagggcaacagacggcaagggaaaagaggagcatagctggtgcatttgatgctggtaggttggagggagggaggaggtcagagttatgaaggcggccagggaaggcttcctcggaacctgaagaaagggagacagcaactgcagggaaggatctgtgggccctaatggccacgtcacactacaaaggcccggactttgtccaactcgcttctgtgctccatgagtgcacctgtgtctgaggcacatcagctctaagccagtgttctctagtgatggagtgaataaatgaataaaatagaaaagagaggccgggcgtggtggctcatgcctgtaataccagcactttgggaggccaaggcaggcggatcccaaggtcaggagttcgagaccagcctggacagtatggtgaaactccatctctactaaaaatacaaaaattggccgggcatggtggcgggcacctgtagtcccagctactcgggaggctgaggcaggagaatgaatcacttgaagccaggaggcagaggttgcagtgagccgaaatcacaccattgcactccagtctggatgacagagcaagactccgtttcaaaaaaagaaaaaaagagaatgcagcactggtcccagtggaaggtgcctgctgttggcttctcaccacgcccagatgaggaaacatgcagatcgcctgttttcactttttgtttctgcgaactttggatcaggaataaaaataatttaatgcaggtcctaaggcagctgagaattgtaatgtaaaatattttcagaattcaactatattggctagatctatcactgcagaaggctggaaaagactcagaagttaaaatactacttttcctcacaagctctagctcctgaaatgaaattaccaggatacaatcacagatatgaagtcagtatttgggcgtctatagaaaagaagtccattgcattgcttatgggatgagctacgtttcccatagaaggggcagtagtgagggttttcttatctgaagcaaaatctctgacagatgatgagaaatgcagttttatgtcattttttttctgataagaattctattttttttttctgagtgactgtaatgggccttccatttattttagacaaaaaagacagaattagcattttaggctcagatgatagttattagaaagtttgagatgggccaggcgcagtggcttatacctgtaatcctagcaccttgggaggccgaggtgggcggatcacttgaggtcaagcgttcaagaccaccctggccaacaggacgaaaccctatctctactaaaaatacattagctgggtgtggtggcgggtgtctgcaatcccagctactcaggaggctgaggtgagaggatggcttgaacccaggaggtggaggctgcagtgagccgagactgtactcaagcttgggcaacagagtaagactctgtctcaaaaaaaaaaaaaaaaaaaaaggccgggcctggtggctcacgcctgtaatcccagccctctgggaggctggaggttgcagtgagtggagattgcgccactgcgctccaccctccagcctgggcaacagagtgagactccatctccaaaagaaagtttgagatggataaagttaagatccattaaatgctgtatggactttatgctgacgtgcttttcacatttcagacctgtgcattcttatgcatttacattccctttatttgagggagcaagaattacacaatcaccttttcctacccgcttttaacact

SEQ ID NO: 93217 - DNA, 112141 bp, Homo sapiens
  misc_feature (1)...(112141): n = A,T,C or G
gaactacctgtgtgacagtgggtaagtggcttgatgtctctggactcatttccctcacctgtaatataataatgttggtccatatgaatccttggtctttggcctcttagatactccaattggccagttatcttttgaatcaaactttatctactgaggcatactaaattattacatataaggaatggaggtgattagtgattcattatatccacaaacacctactgagcaaccacaatataaatgggccatgctagaaactggaaatataggctgggtgcagtggctcatgcctgtaaatcccagcactttaggaggcaggccgatgtggaaggaccacttgaggccaggagttccagacagactgggcaacatagcaaggccccatctctgcaaaaaagaaattaaaaaaagctgggcctagtggtgtgtgtctgtagtcccagctactcaggaggctgaagtgggaggattgctagaggctaggagttggaggctgcagtgagctatgacggtgccactgcactctagcctgggcaacagagaagatcctgtctcaaaatacataaataaatgacaatttttaaaaaagaagaaactggatatagtctctgccttaatagtctaggtggggaaaacagccacatgtgaataaataatatcctccatgcattaggtggttgatctgtttacaaaacgctcttggtccacagaggaaggctttacctctacctggatggattaagaaaggcttcagagaggtgagtataacagggctggatcttaagggcatggctgaacttgtgagtcgaagtagagaaggaagggtgtttccaggatataaggatcaaatatccaaaggagtggagccctgaacatatccactatattccaaccccatgcctctgtacagctttgcccaacctaggacacctcccttcctccttgctgttcacatcccatccttccttagagggctgcagccctgaaaaaacatagcaaatggtttcaagtggccggcctgaaagatctcatggggctacggacagagagaagctgtagaggtgagtcagggtcaggctgggaaggaactgttgggccaggttaaagggttcaaactcgatcccaagggcgccagggagccactgaagggagatgaggagcagagtcaatagtcagattttctgtacaaagttgactctgggccaggtatggtggctcacacctgtagtcccagtactttggggggctgaggcaggagcattgcttgaggccaggagttggagcccagcctgggcaacattgcaagaccgagtctctacaaaaaatttaaaaaattagctgagtgtggtggtgtacacctgcagtctcagctactcaggaggctaaggtggaaggattgcttgagcctgggaggttgaggctgcagtgagctgtaatcatgccactccagcctgggggacactccagcctgggggacagagtgagaccttatctcaaaaaaaaaaaaagttgattctggggtcaatgtggacaatggatgaagataagaggtcaagaccaaagactcagggaccagttaagaagctgatgcagcggagggttagcccctattcactcccagcctttatgccctgagaatagctgattctattacagaatcagttgagatggattcccgcagagagcaagacacgttccctgtgtctgccccaaacaacccaaagtcttttgaaacctctactaggatgggaaagcaccaatgcgatgggtgaaggtttctggtggtctcagcttatacagatcaaagcctttccaacctggtttcctcccggagaaatccatggatctaacgccctcttccaaacacagagatagaaagtgaggagaactattaggagcagggctgcaatcccagctatcgggaggctgaggcagggagaattgcttgaaccggggaggcggaggttgcagtgaacctagattgtgccactgcactccagcctgggcagcctgggcgacagagtgagactctgtctcaattaaaagaaaaaaaaaaaagaaaagaaaagaaaaagaaaagaaaacattgcaaaccaatgggaagggatgtattattcaataatagtaatggaaaaattaaccgactactgtatttagatctcaagttggggccatctcataacatccaaataaaatgaacctcatttaatgtgttcctatagttcagtctgttctcacagcaagctctggagcctgagttgtaccacaaagatattcttaccttgaggcaaacttagtctgacctggaggccctgatagccattgcccctaggactgggggagggatggtcataactccttaggggaaggggcgcccattcaacctaaggcaattctctggagaaggggcagcaatgaactgtcagccaccagccctcaagaaacaggcagagtacggtagctcatgcctataatcccagtactttgagaggccgatgcaggaggatcacttgagcccagcagttcaaggcttcagtgagctatgatggcaccacttcactccagcctgggcaacagagcaagacctcatctctctcttagaacaaaaacaaaaacaaaaacaaaaacagcagcaaccagaagatggttatccctcatggtgaaggggatctgggcagggcatccccgcctctgctacagggagggcctattaatattatcatccccatattacaaaagaggaaagcaaggcctgagaagtgaaggaacttacccatgcccacagctggaagtgatggtatcaaggtctgttgggtgtcactggctgttgctggaagactaagcagctattgaaacagaggaccagcaaggaacttggagaaaggcagagctactgagtgaatctccttagaaaggggtggggaaggccgaggcgggcagatcacgaggtcaggaaatcgagaccaccctggccaacatggtgaaaccccatctctactaaaaatactaaaaatacaaaaaaattagctgggtgtggtggcatgcgactgtagtcccagctacttgggaggctgaggaaggagaatcacttgaacccaggaggtggagtttgcagtgagctgagatcacgccactgctctccagcctggtgacagagcgagactccgtctcaaaaaaaaaaaaaaaaaaaagtgggggtggggacacgaagggacagggctgcaagttgctcacaattactttgctaaagccaagctacagaatgacatctggattctgtaaattcatgtataccatgcttgaggactcatgccgcatattccacgtggtgctatagaaaaagttcgtggtgctatagaaaaagttcaggtactgcacgtctcttgacgatgatggtgttcactaagcctcctaccagctctgtgactttgggcaagtttcttcacatctctgtgcctcagtttccttatctgtaaaatggggataatcatataaatggggttggtgtgaggattgaacgagttagtatttgtggggttttttggttttgtgtttgagatagatggagtctgtctctgtgcccaggctggaatgcggtggcaccatcttggctctctgcaacctccgcctcccgggttcgagcgattctcctgcctcagcgtcccgagtagctgggactacaggcgtccaccaccacgcccagctaatttttgtatttttagcagagatgagtttttgccacgttggccaggctggtctcaaactcgtgacctcaggtgattcgcccacctcagccttccaaagtgctgggattacaggcattagccactgtgcccggcctgcaacgttttctttttctttttttctttttggagacagtctcgctctgtcacccaggctggagtgccggggcgtaatcttggctcactggaacctccgcctcccggattcaagcgattctcctccctcagcctctcgagtagctgggattacaggcatgtgccaccacgctaggctaatttttgtatttttagtagagacggggtttcaccacgttggccaggctgttttcaaacccctgacttcaggtgatccgcctgccttggcctcccaaagtgctgggattacaggcgtgagccaccttgcccggcccgcaatgttttttctttctttccttctttctttctttattttattttttttttgagacggagtctcgctctattgcccaggctggagtggtgcagtggcgcgatctcggctcactgcaagctccgcctcccgggttcacgccattctcctgccttagtcttccaagtagctaggactacaggcgcctgccaccacgcccggctaattttttgtatttttagtagagacggggttgcaccgtgttagccaggatggcctcgatctcctgacctcgtgatccacccacctcggcctcccaaagtgctgggattacaggcgtgagccaccccacccggtctttttttttttcttttttgccggcccgcaatgttttcttaaactttttatttttagctatcctgttgaggttcttccagatgaattttagcctctgacccaggggtatgatttgataggcgtggagttctggttacttcttaaatgaagagtttccccaggatatctgaacaattctcttgggtggaagactcaaggatcatgaaaacgaaaaccaaattctagtcggctcctaaagtccttttgcctcctgcggttaccatcaaagagctatggtcaaaattccaagggataattcagggtctgattccactatatatccccagaccgcctatacataaatccatattattggagatttacgcttaatcctataatcttttacctaacagctgtccagtagaattttctggatgtccaataaggtagccgcgtgtagctcttgaacacttgaaatgtggctagtcccctagaggaacgggattaatttaaatttacatagctacaactacttatcggtcactgcggtaattgttaagactggttttgcctgtaacttgcatatgttttattggacatcagtttcaatatttcatttgcattgctaaaagtcaaaatccttttgactttgccagttactcagtgagaggacagttggagccagtttctgttctaggcttacagttttaaggacagataaaggttagtttttaacctcgagatgaacagactgttaagtttctacggacttgcccatggggttccacagtgagcctgggccggggaggcaggtactgtgtcagggggaagaaaaaaggggcttctagctgggcaggtgacacacagggcataggaagaggtcagttcttgtggccgaggaggtccggcccgggggtcccaggagcagagatctcccttctcttcgatgtggaaagtgaggagggagcagagccttgctcagaaacggagctcccccaatcccccaccgccctagctactggactggaactaggatggacacgaatgtccttctcattgtactaactgcactcaacaagcgggaaagatgaagcgagggggtttaaatgtgtgcgtttgttgaatgacccacaaaaactgaaggagcgcggccggactgatcacactccttgagacaaagcgggtgggagacccagaggtgaggagggtggtcgcctgtgggcgaggactgggaggccaggggttctcggcgaggcggtcccaggaggcggcgcggagccgctgcgaggccgcagggccgggtcgcaagatggccgggccggcctcccgcgcgggtcgcgcgggccacgcgggcgggtttcagatgttccgggcccgggtaggggctggcaggagagaaggggccggctgcggggagggctggctgagaagaagcgaaaatgggcggttagcagcagggacccggagccggaggagccgagagcagcgcgtgcgccgagctctactgcctcgcgggaaggcggaagggtggggagggcggcgctcggggcgggaggcccggccgggtccgctaggacagcggggccgctgggaagttgtgagagcggcgctcgggggcgcgcttgcgtgcacgagggcccgggccgcgagcagccgcggcygtcccggtcgccacccttagcagcggtcgmggtcggtgccgaagcggtgttccccgccttagccgctggcgcctcccaagagagcggccggtgggccckcgtcctgtcagtggcgtcggaggccggcgctgcggtggccgcgcccttctggtgctcggacaccgctgaggagccggggccgggcacggctggctgacggctccgggcagctaaggctgcccgaggagaaggcggcggccgcggcgtaggcgcacgtccggcgggctcctggagcctggaggaggccgaggggaccatgtccgggaggcgcttccacctctccaccaccgaccgcgtcatcaaaggtgcctggcgggccgggccttcctctgggacccgcgggaaacggccttcggctgggcggcggctcggggcggagggaggctggggccgggctgcgcccaccctaggagggctcggaggggtgtagacagagccgggcggcagcctccgagagcagccacccggacccggcgttttctgctgcacctggtcaggtgcctggccgtcagtgccaagttccctcccgaagggttcagggtgcagtggggacttcttctcccaccgccccgaagggcccggatccctgtctttttttctctttaagaaacgactcgggggaagccatcgggggtggtgtgagcagggagtcgactcttccaagtaagatatttaagattagatctttcttgdcgtccgccccccacccttttttaggacgtataccatgtgccttttgacccgctttctctagatcattgcaagtcactgctattactggaataaacttagtatgaacaagtcagataaatccattatatgatgtttaaaataagtttacggagctcttgacagggtaatggtattttattttccctttggttataaagacttggagaatgacgttttctgattcatatgtgtacctgcgttagatttctgttgttgttataagaacaaaatgtaaagggctctttgctctctaaatcttgtagagttttaggttatagttgtttctccctttaaactaagaagatggattacacataaccactaatttatgtgctgcttttattcagcsgtaagtcttaggcacaacccttctctctgagattaacaatcggtttgaaagcgctattttgtaagaagggaatagacttagaccagctgtgttagtggcctctggatgcaggggttagcgtgacagtggggaaaattattaagatacttttcttctttttcattttggtattagaargagaaaggcaactaatactagtgacgggaatacatttttaaaaggtgaaacgccttattgcatgttcagggagggggaagaattttagtgtataacttaggtttcccccctctctccccaaatcagcctcataaatgtkaattatctgtactacataattataatgggatttttgagatttatctgcttagcatttgtatgctatcgttagaggtttaactgaattgttcatctaactgacattatcccctgaacagctaaattattgtgaccatttaaatgtgtcttcatattattagtgtatagcctataagaagtatatagccctctcttaagattcagagtgtacttaacataaccttttttgaggaatcaaggtcattatgtacattaatttctgtactgtgctgttaatatggccggtgcgttctgctgtataaagttgttagcagtttcgtcctgtactaaaatgacttcgcaatgctataccagttcagtgttttgtttgcttttagtttctctctccagtactgttttctgtcaaaatatgcccttaactgctttctaatctgctacgtcttagctgaagtaggcagggaaaccagataagccagaactgtgggtcaagtcagaataaataggatcttagtraagcttagtgcagccctcaggaatctcacaatcaaatcaccattgtgccatgtaatttccaccataacatgccataagatcaaaagaagattaaaaatcttaaatgacccttaaatatagtaataaatattgtaaaataaaatgtaataaaataaaaaagttaaaatgcaggggctaggggcaggcatggtggctcacgcctgtaaccccagcactttggraggcccatataggcagatcactgaggtcaggagttcgaaaccagcctggccaacatggcgaaactccatctctactaaacatacaaaaattagctgggcatggtggcgggcactgtaatcccagctacttgggagtctgaggcacgagaattgcttgaacccgggaggcggaggttgcagtgagccaaaatggtgccactgcattccagtctgggcaacagagtgaaactctctctaaaaaaaaaaaaaaaaaaaagcaggggctggtttattgctacgcatgcttattattaaataaacactgtcatcatatcctgcaggatgcraatttgttctttaccaaaattaattaccgaatattgtgtacttttaagactgctcttaaataaatgaaatagaaataatttcaggtccttagaatgtatggatttctctcctatataaaaacttcggcataagagcttgaccacagcatttgtggcttcatgatgacttatggtgcttttttcagggttttccagagtttgaaatagttgaagaaaatgaggtgtcacgtgtgcatagctaaggtccattgtaacgggtactaaaccctggtctgatgctatcttgtttagtcacagctgtctgcatttattcacagcttgaaagctttttcagaggtgataccacaccccagctatttttgtttctgtcatttcctgttaactttaaagtgtacctaattgttctatttgagcaaattttggagaagagtgggtatgtgggagaggtttgtattttaggtgtcctttaaatagcagctttcttaaattgaaggatgtggctgggcgtggtggctcacacctgtaatgccagctacttgggaggctgaggcaggagaatcgcttgaacccaggaggcagaggctatagtgagccaagattgtgccactgtactgtagcctgggcgacaagagtgaaactcagtctcaagccaaaaraaaaaaaaaaactcatctgtaaaatagggttaataataccttccctgtcaagcctgggtcatgcaagtgacataaagcatgtgaaaaggtcaagttaaggtagtactttgagacatgataataggttggtaatagatcgcttactacagaagtagttagtagagatatcattaacatttgaaaatatcagaaagtatgtgaaattataagctacaaaactgttcctagtcaggtgaatacctattctacagcataatggatatgtgggtgaaatctcgtcggtaacaatgtgaagagatcagcacagttctgtctggtactccctaggcagcagatttcttctctatctgttgaaggtgtttattttatgtttaaaccttcttatgattttactcattcattaaatgtttattgagtgccatctgcaatgtaccctagtaggttgctcattcatttcttctttgctttaaaagtagcatttctgtgagcctttrgagcagtttatatgcactggggcaccataactggtatctragccagagaactaggcacccaaatgattaaattgtgatattctgtctgctttatttttttttctagtttccacgttccttttcctgtttaaggacatgttttttctttgacagtgatttttataaaagcagtttatttccctggaatgaatcttttcagaagcaacaaggaaatttcagtaggaattacatgacaaatatagagaatccattgtcttattttgttactttatggccagatggggtttaacagaaaagtcagatttctttttagtaaggtgctgatacatttctccctttctcttagaattcaaatatattgtgtattcacagagtactgtaccatttttaccacacatggcaggctactgtttctttaatatcgtggcactgggaatattgtgcttatggctttcttaaaatattttaatattagtgtggacaaaaattgctatttctacaaatataccctaaacccgatttcaatctctggtacctatacttcatttctttccacaactctcccccgactctcccttttttatatccataatggatttaccgagggtttaaaattttttctcttaaatataagcttaatcctgctacttatacaatttgaaaatcagaaagggaagaaaagaaagacttcatattccttcccagcagaaataactgcttttaatacctttgtgtgtttccatctgcaggtatattttgaattcaaaggaaaatggatcacacatattaaagcttttgttatgcaaatatttcatattattttaacataaatattgtaattttacctaaatatttccataatggtttcaatcagcatggaaatggttttagagtgcttatattaatattttggttctttatattttcagtggggacacattagtcacttgatacaataccaacccagaagaaacattttcaagtataaattttcaatgtgaatacgttttaaagttgatatctcctggatttgtcaacagtatttgtttaatttatgcttcatttaccattgtgattaacaagctgccaaacttttgaaacattcaaaatcagtgctaatcgagattcatacatctgagtagaaatctggaacctctgaaagggcatcttaatttaaacacttaatttttttctttttgagcaaggataaagtattctttcttacctatacgttattggttgtgatcaaagctttatttatggtctgacatttgataattaagctttctctcttttattgcattttaaaataggattaaaaattttttttgccttacgtaatttttagtgtaccataacttttactggagtgtatatgggaaaatgtacaaattataaatgtacagcttagtgagtttttacaaatttagcacccacatacccatgtaaccactcaaccaaaataaatagattaccagaatcccagaaacaagcatgagttcacgttcagtccactggtttccatccctaaatgggcaacagtggggaaaatatgacacttgtaaccattattctggcgtctaacgtcatatttgtaaagtaacatactaatcacatcttactgtaaagtgaaaaaaacaagggactctgagagaaaaatgctaaggactcattacttaaagtgaaataattaattaaagaccttttcctaagcagtatttgatactaggaattgaatgtctttctattaaggtaacatttttggaaaaagctaatttttaggccaggcgtggtggctcacgcctataatcccagtactttgggaagccgaggtgggtggatcacctgaggtccggccaacgtggcgaaacccagtccctattaaaaatacaaaaattarctaggcatggtggtgcacacctgtagtcccagctacttaggaggctgaggtaggagaatcgtttgaatctgggaggcagaagttgcagtgaactgagattgcgccactgcactctagtctgggtgacagagcaagactctgtctcaaaaaaaaaaaaaaaaaaaaaaaaaaagctgatttttagacatgtctctattagagacaaaattattcatttaattccgggatttgtagtcattttggaactttgctgctacttaattgctaaatgactaatgggaataaagggatgtcttagaatcattaccatcctttggtgcaatcattactagactataatgcccgtttatagttttttttggtgggggacagggtctcgctctgttgcccaggctggagtacagtggcgcgatcatggctcgctgcagcttcagcttcctgggctcaggtgatccacctcagcctcccgagtagttggaaccacaggcatagcatacgccaccgtgtccaactaattttttttttttttttttttttgtgacagagtctcgctctgtcgtccaggctggagtgcagtggcgcaatctcggctcactgcaagctctgcctcccgggttcatgccattctcctgcctcagcctcctgagtagctgggactacaggcacctgccaccatgcccggctaatttttttttgtatttttagtagagacggggtttcactgtgttagccaggatggtctcggtctcctgacctcgtgatccgcccgtctcggcctcccaaagtgctgggattacaggcgtgagccaccgagcctggcctaattttggtattttttatagargtggagtttcgccctgttgttgaggctggtcttgaactcctgggctcaagcgatcctcttgcctttgtctcccaaagtgctgggattacggtgtgagccactgcgccctgccttttatagtcttaatgttaaaatttagcagcattttacatttcaaaactgaggcctaaaactttcaacctaacctaagtggtatctttcttagttacccttatattctatctggttatccagatgaatgtagagagaacttttagttccccatattcaattttgttttgttggcactttagattatcctgaagtcttttagtttcttgagtcttcgtttgttgtttgaagagggtttaacttggtaaccaggatctttaaattgggcacagaaagatatactggatggctggacaagataatgtatttctttgatgatcattactagatttactaattgctaacagttcatgaaggtttttttgcagtgtcyagacaatgtcagcccaagagactgaaattctaaatgaacaaacactgagaaatatttgaagaattcattcagtaattacctatgtaacattcttgctaaaggtgtttaatttaagctgagcttagttatagtagacaatcagacaaatccagtttgtgggactttctacaagacagttggcctgaactctaaaaatttcaaagtggtgaaaacgaaacgaaacaaaaagggcaggaagactgttctagatgaaagaagttgaaagagaaatgacagtcaagtacagtgtcaagcctggattaagaaaacaaaaaaccatagaggacattttggggataactgggaaaatttgaatatggtgtatatattagacggtattataccttttttttgtttttttttttttttgagatggagtttcgctcttgttgcccaggctggaatgcaatagcgtgatctcggctcaccgcaacctctgcctgccgggttcaagcgattctcctgcctcagcctcccgagtagctgggattacaggcatgcaccaccgcactgggctaattttatatttttagtagagacgaggtttctccgtattggtcaggctggtctcgagctcccgacctcaggtgatctgcccacctcsgcctcccaaagtgctgggattacaggtgtgagccaccgtgcctggcctatatcattgttaaatgtcttgaatgtgactatatggtattatggttatataggaaaatgatcttatttttaggcaatacctgatgaagtattagtatgttgaaatgtcgtgatttttgcaatttgcttttaaattgttcaaaaaaaaatcatttgtagagaaaaaagcgaaagtggcaaaacatttactatggtgaatctaggtaagagcatatgggtgttcattttatgattctttcactttttaaatagatttcagtttttcaaaatgtaaagttggggacagccaggcatggtggctctcgcctatagtcccagctgcttgggaggctgaagcgggaggattgcttgaggccaggagttccaaggcttcagtgaactatgattgcactactgtgttccagcttgggtgacacagtgagcacccatctctatttaaaaaagaaaaaaaagttagggagaaaaaaagtacaatgaagaaatggcttggctgggcgcagtggctcatgcctgtaatcccagtactttgggaggccaaggcggctggatcacttgagctcaggaattcgagactagcctggcaacatggtgaaaccccgtgtctacaaaaaatataaaaaattagccaggtgtggtggcctgcacctgtggacccagctacttgggaggctgaggtgggaggatcacctgagccaggaggtggaggttgcaggttgcagtgggccaagatagcgccacactccagcctgggtgactgagaccccatctcaaaaaaaaaaaaaaaaaaaaaaaaaggaaatgcctcaaaacagctacagctaggtttaggaaaggctgtcatcatatttgaggattccatagtgtcttaatgggggaaagctgaaaagaagaaaatgagccttaaagaatattatagctgatgtgaagtggaggcagcttgtttagcagaaaaagtagtggtttcagctgcatgatgggggttagaaaaacatacagaagtcagtatggagaaagaaaaggtacttaactaagaagtagagagaagatgggcaaactagaagggccagagaactgaaatacataaaatgaagaaaaagaagagggatagttgaaaactggtggagcagttgacawyaatttcattaatgggacagcaagactattttgatgactgttatttttttcttttcttttttttttttttttctgagacagagtctcgctgtcgcccgggctggaatgcagtggcgcaatctcggctcactgcaacctctgtctcccgggttcaagtgattatcctgcctcagcctcctgagtggctgggattacaggtgtgcgccaccacacccagctaatttttttttgtatttttagtagagaaggggtttcaccatgttggtcaggctggtcttgaactcctgaccttgtgatctgcccaccttggtctcccaaagtgctgggattacaggcgtgagccaccgcgcccggctgtgatgaccatgttttaaaaacccaaaacaaatagacttataaacctattctgaaatcatagaaaatccaaatattacccagacagttgatgtggaaagtggaatagctatgtttttaattttattgaagagattgaagtgaaaaaaggggtggtagtgggataaagtaaatattaacactaatgagtagaggagaaaaaaaggattttctaagtgtatttttcatccctgttaattgcaccactcacccatttagtcactgattcagatgaccagcctgggaatcaggccagactctttcttctccattttactgcatgtccagtcccaccagactaaatgctgtgaacctttggtttgtacatatcctctacttcatcctattctcacaccttttgcttgtgccattgcaggagcctcttgctgagactatgtagtctgtccacgctgtcatcgtgatctgtgaacwatatcaagggtcattcttgtgctcaaaatccttcatgagcacttcctgcctgtgggataaactctttgttgatgggcagtaccctgcatgctaaacctctctaggcttgtgttccatttcttcctcctcatttcacaaccctcatccccaacctactttatttttatttatttatttatttatttatttatttatttatttatttatttatttattgagacggagtctcgctctgtcacccaggctagagtgcagtggcgccaccacggctcactgaaagctccgcctccggattcacgccattctcctgcctcagcctcctgagtagctgggactacagccacgcgccaccacgcccggctaatttttctttttttttttttaatagagatggggtttcaccgtgttagccaagatagtcttgatttcctgagctcatgatctgcccaccacggcctcccaaagtgctgggattacaggcgtgagccaccgcrcccggcccatttatttatttttgagacagagtctcactctgtctcccaggctggagtgcagtggcgccatcttggctcactgcaacctccgcctcccaggttcaagtgattctcctgccccagcctcccgagtagctgggattacaggtgcatgccaccacgcccagctagtttttgtatttttagtagtgatggggtttcaccatgttggccaggctggtctcaaacttctgacctcaggtgatctgccctcctcggcctcccaaagtgctgggattacaggcgtgagccactgtgtccggcccccagcctcctttaatactacaggttgagtgttcctaatccaaaatctgacattctccaaaatctgaagctttttgagtgccagatgacaccacaagtggacactttctttcctgacctcatgtgatgggttgtaatcaaaacctggggacataacccaaagttttttcagtgtccccaagggaaaaagaccctcccagcccccttcggttgtgatatatcttttccatgcacagcatgatggtgatgtccaggcaaccacagattgaccacgtaggtggctaagggtagtgacacatttgctttctaattcagtgtacgcaaatttattttgtgcacaaaattattaaaaatatttataaaattatcttcacattctgtgtatatgaaacataaatgaattttgtgtttggacttgggttccattcccaacacatctcattatgtatatgcaaatattcccaaatctgaaacaatctgaaattgaaatgcttctggtcctaagcactttgaataagaagtcatacttgtcgtcctagaatgttttatatctgtgaatgggctctttgcttctgtgcataatggttttttttttttttaacakttttagagataaggcctcactctgttgtctaggctggagtgcagtaatgcgatcaatgctcactgtggcctcaaacaaactcctggcctcaattgatcgtcctgcctcatccctctgagtagctgggactacaggcgtgtgctgccatgtctggctaaatgttttatttttattacttttttgtagtgacagggtcttgctatgttgcccagcctggtctcaaactcctggcctcaagtgttcctcccacctcccagagagctgggattacaggcatgagccactgtgcctggccctgcgtagaatcttgtccctcagcttgaccagctcctgtttgtttttcaagatttagccaaggggacttctgagaagctttttcttctctgctaagaagctgtggagagtaatggtttgagaacatgggcttcagtcagacatacctggattcaaatttctgtttgttttttttttcaaggagatggagtcttgctctgttagccrgctgaagaagtgcagtggcaccatcatagctcactgcagcctcaaactcctgggctcaagtgattctcttgcctcattctcatgcctggcactacaagcatgtgctactatgcccagctcaaattcttttagtgatgcatgaccttagataaatcacttacacttgttttacctgcatttctttatgtgtagaagagggataatgaaacttgcagtggcaagcacatagtgagtactccatatatgttatggtaggtgctgctgccgccwtcgctatcatcatcatcatcataagaattactgtctcctatgagctcccataaacaatctcattgctttgcaaatcgctttaaatattttcttgtcctttcttcacaataaactcctctctttaagggcaaccactgtatccttaatgctgaatgcagtgcttaacacacgcttaggtgcttagtaaatatttaagtatgtgcaagcataagaagcttattttatggatgacagtgtaagaaagagtacagactctgctgattaccagccgtgtggcctttgagctttgttatttattttccttgccacaggtgtaaaatgggagatagtgcctacctcagaatttaaagattacatctcatattgtatgtaaagtgcttagcataatgcccatagtgggtggttaataaatgttagctattatttaaaaaataaatcaatcttggatcttggcgagatttgacagtagatctattttactttaagtgacatgtgaaatgaagatttaagagtactgtattttatatagtcacgcttacatagttgcttaataattcggagttctgacaaatgcatccttaggcgatttcatcattatgcaaacattgtayagtgtacagttatcccttggtatatgtgagagcttagttccaggacccccacatataccaaaatccctgaatattcaagtccagaagttggccctgtggaacctgagaattcaaaaagttggccctctgtatttgcaggatggggttttgcagcctgtgtttggttgaaaacatttgcatataagtgaaccagtgcagttcaaacccatgttgyttgagttaaccatacttatacaaacctagatgttatatatatctacaaacgtagatgttacacacctaggctgtatggtatatagcctattgctcctaatctacaaacctgtgcagcatgttactctatttaatactgtaggcaactgtaacacaacagtaagtctttgggtatctaaacatatctaaacctagaaaaggtacagtaaaagtacagtattaaagataaaaaatggtccacctgtggagggcacttaacatgaatagggcttgcaggactggaaattgctctgggtgagtcagggagtatgtggtgagtgaatgtgaaggcctagggcattactgtagaacaccgcaggctttacaaacactgcacacttaggctatgctaaatttataaaatatttttcttcaatagtaaattagccttagcttactgtaacttttactttataaacttaaaaatttttaaactttttaactcttgtactcatacttagcttaaaacacaaacacatatagctgtacatattttctttcatatccttattcttataagcttttacgatttcaaacatttcttatttttaaaacttttttgttaaaaatgaacacacaccacatacattagctgaggcctccagagagtcaggatgatcaatgtcactgtcttctacctccacctcctgtcccactggaaggtcttcaggggaattaacaggcatggagcagtcacctcctatgacaacaatgccttctcatggaatacytcctgaaggacctgtctggggctgttttacagttaccttttttttgttgtttttgttttttgaataagtagaaggagwatactctaaagtaatgattaaaagggtggtatagtgaatgtataagccagtaacatatttgttatcgttatatgactggcagtgcagtaggtttgtttacaccggcagtaccacaaatgtgagtagtagtgccttatgccgtgatgttaagacaggtgaaaacatcactaggtgatagaaacttttcagctccattataatcttacaggatctctgtcatatatatatagtcttgtagactgaaatattgctatgtggcacatgactgttttctaactttagtcttagatattgaaaggatttaaggctgggcgcggtggctcacgcctgtaatcccagcactttgggaggccgaggcgggtggatcatgagttcaggagatcgagaccacggtgaaaccccatctctactaaaaatacaaaaaattagccgggygcggtggtggacacctgtagtcccagctactcgggaggctaaggcaggagaatggcatgaacccgggaggcagagcttgcagtgagccgagattgcgccactgcactccagcctgggcgacagagtgagactccatctcaaaaaaaaaaaaaaaaaaagaaagaaaggacttaaacctaaaatgcttaagaagaaaaatgatgaaattttccttttctatagtatagatagaattttggaagtgatgtattcataaatatttgatgagttcctattacatggagcacatttctggttatgcttagaagggttaaatactacttgaaaagtactcatgcggtgtagcatataatagcctctcaaaaatgtcacagaaatttagaactatatagtgacctatgactaatcccactgcaaaaggagcaggtgactaaattgtagacaatacctggtgtgaaatgtttgttcccttgatctataaattgataatcctttaatgtttaatctgactgtgactagtggcctgaagaggtaagacttttgtgtttttttatgtgtgtgcctacgtatgtttttttcttgtgacctaaggctttgtggaagtttaaaatagagtgattttaatgaatggctggagtaataaagatagttggtgggcttctccatggaagcaagttggttatttttaactactttgcactgctttatggaaaacatatgccactatagaagttattgtttctgttgactgtgactggtggtggttattacttagttggttctaggagggccagtttttagctaatactttgaaagtgagttctgtgactattattacttagttggttctaggagggccagtttttagctaatactttgaaagtgagttctgtgactattattacttagttggttctaggagggccagtttttagctaatactttgaaagtgagttctgtgactatcaaagaccagaggaataatctcaaagaagctgatcagatcatggaactaaagtcacttgttctggtgaggaacagttgaaagggcacataatacttttggtaataatatttaatgtaacttatttagcagtgcgtgttcatgattggcaaggcaggtgagtagattaggaaatgagtctgaaaaagtagggcaggactgctggcttaaaataggagtgaaagcagtgaacagacatagctatttaggcaaatcctagtgtcccatgaggataagactaccacaataatctaaaaataatagcttataggccaataacctttaaggtttatgtttcatactcaccgcaggtcaacccatgtggctgtttctcatttatgcagatctacatcagattttacttgtgtttacctgaaaatacatattgtttatgtagtcaatgtatattgtagtagcatacagaatctgatcttgaaaaggttgcagaatttcttgagtgtactttaggaacttagtttttcaaaatttatttaatttttattttgataattatagattcacaggaggttgtaaataaagaaatgtaaagggargtcccaaacacctctcccctaactcccttccctctctttgccmgtgtcagtatcccacaccaccacacacagtagtataccaaaaccaggaaattgacattggtacagtccatagagcttgttcagatttcaccagttatacatgcattcctgtctgtgtatgtgtgtttagctttacacaatttcacatataggtagcataactaccagcacaataagggtactcaacagtaccgtaaccacaagatttagttacttcccctgtatagctacaccagtcccccttctccacgggaaactcagttttatagtttggctattgtttttaatcatgtgcaaacctggtttgattaaggtttttgcttctgatttggaagcattgttaaataatttttaatgaaatacaggtaatctgaaagcagctgacacatggtaaaaagctagatttgggaacactgaaagacttcttggatgcataggcttagaatgattctcagctgtgatttatttcctccctccctccctccctccctccctccctccctycctcccttcctcccttcctccctcccttccttcccctccctccctccctccctccttccctccctccttccttccctccttccccctccatcccttcccctctctcaatattctgtaatattgaaatatttcgttaaaaatatacagcatattacatatatatctgaaattttctcctttcttccttttagtataccytctatttattttggtaccaagaatagagtgctgctgtaacaaacacctaaaagtgtggaagtggctttggaacttctgaaagacccagcccaagtcccatcttcatttatttatttatttatttttaagaattttttttccmaggctggatctcggctcactgcaacctccgcctcctaggttcaagtgattctcctgcctcagcctctggagtagctgggactacaggtgcacaccaccatgcccgactaatttttgtggtttttagtagagatagggagggtttcacgatgttggccaggctgctcttgaactccaggcctcaagcgatccatctgcttcatcctcccaaagttctggaattacaggcatgagccactgcacccagcccaagtctcaactttctcatacacttaattgatttctgtagctatcgttgatttccccctttataatcttccgtacttacagtctgaaccatacaatgtactgcttaactattctgtgtttatatcttgttttatgcgaattctactcaactagagcatatgattcttcaaggtagaataaatgtgttaaacttgtatatttcggccgggcgcagtggcttacgcctgtaatcccagcactttgggaggccaaggcgggcggatcacctgaggtcaggagttcgagatcagcctgggcaacacggtgaaaccccgtctctactaaaaatacaaaattagccaggcgtggtggcacatgcctgtaatcccagctactcaggaggctgaggcaggagaaccgcttgaacctgggaggcagaggatgcagtgagccgagatcgtgccattgcactccagcctgggcaacaagagtaaatctccgtcgcaccaaaaaacaaaaaaaacaaaaaaaacacacaaaaacaacttgtatatttcacacattacccatacaatgtgagcatgtagtaggtaccagataaacatttagttatttaactagaatataattactgctctagtattttttccctagcactttcaaacgttactcaaagaatccttctagctctttgatacaaattttagaacttcactattaacaaatatcagctgggctcggtggctcacgcctgtaatcctagcactttgggaggccgaggcaggcggattgcttgaggtcaggaatttgagatcagcctgaccaacatggtgaaaccttgtctctactaagaatacaaaaattagctggccgtggtggttctcaactgtaatcctagctacttgggaggctgagacaggagaattgcttgaacctgagaggcagaggttgcagtgagctgagatcatgccactgcattccagcctgggcaacagagcgagacaccgtctcaaaaaaaataaaaataaaaataaaaataaataaataaaataaagtaaaataaaaatatatatatatcactactagctaggattttaggaaggctacctatagaaacttagatatatttagttatggaatgttttgtttttcagttggtaatgtacactctttcagtgtttcaaaggaggatactggataattcgatttgaattgtaaatctccccaactggtgttggagaaaccagaggagttgatgattttatacacagtctttcctacctcttattattgagaaaagagtgttaattgtggtcaatgaatttcttcaaagtttgctgcttttaaatcaaattaaggaagtcagcaactataagtagaatgatatgaataaaatgtttcattgttatgaagaagtgttagtagcacgtggcattatgtgtttcacatattgaagttgacaccagaaatatacatttgtaattttttttttttttctgagacagagtctagcactgctgcccaggctggagtatagtggtgcagtcatagctcactgcagcctggaactcctgggcccaagtgatcgttccgcctccacctacacctcccaagtagctggaattacaggcacatgccactgtgcccagaccattttagtgatttgttattttttaaatctctattctctttttaatacagagctgcaaatttcttacttttctttagtgcaatccatgtgtgaaatatgtgttataatttgtaactaacaatatttgaagtcctgaagtttttgaatgatyttgtatgtaagattagagtagattcatggttcccactaataaccacttcattattatcactttgttatgtgtgtgtgtgtgtgtgtgtttaaagagataaacttataggtggtttatctagaattgtgtaaaatactttcattttcatgagagagtatcttgcatgtgagtattatttgtcacatgttatgcctacattgttggttggacttaaactttagtgacctctcagagattattttcattctagttcatgtcatattactttgatatatgtattaagaagaagtacaagagattatttaatgctattgtctgaatgtttgtgaccccccagaatttgtatgttgaaatcctaatccccaatgtaatggtattaggaggtatggtcttggggaggtgaagtttttataaatttctaaaagaaagtataggaaaaatctttgtgactttggggtagactattttcttagataggtcatagaaggcatgaaccataaacgctgacaattggacttttgaaaaattgttcttctaaagatgtttaagaaaatgaagaggcaagccacagaatgggagaaaatatctatactgcattagtggagtttactactaaattaagaaaacattagaagattgtctatatagtataactgattataaaataatgtatttacatatttaaaatattaagatatatactgacatcttaacagtagttgtctttggctggtgagattctaagagttttgtttttgtggtggttattgttttttgttttgtgctcttttaaaaaattgttttgcctcaagtgtatagtatctttgatttataaaaatctttaaataaagataggatagtttgaaagattagcagaatgtttacaatcaatacttgatactacatggataatactttcctattctatttttgtaaattctgtgcttgaaaatttcaaagaattttttgtgtgtgagtgtgtgttttgaggtggagtctcgctatgttgcccaggctggtctcaaactcctgtcctcaagtgattttcccatcttggccccctgtagcattgagattacaagcatgagccaccattcccaggccaaaactttcgaaactttaaaaaatagcatgaaaacctttattttagtccaggtgcaatggctcacatctgtaaacctggcactttgggaggctgaggtgggagaactgcttgaagccaggagtttgagaccagcctgggcaacatgatgacacctgtctctacagaaaatttaaaaattagtcaggtgtcatggtgcatatctgaagtcccagctactctggaagctgaggtgagaggattgcttgaggagttcgaggctaccgtgaggcatgatcaagcagctgcacaccatccagcctgagtgacagagtgagagaccctgtgtctaaaaatgaaaaaagaaaatctttactttatttatttattttttgagatagagtcttgctcagttgcccaggctggagtgcagtggtgtgatctcggctcactgcaacctccacctcccaggttcaagtgattctcctgccttagcctcccgagtagctggaactacaggtgtctaccaccatgcccggctaatttttgtgtttttaatagaaacaggatttcaccatattggccaggctggtcacgaactcctgaccttgttatccgcccaccttggcctcccaaagtgctaggattacaggcgtgagccaccgcacccagctgaaaatctttactttatttacagcactttgtgagccatatttagcaaacatagttccacatatgaagtttgtttttaatgataaggggtttttaaacttgatttttagtataaatacacagtataataaaagtttgtttacattagatatgaagctaattaccacccctaactgctggctggttttctagaattgtagaagcaggtggtgaattttcctgtctgctgatatccaaaacactctgattcctgggtaagttccagcagtattggatgttggtaatattactgttggtcgattaatttatgatagtattatatacatctctaaagtctaattctatgtattttttaagtaaatagtagaataacatggcataacattttaaaaggtatgtggtaaaaagtcttcctattcctaactgtcagccaccagtttcctgccatgggactgttaaatctcaccaccaaagaccaccaagaaaacatctgtagtcaaaaataagttacactgatttagcttgctgcaggaaggaataacatacatcagaagagctgtgggacctctcaaaaggatagagttaggaaagaggacatacaggattttaggagctgttagtcacagagtaatgttaggataaaggtagtagtctgggcagggattggctagaatatgtaatttgagtgagttgctggaacagccagtagttttgcctctaggacacataagtccctgaggatttactgttagatcagtttgtggtactagaacatacgggtatgagtgagctgatattaataaaggtttgaggctgggcacagtggctcacacctttaatcccagtgcattgggagtctaggatgggaggatcgcatgaggccaggagtttgagactagcctgtttaacttagtgagacctcagtctttaaaaaaatttttttaaaattaaaattaactgagtgtggtggcacacacctgtagtcttaggtacttgggaggctgagggggaggatcacttgaactcaagagttggagactgcagtgagctatgatcatgccactgcaccccagcctgggtgacagagggagaccctctctcttaaaaagaaaaaaaataaggtttgagcttagatggcctgtgatgcacagtacattgcggtttggtttggttcagtttatctgttttgcaagtactaagtgcttttctgtgcatctgcaagcaatttgtagtgtaatttcagttttgtttcactttttaatctctgtttctgatcattcgtccgctaaactggaacatttaccatttaggggaggtgatcaatcaagatttcaaactgtcgtttgatgggttgtgaatgtttataaagctttgatggtagacattttggcctctacaggcaccaggccattttgttcttttttttcttttttctttttttttttttgagacggagtcttgctctgttgcccaggctggagtgcggtggcacgatctcggctcactgcaagctccgcctcctgagttcacaccattctcctgcctcagcctcctgagtagctgggactacaggcacccgccaccatgccaggctaatttttgtatttttagtagggacggggtttcaccatgttagccaggatggcctcgatgttctttttcttagatgataatttgttgaatcagctggtgtgacagtggctgcacagcagcatttaagactctaaagatcacacacttggcatctgcaacacactgaaactcagacagttattattaaagtttaaaataatgtcccatatatcccataatctatttggattttcctttgggcaaccaaatatattttttttcctttaatttggatatgggtcattcacctttgcaactgtcccatatttggtttatattttgccaaggataagcatcttgatagtgctaacagtaaggaaaagttatctgttagcagcctaaaatcttacaacagtggagagagaagaaaatgccaagagaataaaggacaaaatcatgcaagtctgtagtcatcagtggcttctggcatctgggaggttgtgttctgattatcttggacataaatagtctattcattttatcttctgcttctggaccataacagttctggaaatcttgrctcacccactgtttgtccatggcaatgatgtcggcagtatgcatcattaatttattctctgtagtgtcagtaatgggtgcatgatacaaacatttacaaaagttcttttgataagtcttccacaaggctcaattcctatctttagcttatagccaggaactttagatgaatgtaaggaagaagcggaaaccacctgtggatcatgggactataggctttagttgatttattatattaaccagcattatcagaatggaagggagtggaatcttctattgcagaaagtacataatgaattttatgagtagtcactgattatcctagaagtaagaatatctcacaaacagggaggacattgacagtctctaggactttctttcatttatcctataaagtgtattatgagtttcaccattccaagtttactgaaacctagaaataaaatccttttttagatagctattgtggcagtctttgtactcgaatgtatgttttcttttttttttttttgagacgaagtttctctcttgtttcccaggctggagtgcaatggcatgatctcggctcactgcaacctccgcctcctggattcaagcaattctcctgcctcagccttccaagtagctgggattacaggtgtccaccaccaaaccccgctaattttttgtatttttaagagagatggggtttcaccatgttggtcaggctggtctcgaactcctgacctcaggtgatctgcctacctcggcctcctaatattttctttaagccgaaagatacttaaatgttgaagtatatttattttaaccacattttattatacatgattaaattgggaaggcttaactttccttatgatttgtgaggtttttttttccctttaacccaaatttaataaagcaaagagttctcacaaaagttttaagttaattaaaattcagagtatgccaaacaaagctaataatttttataatcctttaaaaaatttttaataaagtaaaggactaaagctttgttttacctagtggccatttattataaacccaaagatgtagtaggtgtaaaagacatcttaacaatttcttattatttacttattttttagagacagggtctcgctcagctgtctaggctggagtgcagtggctggatcatagctcactgcagcctcaatctcctgggctcaagtgattttcctgcctcagcctcctgagcagctgggactataggtgtgcaccaccacactcaactaatttttgtgtttttttggtagagacagagtttcgccatgttgcgcaggctggtctcgaactcctgagctcaagcaatccacccacctcagcctcccagagtgatgagattctttttataggtgtgagtcatcatacctggactactttttgctttttgactgatgattccaagagccttttcagtgtttagcacatagacgtagatagttgtagtctttacttaagtttgaatgaagtgagttatgcgtgggctgagttcactcaaagcttgcctcagctgggattattgaccatatacccactttactggagaatgagtatgccaagagaccgaggcagaatctgcaaaatcacttctgctgcaatgtatttgttaaagcaggtcactaaggccagttcagattctacgggagagacattagactctccctttttttttttttttttgtcacctaggctggaatgcagtggtgctatcttggctcactgcagcctcgacttcctgggctcaagtgatcctcccacctcagccgcccaagtagctgggactccaggcttgtgacaccacattcggctaatttttgttgtgtttttagtagagacggggtttcaccatgttgcccaggctggactcaaactcctgagctcaagcattctgcctggctcagcctgccaaagtgctaggattacaggcatgagccactgggcctggccttagactctacttcttgataggatagggtcaggtcactgctatgctttaaatatgatccccagaaagcrtatgttggctgcctgggtgatgggtatactagaagcccaaactttaccattatgcagtatatccatgtaaaaaaggtacacatataccccttgaatctgaaatttaaaaataaaataagtatgtattagaaaatttatcccaaatgcagtagtgtcgggaggtggggcctaatgagaggtgtttaggtcatgaagccacctctaatgaatgcattaatgttgattataaaagggcttaaggctgcaagttctatctcttgctctctcttatccctctttgcccttccactatgggatgatgcagcaagaagacccatgccagatgcctggcccctcaatcttgaacttcttagcctccagaactatgaatgagtaaatttctattcattataaattatccagtctataatattttgtcatagcaacacaaaacagaccaagacagtgagattacagaagagtatgtagagtgagaaatattattgtagccatttttttttagtttttgctttttttaaaaaattattctttaagttctagggtacatgtgctcaacatgcaggtttgctacataggtatacatgtgccatgttggtttgctgcacccaccaactcatcatttacattaggtatttctcctaatgctctccctcccccagccccccatcctccgaccagccccagtgtgtgatgttccccaccctgtgtccatgtgatctcattgttcaattcccacccaagagtgagaacatgtggtgtttggttttctgtccttgtgatagtttgctgagaatgatggtttccagcttcatccatgtccctgcaaaggacatgaactcatcctttttatggctgcatagtattccatggtctatatgtgccacgttttctttatccagtctatcattgatggacatttgggttggttccaagtctttgctattgtgagcagtgctgcaataaacatacgtgcacatgtgtctttatagtagaatgatttataatcctttgagtatatgcctagtaatgggattgctgggtcaaatggtatttctagttctagatccttgaggaatcaccacactgtcttccacagtggttgaactgatttacacacccaccaacggtgtatttctccacatcctctccagcatctgttgtttcctgactttttaatgatcaccattctaactggtgtgagatggtatcttattgtggttttgatttgcatttctctgatgaccagtgatgatgagcatttttgcatatgtctgttggctgcataaatgtcttcttttgagaagtgtctgttcatatcctttgcccactttctgatggggttgtttttttcttgtaaatttgtttaagttctttgtagattctggatattagccctttgtcagatgggtagattgcaaaaattttctctgtttttgctttttgagatggagtctcactctgttgtccaggctgacgactgtagctgactgcagcctcaacctattgggttccagagatccttctgtgtcagcctcctgagtagctgggagtacaggcagatgccaccacacctggataatttaaaaaaaaaattttgtagagatgggggtctcaccatgctgcccaggctggtttcgaactcttggcttcaagcagtctccccaacttggattcccaaagtgctgggattacaggagtgagtcaccatgcctggctggttgcagccagttttggraaataaaatgtgctacagacattgtaagggcaaaatatttaacaataactgagatttctaaaaattgcagattggctaaatgttaataaattatgatctaagtarattatatctacctaggagaaaataaaaaaaaatttatggtattttaaggtatttatttatgtacttatgcattgagatatttgccatcaaaatttttactagtgcgtataagtacctaacacatagtagcaattcaataaaattatttgaatgaattaattgaggatacttttcgatcatagtttttatggtgagagttttcattttgttctgtcttatttttatgtgtattttagttagatgttcgcttagtctattcaagatgtgttttttgtttgtttgtttgttttgagacagagcattgctctgtcgcccaggttggagtttcagtggtgcgatctcagctcactgcaacctccacttcctgggttcaagtgattctcctgcttcagcctcctgaggcaagcacgygccaccacacccggctaattttttatttttagtagagatagggtttcaccatgttggtcaggctggttttgaactcgaccttatgatccacctgcctccgcctcccaatgttctgggattacaggtgtgagccaccgcccccggcctgttcaagatgttataacaaaatgccttagactgggtaatttgtgaacaacagaaatttatttcttacagtcctagaggctgggaagtccaagagtcagcttgccagcagattgtgtgtctggtgagggcctcttccttataagtggcaccttctatgtgtcctcacgtggcagaagggacaaacaagctcctttggacctcttttgtaatggcacaaatgccattcatgagggcagagtccttacgacctaataatttcccagatattccacgtcttaataccaccatgttggggattaggttttacctatgaatttttggaacattcaaatcatagcagctgttaagaaatgttgaatcagaagtttctagtcattcttttttttgtttttttgaggcagagtcttgctctgtcgcccaggctggagtgcagtggtgcaatctcggctcactgcaacctctgcctcccgggttcaagtgactaccctgtctcagcctcccgagtagctgggattacaggcgcccgctaccacgcccagctaacttttgtatttttggtagaggcaagagtgtcaccatgttggccaggctgrtctcaaactcctgacctcaggtgatctgcctaccttggcctcccgaagtgctgtgattacaggcrtgagccactgcacctggccagaagttgctagtcattctaaactggaagcttgacataatattttgaatcaagcattttaaaaatgtctgcttttcataaatagtttatttttacatatttatccctttcatttaggaaagaagattcatgagttttttttttaatcagctggcaaattagagaaaatatttatacagcttctaataggcatctcaaattattttgaaacattgggaatatatcttttgtaatgttttgcttgtaataattgaatagattttctcatttggtaataacttggaaaatacaaagtggcccatttaaaatggactctgatttaaaggtactgttggaggcattggtgacgggccatttttccttttaaatagagaaagtatgacaatctattttcaagaaactgccatagcaatatttttagtctcatatgctcgcacagaattttgtcactccccaccagtaggtggaatctatttccactcttcttgaacctgggcaggcttgtgactgttcaaccaattgaatatggtggaaataatgtgatgggatttctgaggccatgatataaataggatacaactgatccagcaatcgcactactgagtatctacccaaaggaaaataaatcaacatgtttattgcagtactattcacaacagcaaagatacagaatcagcgttgagtatctattagtggatgaatggataaagaaaatatggtatatatacacaatggaatattgttcaaccataaaaaaacaaaacaaaataatgtcacttacagcaacatggatggaactgraggtcattatcttaagttaaataagctaggcacaaaaagacaaatatcatatattctcacttatatgtgggagctaaaaatttgaacacatggaggtagagaatggaaaatagataagagagactgggaagggtgagtgggggaaaggggaaggatgaagagaagtgagttaaagggtacaaacatacattaagataggagtagattcaatgtttgatagcagagcaggatgactatacctaacaaaaatgtattgtacctggtgatgaacatcctgaagaccctggcttaatactatgcataatatacatgtaacataattcctcatgtaatctgtaaatttgcacaaataaaaagagggaaaaaaaaaagctacagcttcttcctggctctctctttgtcttgggatgcttgttgttggaactaagtcatacgaagaggccacatgtgggtattctcttcaaaaacctgagctaagctgcagccaacagccagtattaaccacagtatgagtgagaaagctttcaggtaattccagccccaggttgtcgagtatcctgctgaggccccagaagttgcggagcagagacaagccagccccactgtgccctgtctgaatttatggtccacagaacctgtgatagataataagtgattattgccttaagccactaagttttggggtaatttgttacatggcagtagataattcatataatttctagaaacttatagggaaataaagatttgctcaaagacatatatatatatatawgtgatatataaatgatccatgtatatatatatgatatgggtgatatatataaaataaatatgggtgatatatatatatacacacacacacacacacacacacacmyacatatatatatgttctctgctgtatcatttatttatgttttcttttttttagaggcagaatctcactctgtcacccaggctagagtacagtggctcagtcataggtcactgcagccttgaactcctgggctcaagcgttcctcctgccatagcctcccaaagcactgggattataggtgtgagccacgatgcctggccctgcagtataatttacaattttttgaaatagtctagctatccaacaataagaaaatgtttaaataaattatcataagcacactattttcctaagtaaaatttctacattttctatattcaaaaacaaagtttaaagaattggtatatagtcaattatgtcataatgataaacctaattgaattatatatttacataaataaagatcattaagaacaaaaaaggctttacatctgataaaggacatgtacccagaacatacaagaactttcgtcagtcaataagaaaagatactaaatgttttaaatggacaaaagaattgaacaagcacatccccaaagaagatattcaaatggcccttaagcaagtagaaaggtcctcaacatcactactcatcagggaaatgcaaagtagagaacaaagagataccggtagacgttcactgtactggaataaaatttagcagatgagcaatattgagtgttgacaaggatatgaagtaactggaacccttacaccttgatggtgtgagggtaaatggtatcactttgtgaactgttgggtaaaaccaatgttgaccccataaactttcagtcccattcttgggtatatacctaagagaaaagagtgcttatgtccaccaaagcacacatagaattatattcatagcaactgtattcataatggctcaaattggaaagctgctctagtcatacattgtctgcccttacctttattaacgcagtagtgcttagcatgtagctacctgtgtttagtttaatatgtattattaatgaaaatttatttaggggatttcacccccaattttttaactttatggtttcaaatttcttaaaacctttctctttacatcagtttggttttggaagactaaaagaaagagcttgttgcacagatggcccaaagcacaaattattaaaatgctaacttttatctacatccagctccaaatattcccttactccttgatcattcttttttttttttttttttgagactgagtctgtgtcacctaggctggagtgatagatgtatatatggtcccctattctaaggtaatacagtcatgcatccgagaaatgtgtcatgagatgactttgtcattgtgagaacaccatggaatgtacttacagaaacctggatggtgtaactgctatacacctagatggtgtaactactactatgcatagtctatatgatatagcctattacttctaggccacaaacctgtacagcaggttactgtactggatactgtaggcagttataacacagtgctaagtatttgagtatctgaacatatctaaacatagagaaggtacaataaaaacacagtataaaaggcaaaaactggtacacctgtatagggcacttaaccatgaatggggcttacaggactggaagttgctctgggtgagtcggaggtgaatgatgagtgaatgtgagggcctaggacattattgtacactactggagactttataaactttataaacactgaacacttaggctacactaaatttaaaacaaatttttcttggctgggcatggtggctcactcctgtaatcccagcactttgggatgctgaggtcggcagatcacttgagtccaggagttcaagaccagtctggggagcgtggcaaaaccccatctctacaaaaaatacaaaaattagccaggcatggtggcgcacacctgtagtcccagctgaggactgggaggctgaggtgagaggatcatttgagccaggaggttgaaggtgcagtgagccatggtagtgccattgcactcccatctgggcaataaagcgagatcctatctcaaaaacaaattttttttctttaataatatattaaacttagcttactgttaagtttttactttataaatgtwtcagtttttaaaaacttttggacttttttgtaataacacctagcttaaaagacaagtacattgtatagctatagaaaataatttttctttatatctttataggctttttctatttaaaaagtttaaatttttttttaacttttagaatattttggtaaaaatgaacacacacacacacacacacacacacacacacacacacacacactgagcctaggtctacacagggtcaggatcatgaatatccctggcttgcccccctacatctttatccactggcacaccttcaggagcagtaacaggcatggagctgttatctcctaggataacaataccttcttctggaagtcctcctgaaggacctgcctgaggctcttgaggagatgtcactcttttcagaaatttgcccatggtgttttgcttggtttatttctatttttcattgtagatttgtttgtaagcagttaatgcagcatgaacattcctgtgtattaatgaaaacctttctgtttttgggggtccatgttttcacacttcctaaggagtttgttgaggtgtgcaaaagcttctcccaaacccttcactgtgagttttgttgggggttctttttctttctccagcaaacttccttctctcttgctgcttcttcagctttgcattcctattccagttcccactcattagtcaattcctgcgatgttattgtggctataacgttactagatgacaggagtttttcagctccatttaactacagtccattgttgaccaaaacatcattttgtggcacacaactgtatttagctattttagtggttgggtagctgctatcgttttttcagtgaaatttgagtagttaaaatgagtcaagtagtagctgaaagcatgacgaaacttataataggactttctttacttgtaaatgatacaatatggtatggctagattaagtcttttaaaaatactcatagatttcaacttggttccataaagctggaagtggaaacattggacatatatcagaaattcaattgaacgcctccttttaaatttatggtttacagacttgtggctcttagatcccaggggatctaaagtagactgtgttataaagtaggcacataacaagacaacagccaatttaaaaatattaaatgaacttgctaattctccatgatattatatatataaactttgtacctaatgtaaactgaaggtagttattagcatttccaggttagaaaacataactggacttcccttatccactttttttttttttgaaacggagtcttgctctgtcgcccaggctgaagtgcagtgtcacaatctcggctcactgcaacctccatctcccagattcaagcaattcttctgcctcagcctcccaggtagctgggattacaggtgtgtgccatcacacccggctaatttttgtatttttagtaaagacagggtttcaccatgttggccaggctggttttgaactcccgacctcaggtgatccacctaccttggcctcccaaggtgctgggattacaagcgtgagccacaccacacccggccccttatccattcttttatgctctgttactacagcaaattattctcagacatagctccatcttggtagtagtgttcttgttattatcagtaacaaagtacattaagctactgccttttgttttattctgttttgttttgttttattttgagacagtgtcttgctctgttgcccaggctggagttcagtggcgcgatctcagctcactgcaacctctgcctcccacgttcaagcgattcttctgcctcagcttcccgagtagctgggattatgggcacttgtcactacacctggctaatttttgtatttttagtagaggtggagttttgccatgttgcccaggctggtcttgaactcctgacctcaagtgatctgcctgcctcagcctcccaaagtgctgggattacaggcgtgagccatggtgcccggccgagacttctaaaacataggtgtcattaggacagttctataggagaaataaatgccattttagtattatgactacttttctttcattttctttaaccatagtttcatttttaacacctgttctatagatagaaaaacaaagatactcatgtcatctagtgtcttgtctcatttataacttgttccctgaatcagcttcaagtctttcatgtttatgtgtaaaacatagggctgggcgcagtggctcactcctgtaatcccagcactttgggaggccgaggcaggtggatcacctgaggtcargagttcgagagcaggctggccaacatggtgaaaccctgtgtctactaaaaatgcaaaaattagccaggtgtggtggcatgcttctgtaatcccagctactcagaaggctgagacagaagaatcgcttgaactcaggaggcggaggttgcagtgagctgagatcgtgtcactgcattccagcctgggttgacagagcaagcctccatctcaaaaaaacaaacaacaaaaaccattataatttatgcacacacaaatatttaaaatgactgtcacctttttatacttagaattgatcatttatgatacatagtatcttagaattttttccccacgtactggtgctgtggatgtgaaatcatggtgatttattaggtttaatttgtcatgtaaaagaattgtgttctgtttgttctctatacatttaaatattttaaattattattattatttttttgtagctgtcccctttcctccaacccaacggcttactttcaaggaagtatttgagaatgggaaacctaaagttgatgttttaaaaaaccatttggtaaaggaaggacgactggaagaggaagtagccttaaagataatcaatgatggggctgccatcctgaggcaagagaagactatgatagaagtagatgctccaatcacaggtataaaaagtctttgcatgatacttttttacagtatagatttgcatgagcagttttgagaaataattacaaataaccagctaaaaagtggtgtggtaatttttctagaaattatgagacagtcaggattggttaggatatttgttgttaattgaagaaatacaattttaagtgtctcatatttccagtagaactatttagtatgagtagattgactacagttttacagcagtcctgtcaaaagctggagtgatttaagttagaagttaaactgtgatcccttttggtgtaatgcccttcgtcttctaaggtataatttctcacatcactttatgctttttttcctagtatgtggtgatattcatggacaattctttgacctaatgaagttatttgaagttggaggatcacctagtaacacacgctacctctttctgggtgactatgtggacagaggctatttcagtatagaggtaaaaattaaactggatatgttgggactattatattgtctttcaaaaaagatgatttccattsttcagtagaagaaattaaaatgagaactctggcagaatttataaaytttgttactttcaaaattaaagtagtagaaatgttttaattgatagaacagttattccttttttaaaaccagtcgaaaatctgacaaataggctwtatattaatattaacccaattttacaaatagttaaatgttcaccaacttttcctcttgaagatagtatacaggattgtataaaaatgacataaattgctgttcaccctaaatggggtttagattagctgaccttaattataagaccataagctgctgagctacaattaacacttagattaactgccagtgctaaataaacactaagctttttgtaggaataatgtctggtactggtacacatagtaagcacttaataaatgttcactgaaggggaaaaatgagttgtagttaattaaaacttatactttccttttatatattttgaaaatggaaagataggaacatgtttagaattaaatagaagctttaatgtgtaaaagataaaactactttagaactttatgcaaggacttgagtacagtggaaccacagcacattcctagttaatgttcattgattcaactctacatgctggcaaataaaagagaaaaaaacttttgaaatagcgtgggtaataggatttgtaatgtgaccaagaataagcatgagctgagaaattgagtctgctttctgtcttgctgtctatagtcctgcctgccctcattgtgtgagaatctcactgtactaagtgtgtttctggtggttaaaggtttattgtcttgcagcctcactcctaaatgcaagtcagctctctcacctgatgcccaagcaaaggagcagcagttgctctattgctgtagaaaaaataagcaaaaaaatggatttttagttttctgttagataggcaatctaaattcatgaatcagaaaagttcaatgttggccaggcacggtggctcacgcctgtaatcccagcactttgggaggccgaggcaggcagattacgaagtcaggagatcaagaccatccttggtaacatggtgaaacgccgtctctactaaaaatacaaaaaattagccgggtgtgtaggcaggcacctgtagtcccagctacttgggaggctgaggcaggagaatggcgtgaacctgggagacggagcttgcagtgagctgagatcacgcctctgcactccagcctgggcgacagagcgagactctgtctcaaaaaaaaaaaaaaaaaagttcaatgttagttgccagtgcacaaaattcatttagtgtcaaatgtgaggacaaaagttaaaggtataaactgacaaaatagtaaagcccatttttccttctgctccgtaaatgtccaaggtctctaaataggtactgggaataggyggagattatccttgcagactgtatcattgaggagcttccctgttgccactcatatcatkcatgtttcagtagacataagtcaaatgtatggatgtggggctgcgcgcaatggctcatgcctgtaatcccagcactttgggaggccgaggtgggtggatcacctgaggtcaggagttcgagaccagcctggccaacatggtgaaaccccatctctactaaaaatacgaaagtttaccaggcatggtggtgggcgcctgtaatcccagctacttgagaggctgaggcaggataatcacttgaacctgggaggcagaggttgcagtgggctattgtgccgctacactccagcctgggtgacagagcaagactctgtctcaaaaaaaaaaragaaagaaagaaagaaagtatggatgttagaaagacacattgagttcagtttatttctttgtgtttttgctagcatgagaaggtttcagayggtaaagattagaagaatacaaaaattactgaatttctaattaggcattttattttattttatttttttagagatggggtcytgccatgttgcctaggctggagtgcagtggctatacacaggtgcgatcatttcgtacctcagcctccaactcctggattcaagccatcctcctgcctcagcttcctgagtatatggaactatagatgcacaccactgtgcctggctagtcattgtatttaataaaacaacttttaaaatatttatttatttatttatttatttattttttgagacagagtttcgcttttgttgcccaggctagagtgcaatggcacgatctcggcccaccgcaacgtccgcctcccaggttcaaatgattcttctgcctcagcctcccaagtagttgggattacaggcacctgccaccacgtctggctaattttttgtatttttagtagagacggggtttcaccatcttggccaggctggtcttgaactgctgacctcgtggtccacccaccttggcctcccaaagtgctaggattacaggtgtgagccactgcgcctggcaataaaacaacttttttttttgagatggagtcttgctctgttgccctggctggagtgcagtggcacgatcttggctcagtgcaacctatgcctcctgggttttaagcagttctctgcctctgcctcctgagtagctgggattacaggtgcttgccaccacacccggctaatttctgtatttttagtagagatggggtttcaccatcttggccaggctggtcttggactcctgaactcgttatccacccaccttggccttccaaagtgttgggattacaggcatgagccaccgcgcccagcctaaaacaactttttagtgataaattattatgccaaattatcttctgattaactcgtataacttaaaatagctttaaaatagttttaattcattaatacattcaataaagcacatagaaaatatcaacaatgattttgtgcacagacatcatgttcagaatattttgtgttatgcatttttttcctcactcatcaataaagtttcttgagtgccaactttatgggcaggctgtgagaataaaataaagaataaaatttatgctctgtaggagcttccagtctaatagaaaagatgcacttacgaatagacttttgttataatataaaatgtgcttcttgaattaacagcgtttttcatattaggacttagcacagtgcctaacacatagtaggcacatagttaatatttgttgaatgaatgaatgttaataaatcatagtttgtatttagctttattctgttaattagatgtttgctaacttaaagggttttttctgcaataacttcagagataaatgaatcaaaactttaaggtgacaatgacattttataccagtgttaaaaccaaagtatgagatctatcgagtattcattggaagtcacttatttataaaccactaagattataaacctctataggctatagcttactctaacatgttgcaagtatacacttgaaaaataattttttaataaatattcttgatagccatgagtgtgatgtttttgtttaatagatgaaaataaggtcatggaattcttattaaaattttttgttataaataatttatttttaatagaaaagttgggaaatgcagaatctagaaaacaaaaactttctacaaatcagagataatcactgttaatgttttattatactttcttgcagccttttttcttcttttacatttgtatatattttgttttcaagaaaattgagagcattttgtacgctccttttctgatcttctttttccactcaagattgtatggaaagcatttttctgtattgttttctccagaagtgtagtgtcaaagtcaaataaaatagagacaaatctctgaaattaaaacattttatctgagaagaaaaaagaccagcctggcgaacatggtgaaacctcgtctgtactaaaaatacaaaaattagccaggtgtggtggtgggcgcctgtaatctcagctacttgggaggctgaggcgggagaatggcttgagcctgggaggtggaggttgcagtgagcccagatcgccccactgcactccagcctgggtgacttagcaagactctgtctcaaaaaaaaaaaaaaaaagaaaagaaaagaaaaaatgcaatttggggcatacacacagactgagcgggctttggtatgtctgaagaaaagagaaggttaggttttatgagaaagaaaaatgttatgtattgctgtttgagaaagttcattgacactagtaaggttctggagggctgacaagttttacttaatctcatgtaatcaatttatattctgcttgatctccgttaatagtttcatgagtccgtcagtttctttattagagttgtggaaatttttatttagcctattgcacttaatgttatcagcaacctatatttaagagtacttgttgaagtcttttccatgaatctgattgtgcatgtttttagagacaaaacagtaactgtggatgacaaaagcttagaacagccatggttaaaaatctgatgaaagtttacgattgataaggaattttgttatttctattatagatagcattttaggatacaataatcagaattaagactgagttatgagttatacaatttttatgagttatacaatttttgaaacatttatgttaacaacatacccctaaatgcaactaaaataagatctagtatcacttaccatttaacagtttcttatataatttactaaatgagcctgatcatttcatatctctgtaagatgagagatatagatcttttgaggctttccaggggctgaactggaaaatcccaaagttaatttaatttaattttatttttttgagacggagtctcgctctgtcacccaggctggagtgcagtggygcaatctcagctcactgcatcctccgcctcccaggttcaagtgattctcctgcctcagcctcccaagtagctgggattacagccccccaccaccatgctcagttaatatttgtgtttttaatagagatggagtttcaccatattggccaggctggtctccaactcctgatctcaggtgatccacctgcctcagcctcccaaagtgccaggattacaggtgtgagccactgcagccagccccaaagttaattttaggtcaaaagtacttaattgaggctggtcacagtggcttaagcctgtaatcccactgctttgggaggcctagatgggaggctaacatgtgtccaggagttcaagaccagcctgagcaagaccttgtttctataaaaataaaaaacaaaaaaagacttaattgaggatttgattttggggacgtttgtcaaagatgtcaaaaggctcagaacatctgatcaaaacagaatcacacaggtcactataaaataatggtcatttggctgtgcgcagtggctcatgcctgtaatcccacacttggggaggccgaggcaggtggatcacctgaggtcaggtgtttgagtccagcttggccaacatggtgaaaccccgtctgtactaaaaatacaaaaagttagccgggcgtggtggtgggtgcctgtaattccagctacttgggaggctgaggcaggagaatcacttgaacctgggaggcagaggttgcagtgagccaagatcgcgccactgcactgcagcctgggcaacaagagcgaaactctgtctcaagaaaaataaataataataataataataataataataataataatgataatattcattcagccagtgataaaagatttccaaagtaatacagaaagttacatggatgtaaaaacgttagtttccttaaagtttagttttcctaagttataagatacctaatgagggcaacacagaaattatcttgatgaaatgtggaagttttgtgttctttttttttttttaatgttttaaattctggtatacatgtacagaacatgcaggtttgttacataggtatacatgtgccatggtggtttgctgcatccatcaacctgtcatctacattaggtacttctcctaatgctatccctcccctagccccccacctaccaataggccccagtgtatgatgttcccctccctgtgttctcattgttcaactcccacttatgagtgagaacatgtggtgtttggttttctgttcctgtgttagtttgttgagagtgatggtttccagcttcatccatgtccctgcaaagacatgaactcatccttttttttggctccatagtattccatggtgtatatgtgccacattttctctatccagtctatcactgatggacatttgggttggttccaagtctttactattgtgaatagtgctgcagtagacatacrtgtgcatgtgtctttatagtagaatgatttataatcctttgagtatatacgcgataatgggattgctgggtcagatggtatttctggttctaatccttgaggaatcaccccactgtcttccacagtggttgaactaatttacactcccaccaacagtgtaaaagcattcctatttctccacatcctctccagcatctgttgtttcctgactttttaatgatcgccattctaactggcatgagagggtatctcattgtggttttgatttgcatttctctaatgaccagtgatgatgagctttttttcatatatttgttggccgcataaatgtcttcttttgagaagtgtctgttcatatcctttgcccactttttgatggggttgtttgtttttttcttgtaaatttgtttaagttcattatagattctggatattagccctttgtcagatggatagattgcaaaaattttctcccattctgtaggttacctgttcactctgatgataggttcttttgcagtgcagaagctctttagcttaattagattccatttgtcaatattggcttttgttgccattgcttttggtgttttagtcttgaagtctttgcccatgcctatgtcctgaatgaagcatataaaagttttgttttttaaacaggctaccaaaaaggtgaagaaaaaccttctgtagtatgattgtttcttcttatgtgatgttcacttacataacctggaaatcaaaccggatgaaaagagtacttgaattaatcagacagaggaagaatgtgcccaagattatgaatgtttcaattcagctacgtcaagaaaagccaagatacagtagaggaaaacatagcttttttaggcttttaagataaacctcttagtgtcagatcataacagtcgagttagaataggagaaaaaaagttataggagcagatgaaaaagttggagagagtcaccttctagccaagcaaaaagatacrctttttcaagtggagaaagaacagaagggaataatatatgacttgcaatcatgtacagtgaaggacagcagaatttgaacttctgaggtatacatttgagaagtttcaaaaagaaacagatttcagaattaagtatcaaaacctcttgcagttttactaagagaatgtcaatactttaagaaaagccctgttctacaataggagaccaaattttatagttttgtattagtgtctttttactatcaaagctcaatctttgggaagaccacatgtcattttatttttttatttttcaatttttatttatttatttattttgacacggagtctcgctgtgttgcccaggctggagtgcagtggcgcaatctcgactcactgcaggctccgcctccagggttcacgccattctcctgcctcagcctcctgagtagctgggactacaggcatgtgccgctacgcccggctaattttttgtatttttagtagagactgtgtttcacagtgttagccaggatggtcacgatctcctgaccttgtgatctgcctgcctgggcctcccaaagtgctgggattataggtgtgagccactgcgcccagtcccatatgtcattttattttaattatagccagcttgatcacatacaaaattccatttataaattccgttttcacaaaccctattacaatttcactcagaccattaatgacatgcttggactttctgctttgtcctgtatttcctttcttaaataaccattttattttaggatgaaaatttgccacataagattctttgtcatacaaaattattctatttctcaataaaggacacattttaatgcctatcttgtaattaaaaaaaatttttttaagagacagagtcttgctctgtcacccagactggagtgcagtggtgcaatcatagctcactataaccctgaactcctgggctcaagcagtcctcctgcctcagccaccccaattagctaggactacaggtgtgtgctaccacacttggctaatttttttttttttaatttttttagagttgggtctcactgtgttgttcaggctggccttgaacttctggcctcaggataccctccaacctcagcctcccaaagtgytaggattacaggcatgtgctaccacagccagcttgtatcaacaattttaaaaacaattaatttatcaaagatttacttaagtcacaagaactgaaaaaacatttgggttaattactacatattttatatgagcacttgtttacttaaactaatcagaataaatttttttagggatttctggctgactatatgagattttattatgtagacacagcatacaacatagtatatatatataatataagcatatctacacagatatacatacttataaataaattcttatggcttttgttttagagttttggtcatgaaatagtaaaacactcaccaatttataaaaaacagtaggatccagattatctttctgacaaaatggaataaggccaaacttaatgttcttttttaaaacaggcaatattataagggttgtgaactaaattttgagtaaagtagtttgagtcagttaccaataaactggattcgacacagaatagttaattgtggaaatatgactgaattatcttctaacaaggtctgttcagtattttattggtctcaattctttatccttgaagataaaagtgttgccattccttttactgtgggcaggctatctttacatgggaatttcatttttgcaaaggaaagagcatgaaggtcaaaatgattttctttaatatctgctggttttaagtgttttacttaaatggtcagtatgccagaatagttgaagagttttgaagaaagagtttagaaaaagataagaggaggcagagcgggaggggaaagctctagagaggaaagtgattcagctagctttgaggcagtgttttgtagtgagtcattctttgagtcctgaatccttttttttagcctcaaaatatcaatgagatacgcatatcttatttggagtatattattttctaactgtggtcttttagtttaaggaacaacagactgtttgaatgatccttacgrtgtttgaacatgttaccggctggaatcccagaaaatatcttggcatgcctttgaattttgagagcccattttattgtgggtgctctggtttaatcccaaatacacaaaaaccaattaaatataagcactgaatttgcaaaggccaaataaacgcaagcacagatgggaaaataaagtacccacttaccaagaaggacgataagaagccttctccaactgaaagaaaaaagagagatcccaaggcctcaacccaaagggaaaaatcccttccctgagaccccacagccagggtctacaaggaggaaaagagtcttccttaataggagatccctcagccagatcagacgggaaggggaaagacaccatcccatccaaatcccagataaaacagaactcaaccaaaatcgggagttcagtccaagaatgactcactaagggaaaaagaggcaacttgcagaagccgttagaggagggggtgactttcagaggtccccagtgtggctaccttgtactatagttccaatggctgctgatcttctctgagatgagtcagccttagactcatacttgaccaagtatgtcaaagtcaaatgaaacacagagatgaatctctgaaattaagatgttttatttgtgaagaaagaattgcaatttagagcatgcatgcagacagaatggtatgtccgaagaacaaagagaaggttagaggttttatgaaaaagcgaaatgttatgtgttgctctttgagaaagttcattggcactagtaaggttctggagagcttgccagtttkgattggtgagtgatggcagtgggtaaaattagccttagaatttcagcagatcatttcagtagcyattagataaaactggtttccagtaatagcaggcagtttcggcagacatgcttgcagagaattacatttttgggtcaatgttatatgtcctgagtgcttcccccccgccctcttgactctgttttagttgggtatgacaggaataacccagttcatatgatcaactttcacagtagttaatgatataaataccttaatttatttcaccattcctctactgttggaaaaataggtttatagcaggtcatgctattgcatacattttccctctgtcttccttacaaacaatatctctattttattcagatagatgggattggggttgcagggagaagctttgatctcagggaaggaaggcccttatcccagccccagggaatgaattctgggtggtctgaactactcaagccaatcaatttcctgtcactaatgattggtctaggggtaaacactggattttcttttaaccagtaatatataaagggaactctgctgggtttttgtttgtttgtttgcttttggaaacactctttcttgatgaaaagactattgcaaggttgaagcttttggacccccattctaccatttcacttcatatgtggatgtgtgtactgtagcagccatgctgtgactatgaggaggtgacatgactaaggaggaaaagcagacctgtgaatcgctgatcacagaggtacagagggcttggtttcttggtgaagatgttgaactagtacaccaaacctggacatctcatctccagacttgatgtgttttttgttttgtttttttttttttttgggacggagtctcactctgttgcccaggctggagtacagtggcaccatctcggctcactgcagcctctgcctcccaggtttaagtgatcctcctgcctcaccctcccgagtagctgggattacaggcacccaccaccacgcctggctaatttttgtatttttagtagagatggggtttcaccatgttggccaggctagtctcaaactcctgacctcaggagatctgcctgcctcagccacccaaagtgctgggattacaggcatgagccaccgcgcccagcccagactttgtgttttatgaggtatttaaatatcttacacaacagcaaattggatttgatatcacttgtatttaaatggtacaaagttgtcttccaattatttccactctgcacattgctaaagttaacatctttttgaatatatctgtgatggcatttcagatacttagatcagattctcacacatgaagtaactgatcaaagagtagaacatttttaagacttctgccgctgataaaacaaaatagtaaagttttatttatctttgagacttttggtgttccctcttcatttgtacctattacaaaatgctggctgggcgccctggctcacaccggtaatcctagcactttgggaggccaaggagggtgggtcacctgaggtcaggagttcgagaccagcctggatgacatggtaaaaccctgtctctactaaaaatacaacaaattaaccaggcgtggtggcgtgtgcttgtagtcccagccactcaggaggctgaggcaggagaattgtgtgaaccctggtggcagaggttgcagtgagcctagattatgccactgcattctggcctaggtgactgagtgagactctgtctaaagagaaaaaaaaaataaaaacaaagtgcttcctcttcctctgtgagagaagaagctaaattttagtttctttaattgattttgtgagaaaagaaaagattaaagggaacattttcagcaaagatatactgtattaaaagcacagaagctgccaaagagaaaaatgttatcagatgagcaggtgatataaatgttattagatgaccaattgatgaacaggtattgacacatagaaatgattctggaggcagagtaaaaattctgttcacacagaagtaaaaagtaattgagtggttgaacagatctcttgataatcatgaccttgtaattgaattatacaagacaattgtacagttgcatcctgatgtataaaataaggaaataaaacttgaaattagaggccaagaagcacatcaccaaatgacattatactatgggtggattgtgcctttatatatctcgttacctcaaaaaggtgagttagaaggcacaaatgtatacccagataaatcaaaagatatattgtgttcttggttgggaaaggtaggtatagaaaagagaagtgcattctaaatttgtatattgatttaatataatttttccttggaatattttgtgaaaattgttatcttggtaatgaaatttaacccctcaaaagaataaagccacacaaggttatttatatgtgtctacatgtttaagctttatgattattttgcaatgcctgtttcaaaatgtgtatatgctttaatgcaacaattccatttttcagaacctatgctttagatgcactcataattacgtacaatgatgtttgaattgtttgtcacaatgattgaaagtttcttttggcatttgataaacaggcttcagggatacaaaataccctgcaatgtgtaggagacacctaaacaacaaagaatgaatgattctcagattgtcaacagtgcctgtgttagattctggggatctaacagggagatgcacaagcaaagtcctttactgtattttctagtgagagggacagcatcatgtatttgtttaccatccatgagaaccaaatcagaggaaggagctaaagcgggacaggagcagctaacttagatggagtgatcagggcaggttcttttgaagaggcaattgttgaacagaatgacctgtgggaacaagctgtgcatagatcaggggaactacattccaggcagaggcacaaccagtgtaaaagcttacaggcagaagcaagtctagggcagtccatgtatagtagtgaggctatcgaggctagacagaataatgagtaagggagagatggaagaggtgcagagagtggggcagatagatgatgtcaggcctagtaaaccatgtcagtgcatttgggttttattctgaatgtgctaggaagttattggaggaattttttttttttgagcaggggagtgacgtattcacatttatgttttaaaacaattactttggctgttagaaggtcagttgacttttggagcccaaaagcaggtgcagggagaccagtgaggatttaatctagtaatataggtaagagatgtcagtaattagattaggcatactgagaaacatttggattcaggatttcaaagtctttcctttttgaggaggtgggaaagtctcagttgaattgatcgagctcctcaggtcatggcacatttctcatcagtctttgcaaagtccctcttttttgttttattctttttgtgcttatctgtgatctctgagttccttactccctctccccagtatacacatgcttctactgtatttaatatatgattcagaatacatctaatgtatatatgaatgaatgattctcagattgtcaacagtgcctgtgttagattytagggatctaacatggagatgcacaagcaaagtcctttactgtattttctagtgagaggtacagcatatatatatataacaaatatatattatatataatagtgtatataatatataatatataataagtatatattacatataatatacaataagtatatattatatataagtatatattatatataagtatatattatatattatatataagtatatattatatattatatatataataagtatatattatatataagtatatattttatattatatatatagtaagtatatattatatacatacataacaaataaatatatatatattcactaatttgagatggagtcttgctctgtctcccaggctggagtgcagtggcacgatctcagctcactgcaacctctgcctcccaggttcaagcaattctcctgcctcagcctctccagtaactgggattagaggcgcatgctaccacgcccagcaatttttttttgtatttttagtagagacgaggtttcaccatgttagccagggtggtctggatctcctgacctcgtgatctacccaccttggcctcccaaagtgctgggattataggcgtgagctgccgtgctgagccaatacatctaatatattaattttttaatgtatagagcttttacagataaaatattttaattttacataaatgatatggtgctgtccagtggtcttgaaatgttaacatacaccattattacctggaaagcttgtgcaaacasaggttgcaggaccctgaccctgtttctgactcatcaggcgtggggtggaacctggcaatctgtattctgtcgggttcccaggtgatgctgtttaccacactttgagatgaatgtgaccatactttgagaaccactgttgtagtgctatttatactgttgacttttttcacttaccactttttttatatttatatatattttattatactttaagttctagtgtacatgtgcacaacgtgcaggtttgttacatatgtatacatgtgccatgttggtgtgctgcacccattaactcgtcatttacattaggtatatctcctaatgctatgcctcccccctccccccaccccacaacaggccccagagtgtgatgttccccttcctgtgtccaagtgttctcattgttcaattcccacctatgagtgagaacatgcggtggttggtttttttgtccttgcgatagtttgctgagaatgatggtttccagcttcatccatgtccctacaaaggacatgaactcattattttttatggctatgtagtattccatggtgtatatgtgccacattttcttaatccagtctatcattgatggacatttggattggttccaagtctttgctattgcgaatagtgccgcaataaacatatgtgtgcatgtgtctttatagcagcatgacttataatcctttgggtatatatccagtaatgggataagatatatccaggttactactatacgtgcctctagttgattgctttctgcctgctgtatagaatttcacagtatttatgtatgacactttagttttctcttttgcttggtggacacctagtttacctccagtttctttctaacatgaacactgctatgatgaacaccctcatataaatctaccatgatttaatgtctctaggttttatgaacaaaatcggattgccaggagaaagggtgtatgcattcayacttgaactgagcattggttgccagatggctcttcagaatggctgtgcaagtctctattcctaccagcagcactgaagaattcctatttcctcacatccctccttccagaatatgattttatctcatattataatacttgccaatataatgggtataaagtagtattctactgttttaattaatgtttctctaattactgatgaaattaagcatctcatatgccagccattcagctcttgcactcactcttaggagtttcttatgtgacctttcagagataggttaaacatatacaagcatatttgcaaatctaatgagaaaatagtgtacttgtcactatacattgccctttaagtgctgctttatctgagtcccacagatttggacatgtattgctttcattatcattcagtattttatattttaagaattctctttaaccctaaaataatgaagtagtatgttttttctttccagtcatatgggatttttttagagctagtattttgttactgattattgatttgatgtaatttgattaaagaaaatgattggaataatactcattctttgaaatttattgagactccttgtggtatagtacagagtagatttttgtgattttcccatatattcttggaaagaacgtatattctctacttgttgagctattctttataactttgactatttttgtctgcttgaactatcagttactttcagcattgtgtcaaaatttccaactaccattacagtgtcatgcatcrtttaataaggagggtacgttctgagaaatgggtgccgattttgctgttgtgaaatcatcatagagtgtacttacataaacctaggtggtatagcctgctacacacctaggctatatggtatagcctgttgctcccaggctacaaacctgtacagcatgttattgtgctgaatactgtaggcagttgtaacacaagggtaagtattgtgtgtctaaacatatctagatgtagaaaagatacagtaaaaaaaaaaagagaaaaaatggaatacctgtataaagtacttatcatgaatggattgtacaggactggaagttgctctgggtgaatcagtgaatgatgagtgaatgtgaaggcctaagacattgctgtatactaccagatgctttataaacactgtacacttgtgctatactaaatttattaaaaagtatttttccttcttcaataataaattagccttagcttattgtaactttttactttataagatttttaattttgagctgccatcttgcgtccccatgtgtgtgcacctaatctcagctggtggtccacccgagacccccaagcaccaaccctagccccccacgttggccccttatctgctctgagaagatgaaacaaacagttatgagccaggaaagacttgccaaactgcaggcacaagtgcgcattggtgggaaagaaatggttcacagaaagaagaaggcggttcatagaacagccacagcagatgataaaaaacttcagttctccttaaagaagttagaggtaaacaatgtctctggtattgaagaggtgaatatgtttacaaaccaaggaacagtgatccactttaacagcagagatgccagcaaactctttcaccattacaggccatgctgagacaaagcagctgatggaaatgctacccagcatcttaaaccagcttggtgcacactgtctgactagtttaaggagactggctgaagctctgcccaaacagtctgtgaatggaaaagcaccacttgctactggagaggatgacgatgaagttccagctcttgtggagaattttgatgaggcttccaagatggagaattttgatgaggcttccaagaatgaggcaaactgaattgagtcaacttctgaagataaaacttgaagaagttattgggagctgctattttatattatgactgctttttaagaaatttttgtttatggatctgataaaatctagatctctaatatttttaagcccaagctccttggacactgcagctcttttcagtttttgcttatatacaattcattctttgcagctaattaagctgaagaatcctgggaatcaagtttgaaacaaaggttaataaagttctttgcctagtataccaaaaaaaaaaaaagatttttaatttttttaactttttgactcttttgtaataccacttagcttacaagtggtattatgagtgaatgtgaaggcctaagacttatgcagctgtacaaaaatattttttccttatattcttattctataagctttattaaaacctttttttacttttaaaattttttggtaagaatgaagacacacacacacacatgcacgtgcgcacgcatctaggcctacagagggtcaggatcatcaatatcactgcctttcacctccacatcttgtcccactggaaggccttcaggggcagtaacagtcatggagctgtcatgtcgtataacagtgccttctgctagaatccctcctgaaggacctgcctggggatgttttacaatgagcctttttcttttgtaaatagaaggaacaaacttgaaagtaattattaaaagtatggtatagtaaatacataaaccagtaccatttattattatcaggtattatgtactgtacataattgtatgtgctatacttttatatgactggcagtgcagtaggtttttttacatcagcatcaccacaaacatgtaagtaatgcctgcatgtagacattatgatggctacatcactagggtgtaggaatttttcagttcattttaattttatgggaccattgtcctgtatgtggtgtgttgttgactatagcagcattatgtggtgcatgactatattgatttatctgtttctcaacataggcctctgtattagttctttttcatgctgctgataaagacatacccaaaattgggaacaaaaagaggtttaattggacttaacagatccgcatggctggggaggcctcagaatcatggcaggagacaaaaggcaaaaggtacttcttacatggcggtggcaagaatgaggaagaagcaaaagtggaaacccctgataaacccatcagatctcatgagactttttcactattacaagaatagcacaggaaagaccggcccccatgattcagttactgtcccctgggtgtgggaattctggtagctacaattcaagttgagatttggctggggacactgccaaaccatatcagcctctcagtttttgcttgtgttttgaggctgtgaaatatatacagaatatttcataagtggtgtatacaattgattatcatcattcatgcgttctgtatttgtggatatgcctatgtctccttgctaaaattgatttgtaaactcaaaatcaatacagtgcttttgtggtcactggtagacatgtggagagtgatctactactttgagtctcccaatgcacatgttgccacctcagaccaaataaggccacactctcccttcttgttttagctctcatgctttaaacaagtattcttttcatagtctatttagtgcctgaatgcctgctataggtaaccaatctcttyagtttctggtttatctttcctgcattttttatgtacaaagtagatacatacatatgaatttcatatatcttctttattatatagagggtggcatactacagctactcttgtactttttattttttttaagagacaagagtctcactccgtcacccaggttggagtgcagtggcacgatcatgatcatagctcactacagcctcaaactcctcgcctcaagggatcctcctgcctcagcctcctgaatagctgggactacaggcacgtgaccaccacatctggctaatttttaaatgttttgtagagatggggtcttgctgtattgcccaggttggtcttaaactcctggtctcaagcgatcctcctgccttggcctcctaaagcactgggattgcatttgtgagccattgtgcccagccatactttgcttttttcatctaaaaatatatcttggaaatcactctaaatcagtttatagagatctttctcatccttgtgctttattgtgtgagtgcatcatagcttagcgtctctcctgtgtatggtcatttaggttgttcctaatattttactattacacacatgctacagccttgtgcatatttattttcgtattgttggaagtgtatcttcagggtagattcctagaagtgggtcaaaagttaaatgaatgtgtagttttgtcagtttggccaaattgtttttttactatgcaaattatattattattattattattattgttattatttttgggatggagtttctctccaggctggagtgcaatggcgctatctcggcttacttcaacctctacctcccaggttcaagcgattcttctgcctcagcctcctgagtagctgggattacaggcacctgccaccaggcctagcaaatgtttgtatttttagtagagaagaggttttaccatgttggccaggctggtctcaagctcctgacttcaggtgatctgcctgcctctgcctcccaaagtgctgggattgcaggcgtgagccaccatgcctggcctattttcatttttgtgtggtcaaatttacccatcttttattttattgcctctggatttttagtcattagttacacagttcttacctacaccaaattttcacctacaccaggcttaagaagaactcactcatgttttcttctagaacttgtgtggctttttctttttacatttagattgctcatccttttgttgtttaytgtgctttgtgtgagatgtggatctaactttatsttttttttttwaaatggcaaccacttgtcccagagccatttatttaaaagttcatcattattaytgtgatttgagatgccacctttattatttaccaaatttttgtaggtacttttatactatatctgtagtataaaattccactggtatgtttatctacataaggaccagtaccactgttttgattatagacattttatagtatgttttaacatctggtagggatagtctgccctcatagtgtctctttttagtgttttcctggttattctttcttgcatgttcatttttccatgttaattttagtgtcaacttgtctaactccataaaatagcttgtttgtatttttcttggaatttcatgacttataagttaaattagggagaactgtaatcttttttttttttttttttttttttttttttgagacagagtctcgctctgtcacccaggctggagtgcagcggtatgatcttggctcactgcaacctctgcctcccaggttccagtgattcttttgcctcagcctcccaggcagctgggattgcaggcacttgccactacgcccagctaatttttgtatttttagtgagacggggtttcaccatattggccaggctggtctcgaactcctgaccttaggtgatccacctgcctcggcctccccaagtgctagtattacaggtgtaagccattgtgcccggctgagaactgtaatcttttcatgttgatttattctatctaaraacaagggatgtctttccattatttcatgtctacttttatgkcttatagggacatttaaattttttccttgtatggattttgcacatttcttgttaaatttattcctgtgtctttaggcctctttgttgctgttacaaatggggatttctccaccgtgatgttctgttgattttttctgtataaaaggtctatttttgtttgtttgttttgagacagagtttcgctcttgttgcccagactggagtgcagtggcatgatcttggcttatggcaacctccgcttcccgggttcaagcgattytcatgcctcagcctcccgagtagctggggttacaggcatgtgccaccacacccagctaattttgtatttttagtagacgcggggtttctccattttggtcagggtagtctcgaactcccgacctccggtgatctgcccgccttggcctcccaaagtgctgagattacaggtatgagccactgcacctggccctattttttttttttttaaagatggagtctccctatgttgcccaggttagccttgaactcctaggctcaagtgagccccctgccttagcctcctgagtagctggaaccatatgtgtgccgctgtgccccagggctattgattttgtatgttaattttatatcctgctagtttactgaattattttattatttgagttagttttatcattgattttggggggttatatctgcaaatagagatagttttattttttctttacccattcttaaccctctaattgaggtgtaatcccattggctgatacccttacaccagttttgaacagtagcagagatagtaaatattcttgccttgttcctggtcttagtgaaaatgccgttagtgttttggaattaagtaaaatacaggttttacgactaatatatatgtgtgagtggctgagagagttctagatatttagatagaacatgrgaacagagattagagagagatttctatgaaggcttgtcaaattctagggcaataagtatatcacattcaaaaggtttcatttttcartttgggagtaacartgagatatgccattacagcaagtcatttgaattatataaaytgtgtttatgcrttataatggtcacaaagaaaattttatgcttgaatttgtcttgtagtgtgtgctgtatttatggagtttaaagattaatcatcccaaaacattgtttctgcttcggggaaatcatgaatgcaggcatcttacagactatttcaccttcaaacaggaatgtaagtataatcactcctctagaacctttttagttaccctttaacctgtccgaagtaaatcaaacagaaagaaaaaagaaactaatagaatttaaatgcttcctgtcctgttgttatttttttcacctgcaaagaactaagattctatcttctaaaacatttattttgaaaataacttttgggttcccccttgtttataaaataaataattcgggatatttggaaagcacagagaagtctaaagaagataaaagtgtccataatcaggttgcagtgagccaagatcacgccactctactccagcctgggcgacaaagcaagattccatctcaaaaaataaaataaaataaaagtgtccataatcatgccacttagaggtaatcactgttatcacactatttgaaatatggtcttccattcttttttattattatgaaatagttcaggtatacatatatctgtatatattttacaaataaaattgggctcatatgtactgtttaatacatttctgtttcacctaatgtagtagcattttttccatatcattaagtatttttgacaacatggtttgtaagtgttattttagtttttttaaagtattccatcttacgaacacacaatcatatatgtagccaatttagtaacaatcataggatatttaggttgtttctaactgtgactactgctgtaatagtaaaaataagtttaatataaaagtagaattattggccgggtgcggtggctcacgcctgyaatcccagcactttgggaggccaaggcaggtggaacacaaggtcaggagttcaagaccagcctggccaacatgatgaaacccctgtctctactcaaaatacaaaaattagccgggtgtggtcgtgcgtgcctgtaatcccagctactcaggacgctgaggcaggagaatggcttgaacccgggagatggaggttgtggtgagatcctgccactgtactccagcctgggcaacagagcgagactccgactcaaaaaaaaaagaaatagaattattttgaaagtcaaaacaggccgggcgcggtggctcacgcctgtaatcccagcactttgggaggccgaggcgggtggatcatgaggtcaggagatcgagaccatcctggctaacaaggtgaaaccccgtctctactaaaaatacaaaaaattagccgggcgcggtggcgggcgcctgtagtcccagctactcgggaggctgaggcaggagaatggcgtgaacccgggaagcrgagcttgcagtgagccgagattgcgccactgcagtccgcagtccggcctgggcaacagagcaagactccgtctcaaaaaaaaaaagaaaaaaaaaagaaagtcaaaacattactagctgattttaaaaaacagataacatggtgggaggctgaggctagacgatcccttcagcccaggagttctacaccagccttggcaatacagcgagactccatctcaaaaaaacaaactcgtagatttccttgactagcatctagtactcataattggctgctcactaacaaacagtatgatgctgactatgttggggatgtttgggagatcctgccccagggcatttgcatttttagttcttcttttcccagatctctatctgcgtataagacatacattctatttcattcatgtcatttattccgagattttctcctctagttgcttttctaaatcataatctcatcattttaccctcataccctgtttcttttcatagtgtttatcaacacctgagatttatgtgtatttatttgttgactgtctttctctgccaccagaatgtaagctccatgctagcaggggtgtgttttgttcactgttgttttccccaacacccacaacagtattagttgctcatagaagttgcttagtaaatattggttgagttcatttgaatgaatgagcatctgtgatttgtatgtttagaacacactctygaaaaagaatttctgggttagggggcaggcacattttaaagacttttggcatactctaaagtagtcttccagaaaatatgtatattgggttatacgccaaaaaaattttttatttttgtgatgaaagtactgaaataaaagcaaaattttacctgttttgacttctaaaattttagcatattctctataaaataaggaagctaaactaaatatcttgggtcccatctggctctaaaatctaccccttttaacgaatcctgaatatataaatatactttagtgttcatatggttgatattttgatcatggatttcattttgtatccagatttttctgcagattattatcttagaaaaatatattataaaatatttaaacttttattccaaaaataattttcaaagttaaaaaaacttttacatttgttttcagagactcaaagtttattaatctgccacagatccctttactgataggtagattgctatttatagtgtttcatatgctcatatgaattcttgctaccagtatcttcttacattggagatagtagttgtaatgaaaacatccctcctagtagagcctcaaagaaaaggtctttgttattaaaagaaattttagaggataatcacttcttaaaaagtccctctgtcaaaagtcagctgcaagagggcaagatacaaatccttccagcccttggtgacttactggaataaacactttaaatcagcagctaattaccaggaagttttaaatctactgttggtggatgtttaaattggtgtaagttgagcatggtggctcatgcctgtaatcccagtacttttggaggctcaggtgagtggatcacttgagcccaagagttcaagaccagcctggtcaacatgttgaaatcccatctctacaaaataaaacacaaaaaattagctgtgcatagaggcacttacctatagtcccagctactcaggaggctgattgaggtgggaggatcacctgagctcaggagtttgtggctatagtgagttgtgatcaccactacactccagcctgggagacatagtgagaccctgtctcaacaacaacaacaacaacaacaaagatgtgaggtatttgaagagcaattttgtaatatatttataaattttaagtgcatgtccccttgatctagcaatttcatttgtaggaatttattatgcagattgtgttactttttaaatgctgcataaaaaattatcacaaatttagtggctaaaaagaacacatttattatctcatagttattgtaggtcagaagtccaggccacagtgtggctagattctctgtataggatctcactgaaatcaaggtgttgccagggtttcagttctcatctggggcttagggtctttatccaaggtcacttgttggcagtccttgtaactgtaggattaaggtccctgttgtcctgttagttgttgaccagggatgactcttagcttccagatactgcttgcagttcggtaacatgtcgccaccagtggtagttcccaatatgaatgtttgcttttttccaggccrgcctgaatgcatctctctgaccttctcttctgtgatcagctagctggaaaaaaaccctcactcagtttttaaaaggctcaccttaggtcaggcatggtggctcatgcctgtaatttcagcactttgggatgccaaaggggagaggatcacttgaggccaggagttcaagaccagcctgggcaacatagtgagacctcctctctgccaaaaagaaaattaaaaaactagaattcagtcagcctgcatggtggtacaagcctgtagtcccggccagttaagaagctgagactgaaggatagattgagcctgggtgtttgagattacagtgggctatgattgtgccactgcactctagcctgggtgacagagtgagaccctgtccctaaaaataaataaataagtaaataaatgttcayctgattagatcaggccctcccaagataatctttcttttgccatataatgggacaaaataatgggagtctcatcatacttacagttttcatccactgaaagaggagtggattatacatacaaagatgtaggtcaatgcaggtcattttagaattcgtctaccacacagatatactcacaaaaagatagtaaaatatggatgcttaaggatgttcactgcagtgttaattgtaacaacaacaacaacaacaaaaaggtaatctaaatgtcaacaagacagtgatgaaataagtgataatatgcttttgaacaatggaatgctaggcagctattgaaagaccaaggtggccgggtgcagtggctcatgctcataatcctacactttgggaggccgagatgggggcattgcttgagcccaggagttcgagactaacatgggcaacacagtagtaagactctctctctacaaaaaatttaaaaattagctgagtgtggtggcatgtgcctatagttgcagctacttgggaggctgaggcaggaggattgcatgagcccaggaattcaaggctgcagtcagctatgatcaccacactccagcctgggtgacagagcaagactctgtctccaaaaacaaaagacagrcagaccaaggtagacccataatatgtactgatatggagagatgctaagatattttataaggcatttgcagagcatgtaaatggtcatctcctttgtaaattaaaaatatataatgtacagaagaaatcattaacagtgggaggttgggttaggaggacttagagggtttttttgttttgtttttgttttgtttttgtttttttagatgcartgttgacatgttgcccaggctaatctcaaactcatgcaatcctccagccttagcctcctaaatagctgggactataagtgcatgccatcgcgcatggcttacttttaattttatatcctctctagtattgtttgaattattttttaccaccactatgtactacttttataattattattatttttcaaattggtaatttaaaaattacccagttggggcccaagcatttgaaaagctttgtaagcacccaaggtagttcagctgtgtgctgctggttaagaacgacggctctggagtctttaggaagcttctactatctgtcgtttgggaaccacttcaccaaatacaaaaatgggaaatattttattttatattatttttctaaaccaaattttagggtattccttaacaccttcatttcttacctgggaaaattaaataatgtgtataagttaacaaatgccctggaatgtaatactcgataaaagctaattttatgaattaggagtagataygtagtgaagaaagctgcctatggctgcctttgttttgaattaagtttcagagggttttttaggtgacatttttcttaattattcttttgtcttatcagattttttttatttttaatttttatgggtatatagtaggtgtatctatttatggaatacatgagatattttgatacagggatgcaatgtgtaataataacatcagggatttttttgacagactatttttagaagatggaacaataggtcctggaaacattttaagtatctccttttgcccagaatttcttaccttaggtttttatttgcttttcacrtgatttaactgtagttaaacctgatggctttctttttctcctatctaccaagatattccttcttttttattataatgctgcatctgaaatgtaaataaatcttggaacaagcacacagattcaagtataagtttaaaattttattcttgtataaggagagagcatgtgtgttgctctgcatgggtgtttttactgataagctgatctctcttcagtggccactgtggcttttagaactagcatcttatcattaataagggaggcttagtttcagattgtgcagctgtaatcttgttcatgtttttaagagggaggtgggtgaaggcttttcttgtatcaatcttaaattgctttataatgcagagattttttaaaaaatattcctttctttatggaaaagtaataatgtttttttttaaattgatgtataatagttgtacgtatttttgaggtacatgtgatatttttactatatgtatacaatgtataattattatcaagtcagggtaactgcagtatccatcgcctcaaacatttattttttctttgtctaacagttaaacaaaatttatttttttaagagacagggtctcattctgttgtccaggcttgagtacaattgtgtaatcatagctcactgcaactttgaactcctgggcttaagtgattctcttgcctcagcttcccgagtagctgggactgtaggtgtgtgccaccatgcctggctaatttttaaattttttgtagagactgagtctcgcctatgttgccaaggctgaacttgaactccccaaaggatccttccgccttagcctcccagagtgctgagattacagatgtgagctgccatgcctagcccctaacagttaatttttgacatatcatttgtttttgcaaaaatatttcttcattgttatgtacttagaaagcaagaaacatagtgcctgcctccctccctccttccctccctccctccctccctcccttctttccttccttccgtcttgctctgttccctaggttggaacacactggtaaaatcattgcttactacagcctcaacctcccaggctcaagtggtccctacacctcagcctcctgagtagctgggactacaggcacgagctctcatgcccagcctatttttatgtttttatgtatttatttatttattttctttgaaggaacctcgtgtttatattattccacaaatactctgggtgcaacctcatagctctggatcagagtttctaaagtaaatgaatttcttatttccacgaacctattttttttttttttttttttgatagggagtctcgctycgtcacccaggctggagtgcagtggcacaatctcggctcactgcaacctccgcctcccaagttcaagtgattctcctgcttcagcctcctgagtagctgggattmcaggcacgcaccaccacgcctggctaatttttatatttttagtagagacagggtttcactatgttggtcaggctggtctcaaactcctgacctcgtgatccacctgcctcggcctcccaaagtgctgggattacaggcgtgagccaccatgcccggcccttccatgaaccatttttttaaatgtatagttaaatagcttactgacaagttccagaaactcctgtaattttactaatgaaagcagtattgttatgacaactggattttttaaaaaaataaatactgtttgtcattgctcattgcarcattttttagagtagcaaaagattgatctaattagattgtggtatatycataaagcgaaatactaggtaaatgttaaaaaaattacaaagctctcctgtaggggaggcaaaattttacctttactctcagggtttttcagctgggcctgagaattaaattgacatgagataaattaataggagaagagcatataaatttatttaatataagttctacatgacataggagccgctataaggaaatgaagatccagagactcagagttgaacacttacatgctgaatcggacaaaaagtagtaagttgtgaaaaagtaactaaatgatgtgaggaggctagaagataagagttatttgaattcagtctcaactattaatccttggtgataacaatgttattttccttctagtacagggagggcatcttttcttttttttttttaacttttattttaggttcaggggtacatgtgcaggtttgttatataggcaaacttgtgtcataggggtttgctatacagattattttgtcacccaggcactaagcctagtacccagtagttattttttctgatcctctccctcctcctaccctccatttttaagtaagtctcagtgtctgttgttctgggagggcatctttcaaatgggaatttcatctcctgcttttaaaaagcagcatgagccaggcactgtggcacgtgcctgtaatcacagctacttgggaggctgaagtgggaagatcgcttgagcccaagagtttgagaccatcctgggcatgtaacaagaccccatttcaaaaaaaaagaagaaacagcatgaaggccagagtgatcttcttgtacgtgtggtttttcaagtgcctttaactcaaagttgtcagtgtgccagagtggtgtattttggggtggcatattcttaactccactcttcatctgaagatgtggcatgatagccaaaatacgttcttaagtacgaaaagcaagtaaagaacagtacatatatgctatcatttatgtaaaaaccaaaaggatgttttggaaagagaagaaacatatatgtctgcatgtgtatgcatagaacatctttgtaaagacacccaggaaactggtaatattggttacctgcagagagagggcaggaggcacattatacccttttgtggcttctaaaatttgagctatgttggggccaggcacmgtggctcacgcctgtaatcccagcactttgggaggccgaggcgggcagatcacaaggccaggagattgagaccatcctggcgaacacagtgaaaccccgtctctactaaaaataaaaaaaaattagccgggtgtggtggtgggtgcctgtagtcccagctactcgggaggctgaggctggaggatggtgtgawcccgggaggcggagcttgcagtgagccgagattgtgccactgcactccagtctctcaaataaataaatwaattaattaattaattaaattaaataaataaaaaataaaaaatttgagctatgtctcacgcctgtaatcccagcacattgggaggctgaggtgggaggatctcttgaggccaggagttctaggttgcagtaagctatgataatgccactgcattccagcctgggtgacagaatgagaccctgtctcaaacaataataataaaaaataaataaagcaaataaaaattgaaacaaatatatcatcagtgactagaccagattgtgatttcttgcaagtagtgctgactctcaaaattgctttcagataattttgttgaaaattttgttttgttaatgttgtattattgatactagttagaacttgtatcagtgtcatcctgtggctgtaatgcattttcccttcactatagaaataactgttttatgggatatatcctaaaatttgtcttgaaaataaagcaattgaatcagctaatttaacctctgggaattatgtatttggctatttagattctcctattcaaaatcttatttaaaaataatgattaggaggaatattagagggtcattaagagcatgaacaggtttaagtctcagttctgccagttacttgcttgcagctttgggcaggtaagcctaatttcctcagtttttaaatgaagacagtaataatacctacttcacagggtttctgtgagtattaaatactttcatcagttaacacagtatgtactaagtgccagcattattctgcatattttacataaatgaattcatttaatcctcacagcaaccctgaatctactgtttagggtgttattattattatgaccatagataaggaaaccaaggcacagagagttaaaatttttatccaaggtcccatagctagtatgtggagggggctgcagttcttcaaatcaggcaacaagttccagactccattctcttcaccaccatgccatgccaaatgcttaactcactgacagacacatcatgagccttcaatacatttaaataataaaggtaatataggccaggtacaagtgcagtacctcatgcctgtaatcccagcactttgggaggctggggcaggaggattgcttgaggccaggaattgaagaccaacctgggcagcatatcgagaccctgtctctacaagtaatttttaaaaattagctgggtgtggtggtgtgcgcttgtagtcccagctacttagaagattagacaggaggaccacttgatcctaggagcttgaggttacagtgagctatgattgcactactgcactccagcctaggcaacagtaagatcctgtctctaaaaaaatttttttaaaaggtrgtataataataaatgttattatataaagattacatattcatcataaaaaagaaagaacagctaaactaagaaaaatatagataccattgtcagtctaacccctcagaaaattaaatactggtaattatatatgcaattcatatactttgaaaaaatraacatggtgatatttcatagcctattttattcacatattaatataacatgaacttctttttgcttaatttttgacctcctgttttaatttacaaaatgacaatacacttccttacttgtccagacttggcattcttttttggaagtaggctaaggaattattttgagtcattcttgggattgaaaggcatttatcaatgtaagatgttatggagcataaattaataagtaattgaaattcctacctctattcaagtgtggaactcccatggaggaattccttactgacactggcaacagagggaactctggttcctaggattttcaggagaaaaagtcaatcactgaccacaaattaaagagttttctgtttgttttttacttccaacagactttatggccaatgctggatctactttgaaatgggcaaaatttaaaacaaagcagagtataaggatgtaactgtaaggagaggcaatgatgcataagacatggttcttgtgaactttgagctcctaataaagttagcatatgttgtggaatagattatgctgactgctacaacagcaatacaaaatgttctgaaaacctcaaagaaacccacaggctcccttaatgaactcaaaccctaatcacccagtattggcgttaaagagaaatcttcacactcagggatggaaggccttacaacctcaagcgtggtctactggtttacactttccttagggatctctctcttaatcattcctgccacccatatagtactgcagtctggcccaaatctggacccatcattcttcactttattccccaaaaccttgccaggaccaggctctgatccttaaatatgtctttctaaaggcttagagatcacaaaaaggaaataaacacagaaataattaccaactagatagtctgactcactcgatacagctttggtctcttggtcctgtaggccacctcatcttcccagaatcctggaagaggagaaggagctcacggttctgcagggttgcctgactatatttctcgtcttctctacccacacacatccctgagcacagcttgactttttgaaaccaaggccaaggaagaagaaaatgttcctttttctctttaaacacccattttccagtttcccacctattatttcatgacttttcctttccagagatttgtagagactcctccttccacccactgatgtatttccttattctgtagccccaagttgacagccacatcaaaatataatttattaagccaaacatttattttttattgtttagagacagaggctcactctgttgctcaggctggagtgcagtgrcactatcgtagttcactgcagcctcaaactcctgggctcaatctatcctcccacctcagcctcccaagtagcttggacagcaggtgtgtgccaccacagccagctaattttgtttttcaattttctgtaaaaacgaggccttggccaggcgcagtggctcacgcctgtaatcccagcactttgggaggccaaggcaggcggattgcggggtcaggagtttgagaccagcctggccaacatggtgaaaccccgtccctactaaaaatacaaaaattagccgggcgtggtggcgtgtgcctgtagtcccagctacttgggaggctgaggcagaagaattgcaagaacccggaaggcagagctgcagtgagctaagatcccgctactgcactccagcctgggggacagagcaagactccgtctcaaaaaaaaaaaaaaaaaaagaggcctcactgtgttgcccaggctggtctcaaactcctggcctcaagcaatcccccgacctcagccttccaaaacaytgggattacaggcgtgagccaccacaccagtttaagccaaatgtttttagagaaaatagaatcaagacataatttgtttacagaccttaaaaattatgagcaaaaacattattgacattttattgatgtctcttaagactccagtttccacttatatatcttcaacacccctaagagatctttaagacccaataaaatattcagactcacaagactaccatggaccctagttgtcatccatatacttaaaaggatataggtcaggaagggcagcactgggcattccttttcagtggagtggtcctcacaggagtgcataccgcagtccagcagctttccatctctcttgccccctcccatcttctcaccagctcaggtacaaggaaatatccacagtgggaagattagggagccatcctggtatagaagcctcgtgcatcaaaaatgtcaatgtgtgttgtaaaactaccttcagaggagcccaaagctatagcttcccaccaggtaactgggtaatttttaccacaagccatgttgcctaataacacagtggacagtcaccttatcacatttccaagcaacagagctggaaagttaatccaaggtcacacttgtctttaagaggagagaggtattgttaacctrttatccacaacttttcaaaagtatctttacaaagataattgtgctttcaaatcatctaaaataaatggctctaaagtagcttcatattctcctggcctatatcctttttcaaatgtgatacgttttagttcttccattgactggttttccttttttgttaggtcgaatcaaatattcggaacaggtgtatgatgcctgtatggagacatttgactgtcttcctcttgctgccctcttaaaccagcagtttctctgtgtacatggaggaatgtcacctgaaattacttctttagatgacattaggaaagtaagtaatcttttattattctcacagggaatatttttaaaatgtgttgggtttttttgttgttgttgtttgctttgagacagagtctctctctttcacccgggctgaagtacagtggtgctatctcagctcactgcaacctccgcctccctggttcagcctcccgagtagctggatacaggtgcacaccaccacacctggctaatttttgtatttttagtagagacggggtttcaccatgttggccaggctggtcttgaactcctgacctcaactgatctgcccactttggcctcccaaagtgctgggattacaggtgtgagccaccgcacgcctggcctaaaatttgtttcttattgcagtcaaccaatatatctttagctgaaatctttaaaatatagataatgaaaagtaagaaaatggaagttacctctgatttcatcactataactactgttaacattttgatatgtacctaccacaaattrtaatttttaatgagctctatgtttttaccaactagaaagctaacattcttgtagtatagtcctgaaactttgaattatatcgcagtgcaaaaggaaggaaaccagggttctaatcacagtcctgccattaactgtgtaaccttaaccaagttattgaacctcttagtcacatttcttctctatgaaatgaggaagttggaagggatggtctgaggacactgccagctccgaaatgcattggctttgacattttagatgataacggtttcattgttttacttgccttccttggtgattattatttccaagattctgtatcttcattatggaaaaagatgaccaatttttattgtacatggttgtcttatcttctctacctttgaattcttctacctgtctctctgtcttttttaatcaaagtgatagatactcatcctctcttacaggtactgagactaaaaatttttctgtttataaaactattttctctgaagaaagtctcctcagggtaagagggtgtacctatatgtactggctttcctcttgccttactgtcttttaagtaaccagcatttctcttttacatagtaaaatatgaattttataattctgaatcaattgtatcaataaaaagctctttcacgcagtagaaattctcttcttggcattcagctattctattacttgttttctcttggtttttatgctttcaactaaarcagcagtgactaaaggcttaagttaataactcatattgaaatacctcaactgcatagactggaaaggataaatgcccttacaaaattagcattctttaaaataaagaaatctccactggaatgaggtttgcaatgaacagaaccattgtaaaacatttctgctstcatggtaacattggctcacctagacaaataaaattaattttatatagtcatagtctttctaaaatagtatatctctatagtggttgatttcacatttgaattaaattagcactgctttacgattaggatgtaagagrgtcttttactacagtatggttagatgacagggatgtttataaaaatttattgcagaccgggcgcggtggttcacgcctgtaatcccagcactttgggaggccgaggagggcggatcacctgaggtcaggagttcgagaccagcctgaccaacatggagaaaccccatctctactaaaaatacaaaattagccgggtgtggtggcacatgcctgtaatcccagctactagggagggtgasgcaggagaatcgcttgaacctgggaggcggagtttgcggtgagccgagatcgtgccattgcactccagcctgggcaataagaacgaaactccgtctcaaaaaaaaaaaaaatttatttcagaaaaataataaaaattatgtatctaaaattgttaagtgttccttttcttgcaggaaagtcctttaggggcacactggcttctctcctaatacattcttgtgggtgaaaggggtttttctttgacacatactagtttccaagaagccttttgctctcctgatttttttcttttggcttttgtgtgtcttctagttagacaggtttacggaacctcccgcctttggacctgtgtgtgacctgctttggtctgatccctcagaggattatggcaatgagaagaccttggagcactatacccacaacactgtccgagggtgctcttatttctacaggtaagctagtccttgaggtcgaaaattatgaaaggaaactgtaattcattttatcagatgatttttcagcattttatatttcaaatctatgtagtataagcactcctgtttaatttttcgattaataggaggcaagaaacttgtttgtttgttggctttttatattttcttaggtatatatcctaagaagtgtaatacaccaaacatgattggacatcctgcagtgctctgatatttttgtctgactctaagtgatctagactatttgttcctaaacattatctatacacttttttaaaaaaaattaaagctttcttggctctttccccagagattctaatacactaggtctgagaggaatcctattgtattttcaaaagctctccaaattttgtaaccactagtatagactaagatataaaaagaacaggacattgtgaactaagcccagtacatttcctggaagttggctgttgttttaaatttcacaggagctttcattatgattagmcactcaaaaataggaagacaggcagggcgtggtggctcacgcctataatcccagctctttggggtgcctaggcgggcggatcacttaaggccaggagttcgagaccagcctggccaacatggcaaaaccccatctctgctaaaaataaaaaaattagccagatgtggtggcaacacgcctgtaatcccagctaattgggagacttcaggcaagagaatcacttgaacctgggaggtgtaggttgcagtgagccaagattgtgccactacacaccaacctgtgcaacagagcaagactctgtctccaaaaaaaaaaaaaaaaaaaaaaaggaagacataagagaagttggaaatctaaattatttttaatcccagtattttattgtggcaaataatacatatrtttatttccctaaaaatctctgttaattggctaagataatgtgttcattagaatacacacatgcacacacacatgaaactttgatttcgccattacttttagcattcttctaaacaacctttttttctttaaaaaaatattttttaaaatttttgtgggtacatagtaggtatatatatttatgggttatatgagatattttgatatagtcatacaatgtataataatcacatcaaggtaaatgagttatccatcacctcaagcatttatcctttgtgttacaaacaatccaattattactcttttakttattttattttttgttgttttttttttcacctttttttttttttttccttttttgagacggagtcttgctcggtcacccaggctggtgtgatctsagctcaccgcatcctccacttcccaggttcaagcaattctcctgcctcagcctcctgagtactgggattacaggcacctaccaccatgcctggctaatttttgtgttttttagagatggggtttcaccatgttggccaggctagtttggaactcctaacctcaagtgatccacccacctcagcctcccaaagtgctgggattacaggcatgagccactgtggccggcctcttctagttattttaaaatttacaattaaattattattcactatagtcaccctgttgtttaaatctcacagtatcaaatactaggtcttattcattctttctgactgtttttttcgacccattaactatcccatttcccctcttactacccttcccagcctctggtaaccatcattctactctcatctccatgagttcagttgttttaatttttagctcctacaaataagtgagaacgtgtgaagtttgtcttcctgtgcctggcttatttcagttaacataatgacctccagttccattcatgttgttgcaaatgacaggatctcattcttttcaatggctgaataatattccactgtgtatatgtaccacattttctttgtcctttcatctgttaatagacacttaggttgcttccaaatcttggctattgtgaacagtgctgcaataaacatgaaagtgcagatgtctcttcaatatactgatttcctttcttttatatacatacatagtagtgagattgctgaattacatggtagttctgtttttagtttttttgaggaactccaaactgttctccatagtagtgtactaaacattcccaccaataggatatgagggttcccttttctcgacatcctcaccagcatttgtcattgcctgtcttttggataaaagtcattttaactgggtgagatgatatctcattgaagttttgatttgcatttctctgatgatcrgtgataytgaataccttttcatatacctgtttgccattttatgtctccttttaagaaatgtctattcagatattttgctcatttttaaattggattattggatttttcctattgaattgtttgagctccttacatattctggttattaatcycttgtcagatggatagtaaaaagtctttttttctttcttcttctttattttattttattttattttattttattttgagacaaggtctctctttgttacccgggctggagtgcagtggcaccataacagctcactacagcctcaaccttctggactcaagcagtcctcttgcctcagcctcctgagtagctggaactatgggcatgtgccaccatgcccagctgctttttttattttctgtagaaacaaggtcttggctgttttgcccaggctggtcttgaagtcctagactcaagtgaccctccctacttggcctcccaaagtgctgggattacagggatgagccccacccagccaacaaccatttttcattcctccatgccaacttttccagtgactaatgtgatgaaatcatttaacttttatttctttttacattgcttaaaataaagagcataatacatattcattgttgtcagaatagaaattggtacaatttctgtggacatcaacttggcaatatctttcaaaggtatttgtacatggcctttgatccagaaattctacttctaaaacttaatcctgtagatatataattgattctcattacttgtggatttcatatttgtgaattcccccacttactaagatgtatttgtaacacccaaatcagtacttacrgaggtttcataatcattcatgggaatgtagtgtgcaatgcaacaaaaaatttgagtcacctcactcacatgttcctagctgaggttgaacaaaatgatgccctaccttctttttgcagccctcatrttgtaaacaggcattcttttgagttttatttagtgaaagatgttttatgtttttgtgcttttcatgagtgatttcactgtttagaatggccaccaagtgtagtgctgaagtgctgctgtctagggtccctaagcacaaaaaggctgtggtatgtcttacagagaaaatatgcgagtgttagatataagctttgtttaggcatgagttatggtggttttggccatgagttcaatgttaatgaatcaacagtgtaaatgacctaaagtattattacacagaaacacatctgaaacaaggttatatattaattggtgggtgaaaatgttatgaccggagcctcacaggaacttyaccctgtatttcccttagcagtagtgtttcattatttgctaattctgtttttgcagcaacattatagaatgtagctactgggaataatgagataaaaaatttgactcacccagcacacatgttcccagctgaggctgaacaaagtgatactctgccttcttttatcccagggataaatcccatttagccacagtatataatacttttagtatgttgttgagtttggctttctagtgttttatkgaggatttaaaaatctatgttcatcagagatactcacctgtacttttctttcttctggtgtctttggctttggtatcagagtgatgctggcctcataatgtgagtttggaagaattctctcttctattttttggaaggtttaagaaagattggtattaattcttttttttaatgattaatagaattcacccatgaaaccatctggtcctgtgcttttctttgttgagagctgtttgattactgattcmrtctccatatttgctattggtctgtttgggctttctatttcttcatgattcagttttggcaggttgtatatttccagactctatccatttcttctgggttttccagtgttttggtgtgtgattattcgtaatagtccgttatgatcccttttatttctgaggcatctattgtaatgtctcctctttcattttttgttttatttatttgagtatctctttttttcttagtcttgctaagggtttgtcaattttgtttagtttttcaaaaaccaactcttagttttgttgacttttttctrttgtttttctattctctatttgattcatttctgccctaaactttcctttcttctgcttactttgggcttatttgattctcctttttctagtttcttgaagtgtaaaataaggttgtttaattcagatcttttttgttttttaaatcggcatttattactataaactttcctgtaggtactgcttttgctgcatcccatacattttgatatgtatatttttgttttcatttatcttgaggtttttttttttttagataggatgttttgctctgtcacccaggctcaatgcagtggcacaatgatacctcactgcaaccttgaactcctgggctcaagcagtcctcctgcctcagcctcctgagtagctgggaytacaggatgtaccgccaygcccagctaattgtttttaaaatttttagaggagatgaggtcttgctgtgttgcttaggctggtctcgaactcctgacctatctagagataattttaaaattcctttttgatttcctctttgacacaatagttgttcaaaagtgtggtgtgtagtttctatgtatttgtgaattttcctgttttcttaagttattgatttctagtttcattccattatggtgggaaaagatacttaggacgatttacatcttcttaagtttgttgatacttctttgtgattatatagcctaaagaatattctgtgtacacttgggaagaattctattcttctgttatttggcaaaaagttttgtatatgcgtattaggtccattgggttcatagtgttgttcagttctgttgtttgcttattgatttctgactggatgatttatccattacagagaatgatgtattgaagttacttgctattattattattattttgagatggagtctsgctctgtcgcccaggctggagtatagtggcgcgacctcggctcactgcaacctccgcttcctgggttcaagcaattctcctgcctcagcctcccaagtagctgggattacaggcatgcaccatcacgcccagctaatttttgtatttttagtagagacggagtttcaccatgttggccaggctggtttcgaactcctgacctcaggtgatccacccacctcagcctcccaaagtgctgggattacaggtgtgagccactgtgcccgtcctacttgctattattttattactgtcaatgtttgccttcagatctgttgttgctttatatatttaggtgctttgatgttgggcacatatatatttataattgttacatctttctgttgtattgaccctyttatcattatataatgacttttgttccctcttgtgatgatttctgacttaaagtttattttgtctgataaaagtttagccactcatgttctcttccggttacttacttgcatggaatacctttctctacccttttactttcagcttatgtgtgtctttaaatctaaagtgagtcttttgtagacagcatgtagttgggtcttgttttcatccattcactcatactatatcttttgatttgagagttaaagtaatgattgataggtaaggacttactattaccattttgttggttgctttctgttttgtggttctactattcctctctttttctctttgtgatttgatttttatttttgtagtggggtattttggttctttttatcttttgtrtatctactgtgcttttttgttcatcgggtttgcatcaaacattttatagttatagcactctgtcttacgctgagaagaaattactttcaatgacgtatagaaactctacactttagtccccattcacacacctaatgtaattaatttcaggttttactttatttttgagacagggtcttgctctgtcacctaggctggagtgcagtggtgcgatcttggctcactgcagcctctgcctcccgggttcaagtgattctcctacctcagcctcctgagtagctgggactacaggcacacaccaccacacctggctaattttttatatttttagtagagatggggtttcaccatgttggccaggctggtctctaactcctggcctcaagtgatctgccttcctcagcttcccagagtgctgggattacaggcacgagccactgtggccagctgcatcttttagtttctacttgaacttcctttagttgctctcataaggctggtgtagtcatgacaaactccagtttttgtttgtctggaaaagtctttatctctccttcattcttaaagggcaattttgatgagtaaagtattcctggttggcaggtttttttttctttcttttagtactttgaatatattatctcccgctttcctggcctgcaaggtttcagctgagaaattcactgatagtcttatagaagcttccttgtatattatatgacaagtaggttttctcttgctgctttcagattttttctttttgagttttaacaacttaattataatgagtcttggtgtttaacttatttggagacctttgggcttcatgaattgaaatgtcccttttcctccctagatttgttaaactgttagcctttagtttttaaaaataagaagctttctgcccctttttcttctccttaactcccatatgcctgtattattttcacttgatgttgtcccataagtcctgtatactttccacattcttttttattcttttttctttttgtccctctaatgctatcatttcaaatgacctgtcttttaagtttcccagttcttttcttctgcctgagtctgctgttgaagctgtctyttgagcttttcagttgagtcattgtattcttcagctccaggatttctatttgcttcttttttatggtttctgtttctttattaaacatctctctttattcatttatttgctttcctgrttttgtttagttgtagttcattgagcttctttaagatgattattttggattctttgtcatgcaattcatacatctctrtttatttagggccagttactagaggtttattagtttcctttggtggtgtcatttttgcctggttctttataattcatatagccttgcaatggagtctatgcatttgaaggagcaggggccttccagtttttatggactcgttcgccaagtaaataccttctcctattgagtccctgggttgatgggattgcctgtggtattgtgattaagcagggctgaagctagattatggggctacattagggttcacagtcagtgggcgtaccactaggggcatggacaagtatgtcccatggatggggagagctgtctctggaactcaatagggtgggacccaagctgggtcccaggctggtttgggtttatgtttgggtccaatcagcagcccttttaccagaggaatggacaggcatgatttccacaaggcccctgttaaggcaggacttcctcttggccacagtagagcagggctggagccaggtcagagtgctgctttgagtctgcagttgggtctggttggtggatctgttactaggggcatcaacagacatggttccttcccaggatggatgaggctggtggtaggactgcagacaagtgggactggagccgggtttacaagggacaggctgattctgggtctgtagctgaaaggtcagtgggcctgccttctccaagcagcccttcctagtcttgggctccaccaaggtttcataaccacctacctcaatcctaaggttcttacaatggcacttatggccatggatggcttccaaactattgtttctgtaggaggaccagggctggggacattctcttttgctatcttgcttacgtcacctacaacctactttaaaagtaaatttgttctaatgagcataatgagaaacaaagattttaaaaataaactaaataattaatgcctaagtaattccaggttaattttgtatactccagttcttcctatcaggtatttgtcattcagagaggtaatagtatgaaaagaatattttaggagtatatgagaatattgtatctttttttagaatatggttggctaaaatatttacatctgctcctaaaatattcctgcataagcttgcagtgagccgagattgcaccactgcactccagcctgggcgacagagcaagactccgtctcaaaaaaaaaaaaaacctatatatatacatatatatgtatatatgtattcctgcataatattatcttggtgtttatattacctgtgaagctgtaagtatattcttttatttctgtaacaatttgacaattgaagaaaagtatgtgttgaatttttagcatytactacacacacacgcacacacacacacacacacacactactgttgtactttgtaatatcaagacactgataaaagttttggtgttgtattgttatggattaagacaaaaaaattaaaagatgagatggaggagctctttctattgtaggattatctattgttttcatgtttgatctgtagtgaagtatattagtgaaatagagaaacagaatgatgartactaagctattcataaaatttcagtagtgtgtaatacttgtagttttgaaacaaaatcagctaatatcaccttgacttttccccatcttcctattaaaaaaaattgttttaattctggatttatgttttctaattttcttttccagttaccctgcagtttgtgaatttttgcagaacaataatttactatcaattatcagagcccatgaagcccaagatgctgggtaagttacattaaaattgtaccaaatatcgctgcagagtctttgcatttaatatgcagacagatggactttcatctctttttcaggtatcgaatgtacaggaagagccaagccacaggctttccatcacttattacaattttctctgcccccaattacctagatgtctataacaataaaggtaaaggaatccagcaatatttgagtttgaatttatgagtaaacgtgagctctggtttaattgtatgtacgtatgtgtgtttgtgtcattttaaaacataaattttaaataagaaaaaaaggggtcttagttgaaacaaaggccaagaaatttagaatttatgctgctgcttggtctttatctcctaaggattactggcttctttgtgagtataaataatgatcataataggtcagattgatactacagaatcaaagtataagaagaataaattgcttcaggctcatgccagaatagttagcataaattattggttttggtgaatttaatgtgtttataacagtatctcaaagtcaccattggtattttaatctttgtgaattattaaactatttttgtttttcttgagatatggtctaggtagagtgacctagtgtacaaagtcaaaaaaaaaccttcatttttagtttaaaccctgccagaaacgaatactgtgactttgagtgagtcacattatctttctaatcttcagtttcccatatgaaaaaagaagaatggatatatacatgccttttgttccagaaattttacttctaagactttatcctgttaaagtcttttttttaatttaaaacttttatgattaatagtttataagttttctatcgaggcagtggtcctactaaaaacttcatatttctgtaactattttgttgtttataaagtatgactataaattaataggactttgaaaataaacatgccagaacaaacatatccaaatgagtattgtcccttcaaagtagttaccttgggaggctacacacctattccaacaatgctgtccttgttcaaaaacatttttggaactcctcttttggcattgccttcagagtctgcgacacattcttttgattatcctcaatgatgggaaatcttcgtcctttgagggtggatttgatttttggacagccaaaagtcattcggagtcaagactgataaataaggtgagtgatcaagctagatgataccatttggggtcagaaacaaggtatgattataaggtaatgagactggtttttctcgtgttgctgatacartggctctggaggcacttccaaaagaggagttccaaaaacgttttgagtaatggcagcatctctggattaattatatggtaaggcaacaagttgtgctgaaaagaacacaaagcaaggagtcagtctagtcctgcttcacttttaagtgtgtcacatttaacaagatacttctctgagcctcatctttaaaatatctgtcatatggggttgttgaagataagttggaataaggaaaatggatattaaagtgttgttcaaaatataaattactataataatacagattttactgttattgtacctgatgtgataatatcaaaggaccacactcatctgataaaaaggtctggtgtgtttgtagctggtggtttcttaagtctcattactttatagttataccttgtatatgcagttggggagataagtttcaaagatggccaaaatataattaatatttactctatttaaaagtaaacyatggaatggcrcatctcatttaaatccgatttgggtcagtcattttagtgtgtcctccagtgacttgtctattttaaaaagcatgtctttaacttaagttctgtcctagtcttatgttttcatttaacttagcattcttctctgagccttatctgtcctacaatgctctgcttctccctaagttcatttgttatttcctttttcctgatatttccagtatattagcaacttaggttttattcttatttattctcttatcaatggtgtggactgtttgtgttgttaaacgtcttcaaggactcttgtggccctagatctcctatttgtaatgaaggtgtttctttctcactttcttttttaacttcatcaaaaagagtatctattgattgctcaatggatttatcagtgtgccaagctgaaacacgccacctaagtcagcaggcactatacagctcactcactgctagcttgttttttgtctcaatctaacctggttttgttcttgattatttctttagcaaacttttaacatcacagtcctggccaggcacagtggctcatgcctgtaatctcagcactttgggaggccaaggggaggatcacttgaggcctagaattcaagaccagcctgggcagcaaaatgtgaccccatctttacaaagaaaaatttaaaagttagccaggcaaggtggagcatgcctatagtcctagctactcaggaggctgaggcagtaggatcctttgagtccagtagttcgaggctgcagtgagctgtgatcacaccactgcattccagccaggcaatagagcaagaccctgtctctaaaaaataaaaaaaaaagtaaaagccacagttcattctacctgagtattctgtcggctttgacataattagtaacttttatctcaaaacagtcttattttcattggttgtttcttargcattttagaaggaaaaaggcagaaaatgtggcatttgaaacagtccctgggggtactcagttactccccatacaagtgccttcttttctgaaaaagggaactctattattctttttyttcttccttttcttctactgttgctcttctttctctttctctcttttcttttctctctctttctctctctctttcttttctttctttttctttctgcttccttttcttctttctttctttctttctttctttctttctttctttctttctctctctctctcttctctcttctctctctcyctctttctctcggtctctgtcacttaggttggagcacagtggcaggaacttgattcactgcagcctcgacttcctgggctcaagtgatcctccmacctcagcctcccaactagctgggaccacaggtgcatgccgcyacacctggctaattttaaaatattttttatagagatagggtctcgttatgttgcccagrctggtctcaaactcctgagcttaagcagtcctcctgcctcggcctcccaaagtgctggtattacaagtgtgtgccaccacacctggcctctttcatattatttttttttttttcagagacagagtctcactgtgttgcccaggctggagtgcagtggtgcggtcttggctcactacaacctctgcctcccgggttcaagcaattctcccgcctcagcctcccgagtagctgggactacaggtgcacgtcgccacgcctggctaattttttttattttagtagagacggggttttaccatgttgcccaggctggtctcaatctcctgagctcaggcaatctgcccacctcggcctcccaaagtgctaggagtgctctttcatattctttagacttcttggtatctacaggtatttcctagttccactagttacacgaaagacctttaatcatgatttttaaagattcttattcttgttttcttctgtccactgggaacacacccaaaagcagttttataagctcttgtttccagtcattcactgttgagactcacctcccacttctttttcctgggtagaaattgagggagttgttgaataatgatatatgacatatttacctaaactaaataaaatacatacacgtgaaaataatggaacatgtacatcatagccagtgttaggctttttaagtgctagaaactatattttaatttattttcttaataatatatggtgtacattttagacattcaataacttaaattttaagaacactagattatcctgtagcaaagaaacaggaatgaggacgtgacctatatctgtcatttctggagaactgttacaccctgttttattttatgaccacagaataattaagagaatagtgcaaacaacattgctggtgataaaggctaaggaattggattttaagactttcaaaatataaagaaaatcagtttggcatcaaagtatgtgtgcgactatctgaatggttaatattaaacatagcatgctggcaatacactgctgtgtattggagaaatcggcaattttaaaatccgctatattgaatacagagatgacttaatctaattttgaacatttaattgtaaattgctccaagtttgccatttgtatcttccagtatgagttgataactgcaatatataaactcccagagagtgtatacaatctttgactctggctaatgactagcaaaacaggctgtgtccatttaatgagtaatttttgccttcaaaggagagttgtaattataaccatttggcctataaaaggaaattatggggaaattttcctcacgtggatcttgaggtttatatagatagttactgtgcagtgactccaaagtttcagtttcttttgtacttttattatatgagctcttcaggtaactttgttccttggaataattcttaagagaatgaactgaataaaaggctttaaaattttccatctgccctttacctagtcaagtcctgactttacaaatggaaagttctcgaattctgtgtagcaggtacacagctgtacaaagcataccacttgccatgccatgttcctctgtgccagattttcttgcttttttcctttttagctgctgtgttgaaatatgaaaacaatgtcatgaatatcaggcagtttaactgttctccacacccctactggcttccaaactttatggatgttttcacatggtctttgccttttgttggggaaaaaggtaagagaactaaagcacatgtctcatcagytgtttggtgactgagcataccttatatttgcatgagcccctccatgattcagaaatgttttctaattttgtttgttctctacatagattttttttttttttttctgagatggagtctcgctctgtcacccaggctggagtgcagtggcacgatctcagctaactacaacctccgcctcccaggttcaagcaattctcctgcctcagccttctgaggagctgggattataggcacgtgccactgcacccggctaatttttgcattttagtagagacagggtttcaccatattggccaggctggtctcaaactcctgaccttaagtgatccgccctcctcagcctcccaaagtgctgggattacaggtgtgagccaccgtgcccagcctctacatagatttgtaaatggcatgtaattggttcttaaattttaatatattatggtttttttattgtaaatatcaatttaaagtagctgacctactatgatcaagatgttaaaataacatagttacttgtcattccctcagatttcttcagtactgaagagatttaaacagaatttattgtccttacaattttatttgtacagctactcaaattagctaagcctgttggacgtaggcctgttggcttaactttgtaaagtgggaaaaaaattttctcacgtgtgtatcagtgtgggaagaagctctgaacagcaatccggtaaaatcaagtaattaggcaatagatcttcaaagactccagacttttactggagcaagtratctacccaaattctttttaaacctgaaagtttacatttatgctactttttatagctattcttactaacataatgataaataatttttgcttatgcttacttaacatgtgtgtttatttagatatccacattattttagagaaagtacctcattaatcgcgtaaattttggattattttgtcttacttagtcacagagatgctggtaaatgtgctcaacatatgctctgatgacgaactgatttctgatgatgaagcagaaggtaaacttttcctcctttgaactaaaactagaaagaggtttggttttggttttagttgttttagtttattttgaatgattttctttgtcttattaaaaataaagttagttcattgtagaaaaataaaatttgaaaaatacgagaaaccataaataaggaaaaaaagtcacccataatcccatcatcttatagatatccacagttaacatcttaatgtatactgtgttaattgtcttttatctttgcacatagctttcctctgtagtacactatttttgtggagtttctttgtagactagtttctaatggatctgtagttgtccatgttgatcagtgttgtaactaatcccggtggtgttggttattggagtttttcccaagtttttgcygacaaaacccatatagttttgaacatttgtttagataaaaatgtgcacattctcttaaccaatatttattacatgcttgatatataccaagtactgtattgtttaggtccttgctctcaataagcttatttgctagtgtagggaggaaaaacagtaaataaatatgtcagatgaaaggaagtaaagcaatattagaaaatcaggaataacacttcttgattatttccataggatgaatttgtagaaattgaatatctgtgtcaattagtacttaaaattacaattctgatacagatagaaatttctgatacagcctctagaaaggctgtaccactttacattttgcaggatgcatagtcacagtgctgtctccaatactgtttatgatacttgttatagtctggtgttactaagtttttaattaaatttttagtttatatttttatgagactaatggacaattttttcttgtgtttgttggcaatgtttatctctcttttgtgacttgtcaattcatatcttctatcctttttttgagacagagtgttgttctgtcacccaggctggagtgcagtggcgcgatctctgctcactgcaaccttcacctyccgagttcaagcgattctcctgccttagcctcacgagtagctgggattataggcgcgtgccaccatgaccagctaatttttgtatttttagtatagatggggtttcgccatgttgcccaggctagtctggaactcctgagctcaaagtggtctgcctgcctcggtctcccaaagagctgggattaacaagcatgagccaccatgcccagccccattttgatttttttcttattggtgtgtgagggatctttttatacagtaacattttattatatatgtagccaagtactttttttcctagtgtgctgtgggaggtttgattataaaggtaggtcctgacttgtctgacaatgcaagagattctggaaaagtggtggtcatccaagcacaaaccggcctcatcctatccaggctctgtgctaaggtggttcccttaactgtgaggataaaccatctccatcgtggagaaaacacaactccctttgggaatctagaggaaattaccatacactctcatgcttcaggttctgcactcatgcttcaggttccgcactgaagatcaacagcatatgcaagatagcttgcgagtgtttttatttatggtataggagatgactacaaggaaccagttcttcttgaggaaatagtgcagccaagtgaaaaacaaaagaaaaaccgaatatccccctgggcaacatggtgaaaccccatctctactaaaaatgcagaaatcaaccagatgtgatggcgagtgcttctggtcccagctacttgggggcctgaggtgggaggattacttgaacctgggaggcagaggttgcaatgagcggagatcttgccactacactctagcctggccaacagagggagaccctgtctcaaacaaacaaacaraaacacatatatttcctattctttcccaccmcaaacataaaaataaataaataaataaataaataaatraaaaggaagaatgggccgggcatagtggctcacgcctgtaatctcagcactttgggaggctgaggcaggtggatcatgaggtcaggagatcgacaccatgctggccaacatggtgaaaccccatctctactaaaaatacaaaaattagctggggtgtggtggcacacacctgtagtcccagctactcgggaggctgaggcaggagaattgcttgaacctgagaggcggaggttgcagtgagccaagatcgcactactgcactccagcctggcgacagagygagactcatctcaaaaaaaaaaaaaaaaaaaaaaaaaaaggaagaacaattatatcccctgaaagagaagctatagaatccattaaacaaaaaaacatactattcctgtgaagagatttgtaaactgttctgtcctccgtttttgttccttgtttttggcatcatttattctgcaaataatatctttgtttaatgttattttcatgatctgtggggttagaaaatattggatgctcatagatgtgaattaatgtaaaaccataaacttttaagaaatggaagaaactactgacaaaataaatttgcaatttaatgttgtatcatgattccaaggatatctcttatgagctggtaaagataatagcctgtttctctcattgcatttcactttgatttttttttctcttttccatgtaaacataaatttctcttctcatatttctgtcttcatctccttgtttcttggtgtttcttctccctgaagatcactacattccaagctatcagaaaggtatccgactaaactgtgctaagagcttaatgcttactctctgtcccaccatagtctattggttagacttaaaattggtagttgaataatttcagaaaggctctccatccgccccttcagttttaatgtatatgttttctctggacctgttgcgtgatctggcagggtgctgagggttggatgtgaggaaggagaggccatgtttctttttctgacttttgactgtagtcacctggtgcatgctggaccttggcttctcatgtgtgggctattttcagaatcttagataagaaaaagccataaagtcttaagttaactttttctgttgttgctttttaaaatagtgcacagttgtaagtagtatcgtgaggcaataactcactaatataagtgaagcttatagaatgaaagcagccctcactaagttcaggagagctagctgggtgttgtgtttacatacagaagacagctgctggaatgatcacttgccatttggcaggccgaaccctgcaccctaaggtggcccacagcattatcaaaagacatctttgctgtagcagctttctttgtgaggtttgtttatgtatgtgtgtgttttattctttgctgtgctctacgtttcacaaccacaaataagttcctacctctcatagatccacccagtctgtcttttttgtggcctctcattttttacttcatctttttatcttctgagtcattttttctcttgctccttagaacttcctgagatttttgtttgtttaaacaaacttaagccttcatttctgttttttaaaaacaattgtttctttaacttaagacacttcatcctgaattttttaaaggcagcctattaacacatccctttaacttacttattctttgtattctctaaggaagcactacagttcgtaaggagatcatcaggaataagatcagagccattgggaagatggcacgggtcttttcaattcttcggtaaggatgtctgtcattacagtgcggattaaaggcattttgagagtaaattagacgtcgaattcagaacagtttttttakaattggaatgtagtattgaaactgcaggtctttaggttgagtgcaaattcaatgaacatgtttaagcgactaaaaatgttccagcaaacattgatttgttagtagcttagatgtagtgaatgtagtggtttagtgtggactttccaacccgattgcctgtgttcaaattctggctctacctcttcttacctgtgtgatcttgggtttcatctctgtgccttagtttccttgcctgtaaagtaataataggccctagcgcacaggttgttaggtgtattaaatgggatacaatatgggaaatgttagaacagtgcctggctgttaaacacttctaattgaaaaacaagaactggctgattgtttaaaatgaaaatatttgtggaaaacatccctttctttgagtcagggaaggcgtaggaggtaggagaacctatcttccatctctgctgtctttcttcacttccttcaatatctttaagttgctgaayggagagttctcgggcattaacccagggtttggtctccctttgcaggcaagaaagtgagagtgtgctgactctcaagggcctgactcccacaggcacactccctctgggcgtcctctcaggaggcaagcagactatcgagacaggtgagtatgagagtgctcctccatggaaggtgtgctcccgttacctaacagtcagcacacacttacaaatgggggctttcctcagaaaatgccacgagagcagttggttataccataagcggggaaatgaatcttcacccctacttccctccatacagaaaacctaaatcagaatggcttattataacttcagtgtaaaaagcaaaacagtaaaacaagaagaaagtatggagagtagacactggggtagacagagtccttaagtaggacacaaaaagtactaaccttaaaaagccagttgaatttcattaaaataaagaacttctcttcttaaaaatacatgattaagagaggaaaaaggcaagacacaaaatggaagaaaattttttgcaatacacgtctcacmaagcccttgtatccagaatatataaagaactataaatcaataggaaaaaacaaatttcaaaaatggtcaaaagatttaaacaggcacttcacaaatgaggatatcaaagtggccaataggcctggcacagtggctcacgcctgtaatcccagcactttgggaggccgaggcgggcggatcacctgaggtcaggagttcgagaccagcctggccaacatggtgaaactccgtctctactaaaaatagaaaaattagccaggtgtggtggtgggcacctgtgatcccagctactcggttgcctgagacaggagaattgcttgaatccgggaggcggaggttgcagtgaaccgagatcgcgccactgcactccagcctgggcgacagagtgagactccatctcaaaaaaaaccaaagtgaccaataaacatatgaaaagatcttaatattattatagtttttcatctaggaaatagatattaaaaccacactgagggccgggagcggtggctcacgcctgtaatcccagcactttgggaggctgaggcaggcagatctcttgaggccacgagttcaagaacagcctggccaatacagcaaaaccccacctctactaaaaatacaaaaattagctgagcatggtggcatactcctgtaatcctagctactcaggaggctgaagcactagaatcactggaacccgggaggtggaggttgcagcgagccaagatcacaccactgcactccagcccggatcacagaccaagactgtttcaaaaaaaaaaaaaaaaacaaacaccacagtgaggtaccattacatacccactagaatggctaaaaattaaaagtttgggccagggcatggtgacttacacctgttatcccagcactttgggaggctgaggtgggaggatcacttgaggccaggagtttgaggctgtagtaagttatgattgtgccactgcactccagtctgggcaacagggcgagaccctgtctccaaaaaaaaaaaaaagagtctgacaataccaagtattggtgtgtttgtggagaactagtactaggtatgttgcyaaagggcttgtaaattgattcaagcgctttagaaaactactgggcagtaaagctaaacatatgtctaccctgtaacccagcagttccacacctggtgtatatccaagagaaactggatgtgttcaccaaaggttatgcatgggaatgttcactgtagctttattcataatagctcaaagctggaaacaacccagatgtccatcagtagcagactacataaataaattgtattccgaaatataaataaataaactgtattctatttatacaatggaataatactcagcaataaaaaataacacattatggacacatgctacaacatggttgaatctcatagacattacagaaaactgcaaaagccagacataaaagagcacagactgtctgatttatataatatttaagaaccattggactaatcagtgataataaagtcagaatgtcacttcctctggtgggagaatattgtcccagaagggcacagggaacatctagagtgttaggaatgttctgtatcattatcatggtggtagttagacatgcgtatacttatgtaagaatgtgttgagctgtacacttcagatttgtgcacctgctgtgcctcgtgtatattttgtaccttaaagaaaacagtttgagggggttgcagtttctcaatcagagagggagtttgcctctttccctgcagccatattctattccagtgccaaaatcacctcttcaatcagagtaccaattctgaaatttacccaggagctgacttcttaggaaagggctttctggaatcccggaatgaaaaggttgatgttcgtgagaataaacatgcaargggaagagacaggagatcatattactgggtgactaacactaggtatgaaaattggtattgaagcattaatatcttaaactaaagtttaactgctttttttgctccccttgttttgttgaattgtttctatttagtttttttcccacctcatcgttcatctggccttttttctttttctttttttttcccaagagacagagttgcccaggctagaatgtaatggctaggtactgtcatagctcatggcagcgcccggttgctgggctccagcaatccccctgcctcagctactcgagtggctgggactacaggcatgtgccactgtgcctggccatcctgccatttataggagtcctttttcttttgtagaaatttcattgctattgactaacagggacaaacccattttttttcttttcttggagacagagtcttggtctgttgcccacgctggagtgcagtggcacgatcttgcctcactgcaatctccgcctcccaggttcaagcaattctcctgcctcagcctcccaagtagttggaactacaggcgtacaccgccatgcccggataattttttatattttagtagagatggggtttcaccatgttgcccaggctggtctsgaactcctgaggtcaggcaatatgcccgcctcagcctcccaaagtgctaggattacaggcgtgagccaccgtgcccagcccttttttctttttataagattgaattcctccttctctttcaaatagaatactgagatattagagttcagctatttagaaggaagtctgaacattttctctttggaagtatagtttattttcctagttcctttagtttcacagaaagtatcagtaaactatttccgattgaatatttttctcaaataaatgtgcagttttttgtgagcagaatatgttcccaccattgctttgcttggtaattagtcatctgagatattccgagagcaactctgacaacaaagatagagtaataggcagtaacatgagttaagagaaaaaaaggaatgtcctatagcatccttaggtaaacattatgaaaatttgctgatccacaaaattgttttaattgaaaccaactttgtctaaaccttgagaaagcaaatctgcaaatcagggctgagcaacagaattatatagctatgttatttggaaatttgtttctaattcttggtcaccttttgggctcagccccaaagtatgagttgaatatgagtgttttaatcaagataggaccattgattgatacttccaaagttgatagaaatcttcagtaatgtgtgagaacaaaggtaaagttggagccaactttttagagtttcttattcttattgattcacaggaagtgagtttattttgttattttcacattggagtctcagttccaccagctcattggctaactggagcattaactaaaaaagaccttttattgttcatataacttaacttggagagctttcaaccaacagtatcccatatggccatgtaacatacattcatgtatgtctcaccttgatctaagagggattggcgtgagttacagtatacatgaaacatagtggagtaaaataaatatgcttggaaattgaagcacaaaggtaaataaaaataaagccaatagccacaaatttgactctaagcatcccagtagccaaaatagtggggaaagccaaggacaggacaagattcacaaagaccatcagattaaaacagatcagttataaattggactacatcaaaattaaaaactctgtactgcaaatggtactatcaagaaaatgaaaagacatcccacagaatggttgaaaatgttttcaaatcatatatctcctaagagattggtatctagaaaatatactcttacaactgaataagaagacaacccagttaaaaatgggtaaagaattgaattgacatttttcccatgaagacatacaaatggcacatgaaatgatgtttgacatcattagacattcagaaaatgctaatcaaaaccacaatgggataccacttcacagtcagtaggatggctgtgaaaagacagcagttaataagnagtgttgatgagaatgtggagaaattgggaccttcttaacactgctggtggaaatgtaaaatggtacagctgctttggaaaacattctgacaggtcttcaaatgattaaacatagaattgacttattactcagcaattccagtcatagctacataccccacaaagaaatgaaaatatgtcctcgcaaaaacttgtacacaaatgttcataaatggcattcaacataatagccaaaaagcagaaaaaagcaattgtccataaactggataaacaaaatgtggtaaacgcaatggaatactattcagccataaaaaggaattaaatgcaggtatacatgtcaacatgactgaaccttgaaaacattatgctaagtgaaagaagtcagtcaytacagaccacatattatatgatgccactcatttgaaatgtccagaacagaccaatctagagagaaagtagattcgtgttcaaccaggattaaggggaagaggtgagggaaggaaatgggaagtgagtgctaataagtgggggatttctcattggggcaatgaaaatattctaagcacagattgtggtgatggttgcacarctctactatattaaaaccattgacttgtatactttaaacaagtgagttttgtggtatatgaattctatttcagttaagatgttaaaaaggaaaacaaaagttcgggtcatttgatatgactgtttcttataatggcccttactgcaggctgctatctttatacccaatgtgaatagcaattctgggagggccccaaacaaggtaatatcatacacattttaccgtgtagcttttaagctctaattagaccaacactcagtgtagagtttcagcaatgctttgttctcccacttcctaacagttacatcagtgatgtgctgtgagaaggcactgtagctttcttgtcaagggtatttgttctacttaaggagattagagagggtgtgacagtgatttaatacatgcctgcctatggttgacaaatgaaagcacttcataagtagatttcagttatccatttttcacattccattaggtagttaatgtagttctttcagtttctcttctcatattgatatataaagccttgggaatagcagcaaactgttactgctcattattcttcactgccttcttttggcaaattggtactggagtaactgacagggttctcctaataggatctttcttgtggcaccctgtaccttttcatatattagcgtttttactgtctgagaaaggagatgcaaggaagtttacctgttggtactaatttttaagttgcttccttttccattgctaagaaagaagagggctttcttagttactggccaactctcttgaacactgtatggaagccatatggattggaaacattagcctctgctatatttttatagcagatgggtacacacatttgcattaggaattcaatagttctatgcttttgttagctttgtactccactcctggacaagaaataacccttcacatggaacctatttttctctccttccaaatgccagtctgctgttcaaaggccactcttttttttttaaatgaagtaattaatagggcagttggactccaaataagtcacttgagagcagtaagatgtagttgtaaataagctttttgaataggacccagcagtagctcatttaatatcacctgagatattttacaaactaaggattgttgtgatgtcaaactatttgattctacatgttgtttcgatacgtggatatcaagatataaagtagcagttggctacctaaaatgaaaagagcaatgttccatggcacctgaaatgttaaaaatattagaaactctccccaccccatattcctcccaccccaattgagtctctcgcaataatcttctcgcttctctaactagttgactttcattatggatggggataggctaaaaaacgggcccctgggatggctgtgctgccatcagtgctgttggtttactcactctttttctgtcttcgtttttgcatgctactgctcctgccctcttacagccacagtagaagcggtagaggcccgggaaggtatggccatattactctgatagatgtgatccatgtgtctgtgtactggtttttcgaagctttatcaacatttcaaatattttattattgcatcaccagaactataacagtgagaaaaggtatagttgtttctaggcatgttaacgaagcaggtgtttcctttgtgtcctatctttgcattaattttaaataaccttcaccacagctacagttttttttctgggctctatcagctttaatgcaacggcagaagcttaagcaactggtcatgagaggtcaagtggtttacttctgtatcccttccatgtacaagagacatccatttgattctcaagagagccaaataggtcagcctcttcagcgattctaaaagatttcaagagcagaggcagaagtagactggaatttagttcaattcatttctgaggttgccctaaggtaggcaagttaaattaactttgtttctatgaaaaccattggaactgataaacttgtattatacttgtaattgttttattaggtaagatggttcaaaangcgaatgccttaacttggtgttataaaagttgaatcggaaggaaaatatgtagaagctatttttaagtttttaacttatgtacagctcctggttgtgcaagatagaaagctgtcctaaacgaaaagattagctcttttgttacttttttttgtggtctatgtggcctttgtgcgaaaagcaactaccctgggtttaacttgttcaattattctagtgttgcctttgttctagcattgagtatgtttctggtgcataagacactctttcttaaaggtactggggcccagtaagtacttgttagctttttgttaggtatatgtctaccatgattatgcatatagagcttttatgaaaattactttcacaatttcagctgccctttgggctttaaggaagcagtagctgcagccaagactgattcagtcagacattgccyatgactttcactagacgtgtgctccatagccacctttctgtgtgtttctctaggaggttgctgtgtgctaagaaactttttttaagcctgttgctttgctgcctaattgagctctctccacctgcttcctgtttttctgtagccatcagagggttctcgcttcagcacaagatccggagttttgaagaagcgcgaggtctggaccgaattaatgagcgaatgccaccccgaaaggatagcatacacgctggtgggccaatgaaatctgtaacctcagcacactcacatgctgygcacaggagcgaccaagggaagaaagcccattcatgacttaragtcctgccgtggctcaggtgkatctaaaactcaagaacaaattctatttatttattattggaaaatgaaaagcaactcaaaacaacttcaacstggaggtgcatttataattcagtctgcatttattctgtaaaaaggtgrctgttttataaattcttttaatttatgttcaatatatataaaaagtgcatctgttttgtttttcccttttttctccataattttaagaaatgaatctgattgttgtcaacacatttgtgaagtcttgtgctataaaggggaacttcccctaataaaagggccttggaaacctcaaacctgggtttctgacttgaactagtcagtcttcattattgttttttggaaggtaatgtctttcatgtaagactaataacgtttcaaatgcaagaagattttttccttttcatttttttccttttctgctgggtgccattgaagaaagtcctcttagatttcagtggctaaaagtgcttcccttttgatgggaaactggatcatagtagaacttcaaagtgaataacccaaatccagtgattttaagggcgaagggaaatgttttctataataacctactttctctggactctcagttcgtttaaatatgttctagtaaacaaaataaaaaataataagggatgttcttagatttacttaaaatgtgttcatctgaccatgggcatgattggtttaaatttccttaggactttggaggagaaagattttcagaaagctttcacaattgccagattattttactttcatttttgaaccccaggtgacttctgtaaaggaagtcactttctaaatatttgataaatgccctcagcagcaccttctacaacaagatgtatatatgcccttctaggctgttggcatcagctctcgcatgtgccttcccatcatccttctgttgttccctgtcagtattactgaaaccagctggggtagtagaaactgacaagagttcaatggtccccttgtgaattgaaggtcttgctaaagaacattggataagtgaggatttcctgtcttctatatcagttactctttaggttgaatggtatttcagccttcattagcatattttggaatgcgaaaagcaagtgttcagatgtagtgtgtgaattatcttcccttagtttgattttcaagtcacaaccaactagtgaaggaaattttggggctacttaggctcccattttaactagcctcatcgcaggagccgtgtcataatagtcattggtcagctctgcagtgaatgtacatgcctgggaacattacatcagagcatggaacgtgcacatttatggcattccttagtgtcatttgtgatgcggcagtctagcactaaagcaagtatttcagacagtaatacttcatattgggagtttccaggaaaccagaaaaacaaagaacaacataattttggtggtgtttttttttttccccaaaaaaccatacttctcattagaagaatgaagacttagcccatctatctctgttttcctatacctttttttctaacagtttctgatttgtttatggcagaaatcaaggcactcttagggaatggaatctgcctgcatagattgctccattaataaaaagataggaaggagataaaggatctctgaatgggttgtgagtaaaacctgtgaaagaaggggggaaaagtctctagtaactgtcttttcctgattgttgttgaactcaaatcgggtattaagcacctagatatccttatgctcctttcttttccaatcccaggattagaaaagatcctgtctttggaaatttcactgatgaaagtcattccatgtgacagactgcagagctgctagtaccttatcccttttctccttttcattaaggctgttacatatatacaatccacaggtagaaaccactcttaggggcctccataagcaggcagtagtagaaatagttactgtaaatccttataagcaaaaaataatattttattacggatgattatttaggaatggcttcactattgtctcaaaaagcagaatgataaagcaagtttccttgacagaaccatcacaaaattatatacagtatttcactggttccctctgagctgtggaggaatcagccagagtagagaggtaggtggtcctggttcaagaaaacctgagtaagttttagagcagcactaactcttagaggaggttaagtttgaaaattcggttgaattctaaagataaagttatcccttccgttctgtagctgttttaatgtaaacaacaacttccaagatggctggaccctgccctgggtttgctcgaagactacttttcctgtctagggccatgattaaacagacattttaattgctgtcaaagttctgcagttttggtgttttcaaagtctcttctgttttattgaatgtttccccctgtgtgtgctaaagatactggaaacagttacattgtgttttccttcacaggaccttccttgtggaaggcccacagggaccttctttttctgcaacttctcccatttaggaaaacaaaaacaaaacaattcctcaggcatgtcaggactcctttgtaaacttttctgaaatgccattttgaaaatgatgcttcacatggaccaggtttctcacttttagtgacatacatatcacaggacatttaaatcgatcagatgattatttcttttacaaatttgaaaactcatctaatgtaagttcaaaacatatatcctttttttatttccgtgttctgaatgtttagagcaaaagcaaaacaataagccaagggggtgtgtgtgtgtgtgtgtgtgtgtgtgtgtgtgtgtgttttctttaatagaatgataaaacaaaaatagcctccgttttccttaaactctcaaggtgacactttggttacaagtagaggcattgctgatttgctggtcttttgtgactggatattgattggcaaggtaagaattgcttatcacactctgatgagcttgatactgctccttgcctaggagtaaaagactcagcctctccaggaacatcagtattttttatgtctttcattgccttttttggttcttccatgaacaattcaatgaagcaagtttctctcaatagcaaagatttgccttcttaagattagctttctttgccatcctgataacttagggatgatttcctgacattgttcaaaataggaacagagaaacccttatttgttttgtcaatagactattattgaatgtcattaaggagcaagggaagatttttaaaaattggataatttcggggccttttttgccttttggcattgtcccttagatcctcttccctctgagtgctttaaaaacacacggtttgaggcacagctgatctctataggaaaaatattataagccatgcctgcatgagacacagctggacttgctgttcatggtcattattcaggagtctctccagcctcagaatgagtaaagctaaaatctgctccctctaccctgccctattttatgtaaatatggtagctgatctccaaaattttcaactgtaccatatctataaagtttaaccttttaagaattttcatccaagctgggcgcggtggctcgcacctgtaatcccagcactttgggaggctgaggccggtggatcacaacgtcaggagatcgagaccatcctggccaacatggtgaaagcccatctctactaaaaataacaaaaattagctgggtgtggtggcacatgcgtgtaatcccagctactggggaggctgaggcaggagaattgcttgaaccagggagttggaggttgcagtgagccgagattgcgccactgcagtccgcagtccggcctgggcgacagagcgagactccgtctcaaaaaaaaaaaaaaaaaaaaaaaagaattttcatcctgaccaatctgggtgaccaatcaattaaattggtttaggaagagcttgccctagattggttgatttcataatttttctttttattaattattgggtttttctctctgatctctgcattgaaaattatttcctaagccataaagacttgttgaggtaccattctagaatccccaatatttattctagttgttatagtaacagtggaacccaagtttctcctaaagcattacccagctttccttgcccaggcagaaaagatggcagagggagggtgaacccagggcccatctgtgggtatgggctccaatttcctaaattgtttgtggttataaccatggcttccaccttgtctggcaccgggtccacatcttttctgagacctgctagaaggtgagtaaaggacagcctaggaaggcccagcagtggattgaggagggtcgggttacctggaggacgggtcccaaaactggcttgccacagtccctttcagtattgctgtgatgagacgcctggaggaaagctgtcagagcagatgtgtgtagaggaagaaagttgtgtagtcgaaggacagtgttgtttactcttatcttgagtgtgagtagagaactgtattaacaatagggctttgtgccattgacagagtgtgaaagagggagcctatattacattggggtttgggacctgacctgcctatatctagccagcgagagtgaatggggtcagtgttagctgccttcatctatgcagtcacaaaggtaaagatgatactggagagtatattccctcccgggaggccttggcctcacgcccctgccaccttggcaagacctgctaaataacacctttgtctgagacagggttatgcatcatctcctcttctatgccctcatggcaagtctaggtggcttaagattaagaagtgaggacatggaggcggactgtccctctgagcagctctgaagtagggccaagcacactgccttccagtaagttcttgcccacattccttcactcccttgacgtagatgtctccaaatactcttaacatgaaatgcatgtaatgaggagcaggcctgtcatagatcttgatttggggcaataaagatgtgtttttgtcacagaactttttgaggatgacactgtaaatccctaacttttattttctcagtgcatggtgacccccatagctgtttttcccaatagttctgtcagcaggcattttccaagaaggggccccagtattccttcctaaatggtgaggtggtcaagacgtcagaccagttggtggtgtgatattttttcaaggttctgaatgatggattatttgcttgtgcttagagattgcctactttttcttgctttcagttatgttaaagaaggcgagggaaatgttacttattggccgaaatcatctaatgtcttttttgtgaacaagaaattaatttgttaggacttttgtactataaattagaggtaatcttaagatttaaaaaaagaagaaaacacccttaaatgataactttattggctccctgtgtctttatttcctgtatttcctggtggaggtacttatatttggcttttactcatttaataattccagaccccaggagaaagcctggcttttgatgtctggtctggtctctgatgataacaaggaattcccctcccaagggagggaatcccatcacaataaaaaggacctctctctttcgtctctccagccctttcattttaaagcagctatggttggccacaacgtgtttctgtttctcccaactcagaatccactccccaaccctggcctccttcttacccaagtcccagccccctctgcagcttctccaatagaggccactacttgaagaaaaggaagaaagacatcccagaaaacatacattgtttaccaaggataaaaatagttttgtactcttgtaatttaatgactgtgcgtgtgatcctaataatagacatggtgaattccatcttggagaagccaaggcagccaaagaggatttgaatgtggagttggcctaccaagaacgggaagtgtcagactagccttttcatgcctctgaaaagtagaaatatcatgaggtgctgtggattcacaaggaaaaacaagctcccctgggcaagtggggaattggggatagggaaagagccagggccctggagaggaaagtgtgtcagtgaggggactctacaggttatggcagtagaggtagaaaagctaaatccagcactgccaggtccaagtgaggtgacttttacactaaatacaaccacattaagggccacagtgcagtttacaggccagaaaacgggcccaggtttctaatttccaataagctgagtagcattgggttctttgttatcccagtggcatcctgatgtagcaatgtccctac

SEQ ID NO: 93218 - DNA, 66916 bp, Homo sapiens
  misc_feature (1)...(66916): n = A,T,C or G
aattatgtaaagtggttagaaatgggctagtgcatagtaaacaatgcagaaatagtacctgctatttttttaaactttttttcaaggacccgttgctttgctttgatttgccttccacttacccatttattcatttttttgagatagagtctcgctctgttgcccaggctggaatgcagtggcacaatcttagctcactgcaaccttygcctcctgggttcaagtgattctcctgcctcagcttcccgagtagctgggattacaggcacctgccaccaggcccggctaatttttgtatttttagtacagacagggtttcaccctgttggccaggctggtctcaaactcctgacttcaagtgatctgcccgcctcggcctcccaaagtgttgggattacaggcgagagccaccgcacccgactacccatttattcttgatcgttcaggttttcaagatctttatgttttcaacggccggtgtgtattgagaaaggctgagcaattctgttccagggagggaagtkctgagagagagggatgggggaggaactggagctggagagctgaagctgcagcagtggtgacttcragagagtcactgtgtaacctctggcaagggggaaggagtggacaggaagaaagttcttgtctggttccttgcaccctcagccccagcctcctccttcatatcccttctctctcccccacatcgtctcccacacggccccagagggatcttcctccacccagaactgaccctactcacagccttctagggctcccaccacccccagataaagtcccaactcctgtactcagccctgccagatccagcccttgacaccactgcagcctcatgtcctgcctttccttacacactaacttctccagcctgacctcggcccatgggctgtccctgggctgtggcactggagaggctctgctttgagcagctcgagagagtgagggagctagacatgacggctccaagatatcgttcctgaaccggctcatcaaccacctgctcccgcactccccattcagagaccatctcatcatctacccagtcccaggagtgtacccagggccctgtcctcgccccctccatagtcctgtctctcctgctccttggctgtctctgatatttgtagagcacttgggacagtacctgcacatagtaaacctagtgtgtctgttagctcacatactatacatacataaacatatcaacaaaattcttcaaggttctgcttactggttacctcttccaggaagccttccagaaccacccagtaagctttcaggtggagctgaccactccctttgtatcctcctctcatctccccctcaatctcactctcactactatgggccactatctataatttttttttgttttttggtctttgtctaccccattaagttctgaactgttcaagagccgagatcagtcttggattctaaacgtccagtgaagggcatgcacatagtaggtgctcaataagcatttgttacattggaactgggttctgttaataggtttcagattaggcctgagcttctttgagcttcttgcaagctctaacgttctaggtttctgggtgatgtgtgtgtttgatgctgttccactttcagatctccgagtctctgtttctagaataagtagtgagaaagaagttgcaagaatgtatttcacaatacatgtttaaataactaccggtgaaagagctgttaagagtgtgcttactctgtgctggatgcctttctgaataatttacctatgagatagacactattatgtctcccattttccacatgaggaaactgaggccacagaaaggtgaagtcactcactcaacagcatccaccaagcatcagcagcgcaatggcccagagtccatgctctcgaatcctgtaacagctatcacttaaccagccaccccatgttccaggcaccagggttatgtgtttttctcatgtatgatctcacagtatcctcacaatggccccatgaggcgggtatcgtgataaccccatttcaaaggatgagaaaactgaggcttggagatgtgaagtccattgcccaaagtcacccatccaggaagtcgtggagcatgtctcaggcagcctaaaggcagagcctgtgttcttaagcactctgttcttgtctacagctccccaaccaagggtctcaaactcacacacctactgggaccaggcaggcaaaacaagcaaaagacagtgctagggatgaggcagcagagagtggcagggtttggggcaaacctgggcagcaaagccccatccaagaggggtggccgtctgccaatggaaacatgggctcacctcttccggtgttccagtggaagctggaaacctaactgtgtggggaacaacccctgtttaaaactggggtcagaccaggcaccgtggctcacacctgtaatcccagcactttgggaggccaaggcaggcagatcacctgaggtcgggagttcaagaccagcctggccaacatggtgaaaccctaaaaatacaaaaattagctgggcatggtggcgcatgcctgtaatcccagctactggggaggctaaggcaggagaattgcttgagcccaggaggctgaggttgcagtgagtggagattgtgccactgcactccagtgtggatggcagagcaagactccgtctcaaataaaataaaataaaataaagtaaaataaaattggggtcaatttggctgggtgtggtggctcatgcctgtaatcccagcattctgggaggccgaggtgggcagatcacctcagcctccttgaggtcaggagttcgagaccagcctggccaacatggtgacaccccatctctactacaaatacaaaaattaggtgggcatagtggcacacacctgtagtcccagctacttgggaggctgaggtgggggaatctcttgaacccaggagttggaggttgcagggagccaagatcgcactactgctctccagcctgggcaacagagtaagaccctgtctcaaaaaaataaagactaaataaaatacaattggggtccattaaaatacccctggccacctgggtgtgattctggctctcctggatttctcacctgcccctctttgcacagttgtagggaactacctgtgagcttgttcttttaacgtcaatctttctgtccagtcagaaagtaccagaagggcagggatttttgtctcttgcccaactccatcgctccaactagaatatccccagcccacagcatgggacctggccccttattcactgaatagatggatccttttctttatcctgcggcttctctgcagttcagtctcccagtctctgtctcccagtctttgtcacgtgtacaaaacctggctcttctgtttccctggctgtctctggtgtctctgcctccatgtctccatgtttctggaattttccgtgactattttctcctcttggggtgtgtgtgttttacgctctgcctctcgaagtctctattacattctgtaagtcaggccgggcacagtggctcgcggctgtaatcccagcactttgggaggcaagacgggcagatcacctgaggtcatgagtttgagaccagcctggccaacatggtgaaaccccatctctacaaaaatccaaaaattggccaggcgtggtggcgcgtgcctgtaatcccagctactcaggaggttgaggcaggagaaacaacgcttgaactcgggaggtggaggttgcagtgagccgagattgtgccattgcactccagcctgagtgacagagcaagactctgtctcaaaaaaacaacacaaagcaaaacaaaacaaaaacaaaaacaaaaaaccacacaaaaattagccgggcatgatggcaggtgcctgtagtcctagctactcgggaggctgaggcgggagaatcacttgaacctaggaggtggaggctgcagatggcaccactgcactcaagcctgggcgacagagcgagactccatctcgaaaaaaaaaaaaaagtctgtaagtcgggcccacaccatctcttgctccgtgagtatctttgtctctctagctcctcttcttctctcagtacatgtccctccttgactcccgcctctctgcaaggtgtatttggctgcctcagttggcctctccccctctgcatctctgggtggggtgttctctgcccgtctcccacccacacccacccccggtgctccccttccccccagcaggacagcggctcaggttcacgcaccccacggcgggccggctgggcgcacgcacgtccttgcacacaagccgcacgtagctgtacttgagcacgtcgatgagcgtgtagagcgggggcgcactggcccagcggcagcgcgccaggtgcatggagctcttgacgaagaagagcgccagccgctgctggcaccacgcgtcgaagaagcggctgaactcggcccacgagaagaaggcccgctcccgcagctcctgctcctcctgccccgcagccgtgccgggtgggggctccggccgctccatcctgggggcctgcgtggaggaggggagaacaggtggatatcagacccattcccacccggggtatctcatctactccattcttggcctgccccgtcggttgctggtgcctctatcgaggtgggtagcccggggtcggacgtgcctgtttttctccaaatatataaatatcaacctccatcctatctttggcctcctcccaccgccttatccctggttcacttggagcctgtcatcttgattcctaattccaactcgtctcctcctccgcagatgtgacccttaggtacagttggaatctctcctcccaaaatacgacccttaagctcagatgtcccttaaggacatctcctcaaatgtgttctcaaattccagctaaaacctcctccccttccagctgtgtctctcacccaagagtaacttctaactctcgtattcatctggaactcctccttccatgtgccaacagttggctgtaacccctccaaagacgctccatctccagatgtgctcccacatccaggccacggacccctcacccggtcacatgcttcatgcacctgtggctccgcactccccagatgtgcctctggcgtgcagctgttgccccttcccccgattatgaccctatggctcgccacatgcagctgtagctggggcttccctgagacactctcatctccagatgtactccccacatgcagttatccacgcttcgcctacaggtgtgtgccccacttgtggctagttctcctcggaagtgtcaccagtattcacctgtggtcccctcctcctcagatgcggcccccagtccagctgtgggcccctcctcccagttacatccaccatcccccgcaatatgcatcttcgttctagacatggcccctcgtcctcggatgggctccttcaccccagatgctccccccacgtccagctgcgcgtctcccctcgagcagccccatccagcccgctcccgaccctcctactccccccctccccgcccgctgcggcaccttccagccccgccgtcccacctagctgtgcctctcccctccccaagatgtgcacccttcccgcccctccccactcacctacccgccccggagcggcgtccacctyccacaatgccccgcgcccaggcctggcccggcccttgctcccgggatgccccgcgcggtctcccgcctctcttcccgccgtgcctcgcgggggcgcttccaccgattcctcctctttccctgccagtcactcctcagaccctcagccacacccgctcatccagggcgagggaaagcgcgggcattttcccagtgtgctctgcgggagggctcgccccacttcaccccttttcccgccctcctcccattcgggagactacgactcccagtgtcctccgcgcgacggcggcggtgcggacggtgcccaggtcccgcccctaggctctgccccgcccccgcccgcagacgtctgcgcgcgaatgccgtggcgcgaacttgggactgcagaggcgcgcctggcggatctgagtgtgttgcccgggcagcggcgcgcgggaccaacgcaaggcaagtggggccgtccgcaagcagatgggaggcggagggcggcgggtgcgccgaatgcttggggcctatgcttcgccatgtcggggtgtctgcagaggagtgggcgtggggacgctgaggctgccgagagcgcggtggagacggaagagcgcgggctgcgggccgccggagagtgcagagaggtgtctcccagagggaggggggccaggtagagggtagacgagagacagagacagttggacaggtcctctgagaagaggccttgaggtgcgagttcacctggaagggggagaggccaaatggaactgaggggcggggccggggggggggaaaactgtgtgggcggggccagctggaaatcggaaggccccccgagggggcggggctatctgggagggggaggggctgaagggagctaaggggcggggccggggaaaagattgcgtgtgggcggggccacctggaagggggaggtgccaagggtggggctggctgggarccggaagtgctgagggggcgggggccacctggaagtgctgagggggcggggctagaagaaggtaaatcgcgggcagcagcatcacctggaaggagtgggccctactggagggagatgggtggtgtcagggagaggtcagtggtaaggtccaggtctaggtaaagggctcgtaaaagatggagaatcatctgaatggggagacgtctggcctaatgtatgcttgataaagggatggagcttacctcttgtttttactttttattttgaaataattatagattcaaggaagttgtgaaaagagtatatccatcttcccctaatggtgacatcttatgtagtcccaatatcgaaaccaggaaattgacatcaatacagttctgttaactagattacagaccttgttcagttttcaccagtttgtgtggtgtgagtgtgattgtgcatctgtgtgcccgtgcagcttgattccttgtatagatttgtgtaacccccatcgtaattgtgatatagaacagttccctctccacataagaactcctccccaggcccctggcaaccgctaatgtgttcaccatctctagttttgtcattcggagattgttatgtaaatggaatcatatattattaggatgttaccttttttctactctgcacaatgccctggaggtccacccaagttgttgcttgtatcagtgcttcgtttctttttattactgagtactgtttcatccttacttgatatttttcctgtcattatctcttcattttggtaaccgctttattgagatataattcacaattatacagtttgcccatttaaagtgtacaattttgcccatttaaaatgtacaagtcagyggttttcagtgtatttaaagtgtatttcagtgtatttaaagtgcccatttaaagtgtacaagtcagtggttttcagtgtatgcgctgagttgtgcagttattaccataatcgattttaggatatttttatcatccccccaaaaaactcctataccttttatccatcattcatttaattttaaccctgaacaatattctaccatatggtattccagtaatgagggaaccagttccctaagggtagacattccaccagtttccagtcttctctcattacagttagtgctgcagcaggtaactttgtgcctcacttggtccacctgtgagggtctctgtgggccaaatacacagaagtggggttgccgttccgatagagacgccaggtggtcctccagaggcatcaaccagtttgttccccccaactcagcagtacacagagttgagaagccagccttgagtaccgtggtaaggagaaaggaacgtgggctttggagccagccacaccgggttttgaagccttgcctgaaccccagctatgytcctctgtcctcaktaccttcatctataaagtggggatgatctcacctgtcttggagggctgacttgaggattgagggtatttgagaatgtgatcagcctgtcaggcatagagtaggcttcccagtaaacgcttatgtatttctccttcccttgcaactcagtctggtggttaagaggtgagctgtggagcaggccgacytggggtggaacgtactatagatgcaggttaagttcctttgaaaacccctctgtgccttagtttctgtaacagagttgttgtggagagtcagtataattgagaatgtcaagtacctaggcagttgagcactcaggagggatcgtaatagttttctcctttgccctcaggattttggtggctaagtccctaacctgctttctgtgtgaactgtttggttgaagcattgcttacttcctgctccccaactggccctgagaaactctgtttggaaattgctgagtttcttttttgtttgtttttgttttgttttttttttttttaagacggagtctcgctctgtcgcccaggctggagtccagtggtgcagtctcagctcactgcaacctctgcctcctgggatcaagtgattctcctgcctcagcctcctgagtagttgggattacaggctggcaccaccatgcctggctaattttttgcatttttagtagagatggggtttcaccatgcgggccaggctggtcttgaactcctgacctcgtgatccgcctgtctcagccttccaaagtgctgggagtacaggcgtgagccacagcgccggcctactgagttttttgattccaaaattgagtttgagttgtggtgccaacatgtggcggccaaggctgtagagagtagtggagacttagaggygtgtggtgcgggacagagagtactgattccagaaaacgaaaggggaccccatgggttgaagaagatttctgtgcaaaggaagggaaagtcaaagaaaaccatttctgttgcccaggctggtctgagctggtctcaactcaagcaatccacgcagaggtcctgctagtccttttttaaaaaatatattcatagtggaaggaaatataatgtaaataattataattacataattataatgtgtaatttattttcttccattataaatattaaagatatagaaaatttataattttttatatctttaatatttataatggaaggaaaggctcagttccaattagaagtttacaagaataaagtcgtaatttctttcctgtcaaatttcatagaccacttgagttctgctcttggactcctgggttttgtggaccccagattaagaaccctttcttttctttttctttttctttctttttctttcttttttttttttttgagacagagtgttactctgttgcccaggctagagtgcatgatctcactgcaacctccgcttcctgggttcaagtgattctcctgcctcagcctccccactagctgggattacaggtgtgcaccaccatacctggctaatttttgtatttttagtagagatgaggtttcaccatgctggccaggctggtctcgaactcctgacctcaggcgatccacccgcttcggcctcccaaaatgctgggattatgggcagcagccaccacgcccggcctaggaaccctttcattagagttactctaaactgtggaagccccagtgactgttattgatttcattaaataacagactttttaaaaaagtatttaatttttaaaaatatattgtgaaggggtaacgtattccaattgttctgcctgcaaaagcatgcatattaaaaaatctccctccagcgtctgtccctcctgagrcracagcattaccagttttttgtcttccaactgagatgttctgtacatatacaagatatgtggatacatttatagtctttcttttgtttttgttttttgagatggagtttcactcttgtccaggctggagtgcagtagcacaatctcgggtcactgcagcctctacctcccgggttcaagcgattctcctgcctcagcctccagagtagctgggaatacaggcgcgtgccaccgcacctggctaatttttgtatttttagtagagacagggttttgccatgttagccaggctggtcttgaactcctgacctcaagtgatccacccacctcggcctcccaaagtgctgggatgacaggcgtgagctactgtgcctgrcctatagcctttctcttttacacagttcagtagcacacactctgtgatattctgccctttgtttgaaataacagcataccttagaaactgcccaagagctartttatgtagaccagcgggtacaattttataagcttccacagttgtttcacggaattatgtcatcaccttaaaacaatttttcactaacctttaaacttaactccaaaaaaacccatttcaggtcctcagtctattcctcatattagatgaaaaacagtcttcttatggtaaaggaggcctcttatctttttctctgatttggagcttttattctgcaccagtaaatctcaccagcaaattattttggttcataaaaacaggagtttctttttgaaggggaaattcatgtttctgtttttttttttttctttctttcttaaagaaagggttttatgtgtgtttagatctctgcacaaccartcacctcaacaagtgtttggatttctgttccaggagcagctgacagacgaagaaaagtgctggacaggaagggagaattctgaygccaacatgcagcgaagtatcatgtgagcaccctyccttgcccctgagtctttccttctccaagtcctctgtttctttctctaaatctgtacttaaaaaaacaaacaaacaaacaaaaacycttacgttagattttgagttggaatttccaggagtcaagtagtatggaaaatgagccgtgggatatggaagacagtgtattgaacaacagtttttagttgcaaggagcagaaaccctaacgcagtggttctcagtcagcagcaattttgctccccagggaacatctggcagcgtctggagattttttttttttgagttggagtcttgctctgtcacccaggctggagtacagtggcgcaatctcggctcactgcaacctccgcctcatgagttcaagtgattctcctgcctcagcctcctgagtagctgggattataggcacgtgccaccacgcctggctaatttttgtatttttagtagagacggggtttcaccacgttggtcaggctggtctcaaactcctgacctcgtgatccgcccacctcggcctcccagagtgctgggatttcaggcgtgagccacggcgcccggccagtgtctggagatatttttggttgttacaacctagggacagagggtttgccattggcatctagtggctaaaagccaggcatgctgctaaacatccttcarttcataggacagcccccccaacaacacagaaccatcaggcccaacatgtcaatagtgtctaggttgagaaacctcgtgttaatgcagtccggcttcaggaagacaagaaagggcatgacttgacttatatcattgaaacctgctggagtaaacagcctcaggcttggttcgatccagttgccaaaacttcctccctgggaatctgtctctctccattgttcagctctactgtccttgaggttgtcctcaccctcaggcgggctctcccctcttagcggtccccttggaaagakggtgttagagcccagtttcactggcccagcctgggccacatacctatccctgaaccagccacagggatgcagcctggatcacgtgtccacccctggtcacaggcraaagggccagcccactcaaatcgtgtgtactgagagaatgtggggtaagaagcatcccaagaggaaaacggaggggctgttaccaggaggaaaaaatggatggtagagagacccagacaagggcatccatcccagaaacctgggcggtagtggcttacacaaatgctgggttccgtttttctcccgtgatgaggaatctggggattgtctctccagggctgatggtgccttcgattgctttctgtccactggcttttgcatgatttttccttttctttttgaagattaaataaacctcttattctggaataattttagaggtacaggaaagttgcaaagacagtacagagaggtcctgtatacccttggccagtttccattgtcaatatcatacattactatgatccgtttctcaccactgagatactaatgtcagtacattactcktaactgaactccatactttattattcagatttcaccagattttttttttaatgttcacgccttccaacatttttttttttttttttttgagacagagtcttgctctgtcgcccaggctggagtgcagtggcgcgatcttggctcactgtaagctctgcctcccaggttcaggccattcccctgcctcagcctcctgagtagctgggactacaggcgcctgccaccacacccagctaattttttttgtatttttagtagaagcagggtttcaccgtgttagccaggatggtcttgatctcctgacctygtgatccgcccacctcggcctcccaaagtgttgggattacaggtgtgagccaccatgccaggcmccaacattttatatttagttgtttgcttaatatttctgcccttcaccagagtgttagcttcttgaaggcaggaacttcgtgtgtctgggtcactgccaaacccctcaggcccagaacaggccctggcacataataagtgcttaggtaggccgggcgcagtggctcacacctgtaatcccagcactttgggaggcaggaggatcacctgagatcaggagttcgagaccagcctgaccaacatggtgaaaccccttctctactaaatgaaaaaaattagccgggcgtggtggcggccacctgtaatctcagctactcaggaggctgaggcaggagaaacacttgaaactgggaggccgaggttgcagtgagccgagattgcaccattgcactccacccttgggcaacaagagtgaaaactccatctcaaaaaaaaaaatttttttaggctgggcgcgggggcacatgcctgtaatcccaacactttgggaggccagggtgggtggatcacctaaggtcaggagtttgagactggcctggccaacatggagaaaacccgtgtctaccaaaaatacaaaaaaaattagctgggcgttgtggtgggcacctgtaatcccagctactcgggaggctgaggcaggagaatcgcttgaacctgggaggcagaagttgcagtgagccgagatcacaccattgcactctagcctgggcaacagagcgagagtctgtctaaaaaaaaaagatttaaaaagtgcatagttaatatttgttgaataaaacttgggatgtatcatatcttgcaggtgcgttagggcagaaaaattagtgttgcctcctttgtctgagtctgagtttccttatcagttaagttaaagggcttatttgaaattctctgttatgtgctgagatggaaatggtgttagaagttataggatgcggccgggcgcggtggcttaygcctgtaatcccagcacattgggaggccaagcagatcacaaggtcaggagatcgagaccatcctggctaacacggtgataccccatctctactaaaaatacaaaaaattagctgggcatggtggcgggtgcctgtagttccagctacttgggaggctgaggcaggagaatggcatgcacccaggaggcggagcttgcagtgagctgagattgcgccattgcactccagcctgggctacagagcgagactctgtctcaaaaaaaaaaaaaaaaaaggaagttataggatacagcatagataggcagggtattggtgctgttattctcctttttttacccccttttatgctcctctaggtcatttttccaccccaagaaagagggtaaagcaaagaagcctgagaaggaggcatccaatagcagcagagagacggagccccctccaaagtatgtcacagggctgggatatggtgaattttttcctttagcagtcaggattgtcttggttgcaagtgttcaaacctaatgcaaaatgtcttggggcccaaaaaactttttcagccaggtggccagaagtccaagagcaagagcagctgcaggcacagctggatccagggcctcggagttgtctgtacgtctctgtttctgcaggtcttggcctcgttctagaaccagacattctccataatgcagagaagctggccgctggccactggccacgtcttgatgctgtctcatctaagtagaagacaacagtactcttttttttttgaaatggagtctcactctcacccaggctggagtgcaatggygtgatctcggcccactgcactccagcctgggcgacagagcaagattccatctcaaaaaaaaaaaaaaaaaaggcatcccaatagatgctggagaccaatggcaaccttaggcagggactccatttgctcctcagcatcacccatcacagggcaggcactctggagacttccagagatgtgtgatgggtgggtgagtggatgagtgggygggtggattaatgcactgatggatgaaatgatgagatttgctgaggagacaaccagaaaatgttcattggatgcttgaaaggaagggaaggaaacagcaaagaaaccaaagtgtttgygggcagtgcccccactctgcctgctgtagtygcccctttacacccccatttccccaccttccagggcggcactgaaggagtggaatggagtggtgtccgagagtgactctccggtgaagaggccagggaggaaggcggcccgggtcctgggcagcgaaggggaagaggaggatgaagcccttagccctgctaaaggccaggtaggtccccatcaccctgcccatttttaccagaagaaactaattcccattaacctttggaacagagtgcagcagctgttcaggagaattctggagaaattgcccgggagaggtagatgtgtttcctggttgtgtcgggggcagacacaacctggtcctaattgcccctgccctaggacctcgggtgggctccttcaccacgttaggtcttggatgcctcaactgtaacatgcagctcctggtaacaccttcctcatagggtgactgggaagatgaaatgagtcgatttacatacagatctgagaataatgcctgatggtaaaacaagggctcaaggcccagcacaatggcttacgtctgtaatcccagcacgttgggaggccaacgtgggaggatcacttgaggccaggagttcgagaccaggctgggcaacatagcgagaccccatctctacaaaaaaatgttttaaaaattagccaggtgtggtggtgcatgcctgtggtgctatctccttgagaggctgaggcaggaggatcgcttgagcccgggtgttcaaggctgcagtgaactgtgattgtaccactgtactccagccggggtgacagagcaagaccttgcttcaaaaaaaaaaaagcaaaaaaataagggttcaaaagtatatctagcctctcctgtggtcagagggctttttaacttctccaaatacattggaccactctcttcccctgtttaagtcatttaatgcttgttcattgctttgtggatgatgtccaaagcgtggtgctgcttattctgtcagtggtgaggtcaggtcctgtgactccctgcccaaaccccctggtattaccaccacaggccaaagccaggccttgtggaaacctcccaggcccctcctgctgctcctctcttcccccgcccatcacatctgcagccgcatccacagctcctcctcagctcrctccatcctggcttcccacaccyaccaggtgcacttccacctctgggccactaccttctttcccagcctaaaactctctttcccagatacacgcctggctcagtcccctgctttcttccatgctttgctcagatatcacttcctcagcgaaactttcctcaccacctatgttagcttcccatttgctgccataacaattgaccacaaacrcagtggcttaaaacagtgtcagtttattgtcttacagtttgggagtcgtgagtctcaaatgggttgcactgggctaaactcaaggtgtcagcaggtctgcgttcatttctgggggctctgggggagaatccaggaattgccttttccagctgctagagatccccttttctccgttttcaaagcaagtggctgggtgtggtggctcacgcctgtaatcccagcactttgggaggccgaggcaggcagatcacaaggtccggagattgagaccatcctggctaacatggtgaaaccatgtctctatcaaaaatacaaaaaattagctgggcgtggtggcgggcgcctgtagtcccagctactcgggaggmtgaggcaggagaatggcgtgaacccgggaggcggagcttgcagtgagccaagatcgtgccactgcactccagcctgggtgacagagcaagactctgtctcaaaaaataaataaataaataaataaataagcaagtggcattgcctccttctgtgcctttcttctgtggccacatctcaccctgactttcctctcctgccaccctcttccactttgaaggcccctgtgactatatcaggcccacctggatagtccagggtaatcccactatcggaaggtcagctgattagcaacctcaattaccctttgcyatgtaacctaacatattcccaggttccaggtattagaatagagatctcttttggagcttagactttaccctgaggcttctggggagctaggaagagttttgggcagaagagaggcagagatcatttagtcctgggcagtgtttaaaatattcatctggccaggcaygatggctcacgcctgtaatcccarcactttgggaggccaaggcgggtggatcacgaggtcagaagttcgagagcagccaggccaacatagtgaaacctcatctctgctacaaaagttagccgggcatggtggcacgggcctgtagtcccagctacttgggaggctgaggcaggagaattgcttgaacctgggagatggaggttgtggtgagccgagatcgtgccattgcactccagcctgaacaacagggcaagactccatctcaaaaaaaaaaaaaaattatctgagacctgtatctccatcagggtctcaatgggagacagaaaccataccagtgatttgaacagagggagtttaaaggatggtcactaggtatgcagttgttaaataggtaactgaagggctaaaaagagaactaactctaaggcatcatggaggtagcaactgtggggtgcagtgaccatccctgtggcttttgagctgaaattcacacctctgtggtgggactgctggcaggtctctgagcttagagaaggtgccccgagagcctgcaactctgatctttcaggaagggagcactgggtgggagatgccagggtctctgatcaggtaccacgtggcaagccccgtgaatgttagaaaaaactgtcagtgggatccagcagctgcccccggcaagccggctgtgcctccagtcatgcagtgccctctgcttccctccattggcactgcctgatgcccaggtggcgccagagcaagaagaagatttgtggagtcccggtcctggcagcatgaaggagactggacagtgacaggtttggagctgagagaaaatcacttaataactggcacagggccctgtaagaagataagtgagtggttgaaaccgagacacggtagcagtggcttaggcaagacgcaaacttatttttctctctcctgagtgcagagtccgggattcatgtgaccgtctcacagggtcagaggcccagrcttcctctgtgctgtcrtttgctctctgtagatgcccttgtccctgtgaacatccatattctgccaacaggaagaggagggcaccccactcaacattaagtggatgttatttgaaccaggaaatgcatgttagtccattttgcattgctataaaggaatacttcagaccagttaatttataaagaaaagaggtttattttggcccacggtcctgcaggctatacaagaagtatagtgccagcatctgcttctggtgagagcctcaggatgcttccagtcatggtggaaggtgaaggaggagcaggtgtgtcacatggcaagagaggaattttaaacaaccagctctcatgtgaaccaggagaggaagaactcggttcctaccacaaggagggtacaagccattcatgagggatctgcccacgtgacctgaatgcctcccgccaggtcatacctccaacattggagaccaaattgcaacatgcgatctggagggaacaaacatctaaactgtatggagagaaggctgggcacgggggctcacgcctgtattctcagtgctctggaggccaaggcgggaggatcgcttgagctcaggagttcgagaccagcctggccaacgtggtgaagccccatctctataaaaaaaatacaaaaattagctgggcgtggtggcgggcgcctgttatcccagttgctcgggaggctgaggcaggagaattgcttgaacctgggaggcagaggttgcagtgagccgagatcgcgccactgcactccagcctgggcgacagaatgacaccctgtctcaataaataaataaataaaaataaaactatacgaagaggtgtacatcatttcccctgacatcccattgtgtagagctggccaacatagtgaaaccccgtctctactaaaaatacaaaaattagccaggcatggtagtgcaggcctgtagtcccagctacttgggaggctgaagcaggagaatcgaagattctgttactgtagaaaacagaagagctatgggggtccttgatgggaccatgatcctgcactggagggcgggatgatggcccaggtgagaagaggccacccctgagttagggctgagaccayagggtcagaaaggagggtagacagagaggtttcagtcccctctactctcaacttttggaaaatggrgtccctccttcccccgctcactctagaactgttctttcctcttccagaagcctgccctggactgctcacaggtctccccgccccgtcctgccacatctcctgagaacaatgcttccctctctgacacctctcccatggacagttccccatcagggattcygaagcgtcgcacaggtgagaacacacgggcccctgccccttcagtcgcctgcctttctttttctcttttttttttttttttttttttttgagacatagtctcgctctgttgcctaggctggagtgcagtggcatgatctcggctcactgacctccgcctcccgggttcaaacgattctcctgccttagcctcctgagtagctgggactacaggagcccgccaccatgcctggctaatttttgtatttttagtagagacggggtttcactatgttggccaggctggtctcaaactcctgacctcgtgatccgcctgcctcagcctcccaaagtgctgggattacaggcgtgagccaccgcacccagccagtcgcctgcctttctccccacttggattcccatccaaggtagtcatccttacaacagctctggtcttagtgttgtggttaagagcacgggtccaccatccactggctgtatgacctgggacaaatgactgaccttctctgagcttaggttgctttatctgtagagatgatgataatgayagcacctaccgcacagaaatatctgagttagaagataacacgtgtacgctgctcagaactgggcccagccctcagtcggggctcagtcattgtgggtcattgtgactgtagttatgcgctgagatggaggcctcacagctcatgtgggaacacaagcgcggggccatggctcaagggagacttccagaagagaggctaaccaagctgagccctttaggacaaagaagaggcaacaagcaaaggaggaggggagcatgctaggcaaggggaacatagaaattgagaaggcctgggggctgctgagggcctggtgtgctggcgtgtagagygcaggattggggatggtgagcaatgaggtgagaaggtcctggaaaaccagcttggggaacagcgtctttgtcctaagggggacttggaatgtttgctgtggggkaagaacagggcgagagacccattcgtaatgcggggcagtgtgagcccttgccgtccggtctagcctattgagcgctttagcgtggtgagtgtgacaggggagctgaatctttcatgttagatcctttcagttgaatttacatttgaaagctaatatgtgattcagtgcgtaaagactttgcactttttccacatcattttggaacagctttggtatgtgaatagctgtacattttatgaaacctacacagatcatgttgccgatgaaaatctggtgtccaacttgagatgtgcagtgagttcattggattttgaagacctagcatgaaaacagaatgttggaatcatactgttttagatgtattgagcaaaayagactcttcaaaccaagttcaacctggttttttccccctttttattaacgtggctgcaagaaagtttaaggttacatacgtggcttgccagatctttccatcggacgatgctgggtgacgcagggtactctgggagctcagaagtcaagcagcccaggggaggtgatggctgagccgagtcttagaagatgggttggggttggccatgttgagaaaggacagatgcatgcatttcagacaagaagggcacgtgcagaggcctcgagatgggaacagcatgggatgtttggggcctctcatctacttccttgtttctggagaatcggatgcgacctgggaagcagggagagtttgaggatagcacgtggtgagaggtgagctagagaggagagtgggggctggatctcaaaaggtcttgcactcccagctaaggagcctgggcttcgtgctgtgggtcctgggagccatggaagggctgtgaggtggggaggcaggttcatccctgaatgaaaggtggccataaggaagtcacagtgtggctgagggcatgctgggagctccaggtggacgctgaggttggccctgggggtgtgtcaggggatcttgttcagagggagcaacattgagctatgtcccraacctcacatgctgaggcctggaggggtgacacagcttggtgtgtctggaaacaccccagtttagcagtgatataaaagaaggtggagtatgtggtgtgggaagggttagaaggtcagatggagagagattaggtaggatcggggtagacatcaaaagactttatcctggataaagcagagaatgtggagtcatggaagggttttgagcagggagagacagtgccagccatgctgatagaaggtccctctggggccacgtgaaggagccactgggggccgggagaccggggaccaggtggcgcaatggccaacatgagatataacagtgaagatgggtacaactgcctttgtgtgagctcttcatcatgggttagtatctgagtttagaggcttttagaagcaggttctgaagctctgaaacagggattcaagtgcaagtggtttgtttaggaggtgcagggaacagagggtgattcaggacaggggagcagccaacacaggatgtgctgttgggtctgctatgtgttgggcagctggagcttagttttgtgggattctctggggaacggtgtaaatgctccagagtgacccccgagatgcgaggcagctggggtatttatacaccaactcctgccgatcgtggggtgagggcctctcctggggctagtttattycctgccacttccagacttctgaggttccggggaagctgtctggaacacttggaggcagttaagatctgaggggagcagtggggagctcaggggacctgctggaatcggtactgtgccaagtacattacatcattgtttactcgtggggattatttctattctgcagtcgtgagagagcaaagcacagagaaattaagtaacctgcccaaggtcacacagccaggaagcaggagggattgaagggtgcggcctgcactggggcagtgactgtgtgcaggcagagaaggggagagggcccagagccttccagaggctacatcagtgggtgtgagctctccgggatgggagcacacgagccagcgaggtcagatacaccaagccctttgcctccccagctcggaagcagctcccgaaacggaccattcaggaagtcctggaagagcagagtgaggacgaggacagagaagccaagaggaagaaggaggaggaaggtgagcccccagaaggagagaagtgtgtgtgtgtgtgtgtgtgtgtgtgtgragccaagaggaaggaggaggaggaaggtgagcccccagaaggagaggggtgtgtgtgtgtgtgtgtgtgtgtgtgtgtgtgtgtgaagccaagaggaaggaggaggaggaaggtgagcccccagaaggagaggtgtgtgtgtgtgtgtgtgtgtgtgtgtgtgtgtgtgtgtgtgtgtgtgtgttttggatctgcaaggkcaggggcctgagagctcaggatgtttggaccctgccgatttgatgcctgtgtccaggcatccaggaattccacctaccaatatgggaacttttgttctgaaaacattgtgggatatatttgtttggacatcttaatttagtaataattcaggcacagtttcccatttttatttgctatttttatatttatttaatggaaactattttcctctaaatgatttccttttccttgtaaattttaccataaagttgcagttcccaaacattcttagttcacagcacccttgatgtcttagtaatttttttmtgatgctcctaggccaataccttatcagttctattaagtagttatgtccaaacaactattagatactatacatacattggaaaaaaagtaatatttgtgctttttttttttttttttttttgagacagtctcactgtgtcgctcaggctacagtgcagtggcacagtttgggctcactgcagtctccacctcccaggctcaagcgattctcccacctcagcttcccgagtagctgggattacagacacaccaccacgcccagctaatttttgtatttttagtagagacagggtttcactatgttgaccaagctggtctcgaactcctgagctcacatgatctgcccacctcggcctcacaaagccctgggattacaggcgtgagccactgcgcccagcctgtattttgttcttaaataaccataattacttgtgggaaatgccttggatactctgtaacatcttaaacagtggaattcaattgaaaactgccaacgtcatttcctgttctatgttgatttttgtacagtacttgatttttatagcagcaacctatgaaaacccagctttgcagagatgcaatgtcattgcaaggaatgtgatttaatactgaaaactgaaatacctcgaactagtagttcacacactggccagcaggtgtcgctgggtttcctttgaaaaatctaaaatatcttgcagygcccagtgagttccctgcatgttggtgaacccaccgaaaacagccataaagatctgatcgattgatcatctggggcctgcatgagattacaccaattgcagcctttaacgtcgtttggttttttgtttctgcaaacaaataaaaggtccattttccagggcagatttaaatttggttaagatctgatttcttggccaggtgcagtggctcacgcctgtactcccagcagtttgggaggccgaagcgggtggatcacttgaggtcgggagttggagaccagcctggccaacatggtgaaaccccatccctaccaaaattacaaaaattagctgggtatggtggcatgcgcctgtagtcccagctactcaggaggctgaggcatgagaatcccttgaaactgggaggtggaggttgcagtgagccgagattgtgccactgcactctagcctgggcgacagagggagactgtgtctcaaaaaaaaaagatttgatttcttattgacaatttttagtacaaattttattgtaaactacacttttagccactgtcagtgtccagtgaggggtggcgggggtggcctctttctactaaggcagatttttcccaagttggtttttgtagtttgtattgtgaccctagaggtaagattttttttttaactttgaagatttttatttttgtctataacaggctgtcatttgcatttttaaccctttcagattctattttggggtgaataacactaaaggaatcattggtaaggaaagacacaccatttatgtctcggctacataggcaaacgggctggaccccctcaaggtcgctgccttgcttggggttgacaaggagcagggtcttacgtggcccactgctttacaggcacattggattggcacaagatagaactgtaagacctgcactttgggaggccaaggcgggtggctcacctgaggtcagtagttcaagaccagcctggccaacatrgtgaaatcccatctctactaaaaatacaaaaaaatagctggatgtggtggtgggcgcctgtcatcccagctactcgggaggctgaggcaggagaatcgcatgaacccrggaggcagaggttgcagtgagccaagatcacaccattgcacyccagcctgggcggtaagaaygaaaytctgtctcraaaaaaagaacagatgacagatgagggcagactgtctccagagtcaaaatgcccttgtaggttcaatgggatttttttgccatctgaccgttctgtctatcgtcagaagaggagaccccgaaagaaagcctcacagaggctgaagtggcmacagagaaggaaggagaagacggggaccagcccaccacgcctcccaagcccctaaagacctccagtgagtttctggtcctctcctccgccctgccccacctcctgattttggggtcagaagtctttggaggatgattaatttaaacaaggcatagattctcaaacttattgcttaaatgccgaatctagaagaataatagtttttattactcgggtttttttttttaattattatttttccccatgcatgtgggaaaggaggaaagagccagccattctttaaaaaatcttcctaggccgggtacggtgcctcacacctgtaatcctagctctttgggaggctgaggtgggtggactacttgagcccaggagttcaagaccagcctgggcaacatggcgaaaccccatttctaccaaaaaaaatacaaaaatgacctgggtgtggtggcacgtacctgtagttccagctacttgggaggctgaggtgggaggatcgcttgagcccaggaggtggaggttgcagtgacctatggtcgcaccactgcactccagccttggccacagagcaagaactcccccgcctcagacaaagtaaaagataaaaagtattcatagctttcagaagtcataggtgtaaattaaatgttattaattaagttagacaaccaaactgagttacaggattttagaggctgaagttaccctctcagggtggtccaagtgtccatgaggcccctgtgttagaaacaacacttgccgggagaattttagggatacagagttgtatctgattttctgcagctgctgggaggagtgggaatattttcttctcatgacgatgagatttctttttaccactattcctaagtctcctatttcaggccaagtgctagaattcckctagttagcactgaggagtagacagcaggcctgagatctcagctcaaagctaacagaaaggaaaagggtaggtgtagttatatcttccatctgcagggtcagaatgatcttgggggtaaaaaaaaagaaaaaaaaagtctcagggtcaaagagtttgcatcaccgtctgagctctctcaccgcagaagcagagaccccgacggaaagcgtttcagagcctgaggtggccacgaagcaggaactgcaggaggaggaagagcagaccaagcctccccgcagagctcccaagacgctcagcagcttcttcagtgagtttcccttgctcaccccacctcccggggttgtacaggcaggaggctggtgagcctctctccagaggcctgagatgctgcgaagacccttcttcctttcctgctggttggaaagtcggccttgtctctaccagcctgtctcccatctccctgagcactggggtggtgctgggtgcagaatggatgggaggtgggggctaccggaaggagaaaagacccactgttttctgtcttcattcctagccccccggaagccagcagtcaaaaaagaagtgaaggaagaggagccaggggctccaggaaaggagggagctgctgaggggtgagtcagtgtccaggtctggaaaggttcttcgggatgtgttcccttctctgcattccgacagccccacccccagctcaggcttcctcctcttgcaggacttggcaaaccttttctataaagagccagagagtaaatattttaggctttatgggacacatttggcccctgttgcaaaaccattmttagatcccagaacctgtagaaacggtccagggtyggagtttgctgaccgtggccccagccaccctctgaccctgcctccagtctttcatcctcagtctgatccccgtagagcctgggggatctttctaacacccagagttgactctgcccctctagggttccccagagccgtcaggagaaaatctaagcccatttggccactggctgycacctccctctctggcctcacttcctacctctctgttcctctggctctgaactcaccagattttttatttttgagacagagtcttgctctgtcgcctagcctgcagtgcagtggtgctgtctcagctcaccacagcctccacctcccaggttcaagcgattctcccaggtagctgggattacaggtgcatgccaccacacccagataatttttgtattttcagtagagacacagtttcaccgtattggtcaggctggtcttgaactcctagcctcaggtgacccacccacctcggcctcccaaagtgctgggattacaggcgtgagccagtacacctggcctgaactcaccagatttagtgtatgtgctggaagcctgcaggcgcrtctactctgccttaaaattcactgaacaccccttctttgccagccctgggcggcccacgaggatgaaccatagagagccggccgccctgccccakccctcgtgatgtgcttagtgtgctggggctgtgggacactgaataggttgttaagcaattaattgcttcactgtarttttgttaattatttgaagagatgtctgggctgattcccacgacatctaacatgcacacaggaggcygcactgaagactggctgaatggatgattggatgcgtgggtggataaatatcctataaagtaatgaggtcacccccccatctctgccatgctcaaaacccatctgcgattctccccagcatagaggatatgctgggcttcccagtgccctcatgagccagccctgtccaccttacattgcagcctcctggcatctgcagccttttcctgctccctctgcacaccatgtccccacgtgctgtcattcctccctgctttttttttttttttttgagatggaatctcactctgttgcccaggctggagtgcagtggcacgatctcagctcattgcaccttcaacttcccaggttcaagcgattcttctgcctccacatcccaagtagccagaattacaggygcctcgccaccaagcctggctaatttttgtatttttagtagaraccgggtttcaccatgttggccaggctggtctcgaactcctaatctcaggtgttctggccgcctcagcctctcaaagtgctgggattacaggcgtgagccaccacacccagcctcctccctgcttctgaacatgcttgaccccggcctacaacactgtccctaacccaccctgcccagcaggcttccctcaggccccaactcctattgcacctgcttagggaagccgggtgcctctcccttcatgtgtgagaggaggtgygtsyccccagcacttgagtcagactgtcttttatgtcttgtcacatggtaaagagcctccctaaccagacataagctccttcccacagagccagggctgtgggaggtcccagccttcttagtcttcttgcctagctcccagcactggggctggcccctaggaagcccaggaaatctgccatgaaagaaatttaaatgagcactttcagattttttttttcactagtcaatcatggactcatttatttactcagtaagtatttacaaaggactgattacgtgttagctactggattttaggtgcctgagatctggtaggaaacaaatcagacaaaaattcctctttatagaacttargttttttgggttttttgttttttgtttcttgttttttttttaaagacagggtcttgctctgttacccaggctggagtgcagtggtgctcctgggctcgggatcctcccacctcagcctctcaagtagctggaactacaggcatgtaccaccatgccgggctaatttttgtttactttttgtagagatggggtcctactacattgcccaggtcgagctcctggactcaagtgatcctcccacctcagcctcccagaatgctggaattacatgcatgagccaccacggccagcctgatttcttacataatcatatatccatctgaagttatttttttcctctaaagattgtgttttcaaatacaatgtgatggtgttagcagcgtggacttcatcccctcttgaattcttgatgtcctgaaagctaaaaaaaaattaacggaaaaggggtttggaataatccctgctgttcagcagaaaggacaggtgggttaaaaagtatgacgcagtgagtccaaaatctctttgatgtcacgcctctacaaatgaaacagataacgacaagaaattctttcagctttaacrtttcatgattacagtttaagtctaacaaaaaagtgttcggaggattcttgacatcaattttgtacccccaattgagaccttatcaaggaggttaaatagcacgttaacgtcctctctgcagtattcctgtggaggaagggagcactttagccattttacacacattgacatgattagcccagagaggttaggtcgggcctcgccaggtcacacagggaggtgggggtagggccaggcctgggaccctaaggaatgtttttgattcctagcagttatttcttccccattgccatatcgtgcctcctgagtgtgtgtccgtgtttgtgtatttataaatatgttttccaaataaaatcagtgtcctactgtatataaagttctgttttctatttcaagtgatactacgactgcttttctttcttttgagacggagttttgctcttgctgcccaggctggagtgcagtggcacgatttcagctcaccgcgacctccacctccygggttcaagtgattctcctgcctcagcctcccaggtagctgggattacaggcatgcgccaccatgccyggctacttttgtatttttaatagagacagacacttttttgttagacttaaactttaatcatgaaatgttaaagctgaaagaatttcttgtcgttatctgtttcatttgtagaggcatgacatcaaagagattttggactcactgcgtcatactttttaacccacctgtcctttctgctgaacagcagggattattccaaacccctttaatttctccatgttggccaggttggtctcaaactcccgacctcagtgatctgcctgcctcggcctcccaaagtgctgggattacaggcgtgagccaccacgccaggcatgactgcttttcttgcaccattcctagcctggtcacttcccctctgtctccaatggctgcctccaagagacaggcaaactttcccactctccaatttcctcacctctcagatgggggcacagtgatgagaggaagcatgttcttccacccactcttccccacgtgccaggcactcagcaacgggctttccctgacscaatgctccaaatcctcacaacactgctgggagtagattctgttgttatcctggtttcctgggtgagaaaagtaaagcggggaggtgggacagtattgaggacyggctaggaatcccagctccacctctctcagctgtgtgaccttgaggaagtgacttagcctttctgtgtctctcttctgaggatgtgaaacacttagcccagggtctggccttgattatgaccagcatgttgtcacggtaactgctgctactattcttatttgtttttaatgccatgctcaggccacacaggtggggagtggcagcattgtggttctagccaggctgactggctctagactcccctgcccaccacactctgctgcctcattgtaatgccggccaccgcttgttaaaccccaagttcataccaaaggccatgcacagccctgcagtggcactrtctgtcttggccatccatgccctgtgtgagcatnagaatcagctgaagagctgaaaaatatcctgaggtctctttctcccccccaacccttgtccccattttggtacagatgtaggcctggggctggggagtcctcattgttccatgaagtgcacccaggagtgggaaccctcactgtcattttttatgtaaccttcaggacaacctgtcatagtagggaccccttagctccccagacagatggagatgctgtggttcagagaggggaagctgcttcctcagcaggtacagctggccggggcagagcagattggaacccagatgagtctgaatgcagagtttggctggggtcagtgtgagctacttrcgatataaaggttgaggccgggcgcagtggctcatgcctataatcccaggactttgggaggtcgaggtgggaggatcgcttaagtycaggagtgagacaccagcgtgtgcaacacggcaaaaccccatctctacaaagatcagtcggrcatggttgcttgcacctgtagtcctagctactcaagaagctgaggtaggagaatcccttgagcccwggaggttgaggctgcagtgygcattgctccactgcactctagcctgggcgacagtgagaccctgtctcaaaaaaaaatagaggttgggaactgtctctagagctgygctgcttaccagctgtgtggccatgggtgagttaatcactctgtgccccagtttccttatccggaaaaggaagttagaaaggtcccttctggccaggcacggtggctcacgcctataatcctagcactttgggaggccaaggcaggcagatcatttgaggtcaggagttcaaaatcagcctagcgaacatggtgaaacctcgtctcttctgaaaatacaaaaaaatcagccaggtgtggtcgtgtacgcctgtaatcccagttacttgggaggctgaggcagaagaatcacttgaagccaggaggcagaggttgcagcgagccgagatcatgccactgcactccagcctgggcaacagagtgagactctgtctcaagaaaaaaggaaaggtcccttcctcccakgtctgattgttaatcgatgtggtgttagcatggcacctggcactttgcgacacccgggactatacgcacctccctctgtcccagctcagctacgcaatcccttttctgtttctcaagtttgtctgcacctcagcgcctttgcacacgctattctctctgcctggaatgctcgtcccctgctgcccactgtgctaacccctccctcattctgcccagatgtctccggccttccctgaccaccctgtgaagcagcaccctcatctcatcctcttcctctactcggctttcttttgttttctgaaagatttttttaacacctaaaattaatgwtgtgtttatgtgggggctttttgcccactttcctctgactctcctgctggaatgtgagctccaggttagcaaactttgttttcatccagctctgcaccgtgtgccttgaacagagcctggcacatcacagttggaaggaatgactttgctttgacccagggctctatgcaattcartctccgttttgcctccgtagacccctggatccatctggttacaatcctgccaagaacaactatcatcccgtggaagatgcctgctggaaaccgggccagaagtgaggtttctcccttttcagactgtccccctccggtccctgttgccaccggaggctctctaagcagagtcttggttgggagaaatggtcaagtctctccctcctgtgttttggcgacaatcagcagcattgaaagggacagagagrcagccctgggaagtgagctcatgcatttgggtattggcaagggtgtcccgaggaggcgtgaggaagcaagggtgcagacgggcagcatggtatagcctgcaccactgtcrctcttgcgtctcttttccttccctagggttccttacctggctgtggcccggacgtttgagaagatcgaggaggtgtctgctcggtaactaatgaggamtgcctgggtggggggcggggtcgcttctgggtctgtcctctgcatggcggtcygtgctgccttgttccgccaaaccctgtcaacttggcctctgaccccgctcgggcgtatgatcatggatgtcagacatggtcacaaaagcggctgcaggtcctcttgactttctgcctcattctcatggtcagagcaagacacaaggggcgagcccagatgtgcagggtaaggagacaggctccatctcgggatgactggcaccattgcacacagtccgtgattacttctagtccaccctgagtcatcaaaagtgacttcagtcttgcttacatgtctccatattcacaaaagaaggtgaggtctcagttatagcgaggaccccctactcattcacagaggttccctgcagagcgtcccaccccagtgatgcccagtgcatagcactgccccaccctggtccttctcarcagcatgttagcatcgctggtccctgccagcccccttctctgtccccatttcctcttctctccttgtcctcctcacccccagcactcgcccctgtgtatttagtttatataaatattatcatggaggctgggtgcagtggctcatgccttaattccagcacatcgggaggccaaggtgggtggatcacctgaggtcaggagttcaagaccagcctggccaacatggtgaaaccccatctctactaaaaacacaaaattagcccagcatggtggcgggtgcctgtaatcccrgctactcaggaggckgaggtrcgagaatcacttgaacccaggaggcagagattgcastgagcygagatcacgctattacacyccagcctgggtgacagagtgagactctgtctcaaaaacaaacaaacaaaattatcatgggtacggctcattctgcttgccttcactatcaaacccgtttccacatgtgtccatgttggttgagtggttcgagcctgttgtgactgctctgtagtgtcccttcgttctcacatggcacatgccatttctcagttccccaacatgagtggagcatttcaggctgttcccagcactctgtttttttttttttttttttttttttttttttgagatggagtcttgctctgttgcccaggctggagtgcagtggcgcaatctcggctcacttgcagctccgcctcccaggttcacaccattctcctgcctcagcctcccgagtagctgggactacaggcacctgccaccatgcccaactaattttttgtgtgtgtgtttttagtagagatggggtttcactgtgttagccaggaagatcttgatctcctgacctcgtgatccgcccacctccgcctcccaaagtgctgggattacaggtgtgagccaccrcgcccggccctaattttgtatttgtaatagagatggggtttcactatgttggccaggctggtcttgaactcctgacctcaagtgatcsgcccgcctcggcctcccaaaatgctgggattacaggcctgagccaccacacccggccctcttctgtattttgtaaggatgctttttggattcagagcctaccttmattcactatgctctcatcttaatctacaggtacatccgcaaagaccttctttccaaatgaggtcatgttgtgaggctctgagtggacctgaattttgggggggctgttccatccactgcaccatccaatggtggcttttgcctacaatgattactgagggatttccctgatgttggtttttgtatttcttctctgcaccttaaaaacctcggtaatgagacttctgtaggaaaaacccagcttctgtttctaatgaggcyccctaagtttttcagtaacaaagccattctttccagctttgaagttttagacagaaacacggttttcgttttagaggtggtgcagcttggtggctgggagcacagtcctcaggcacacggccttggtgtacatctcagcttcatacttactcgctctgtgaccttgggcaagccacggactctttcggtgcctctgtttctttatccgtaaaatggaaataataatggtacctacctcagaggggagctgtgaagattctatgagttaaaaggtgcaaagggctggccgtgttggctcacgcctgtaatcccagcactttgggaggccgaggcgggcggatcatttgaggtcaggagttcgagaccagcctgaccaacacgttgaaaccccgtctctactaaaaattaaaaaaaawtagcygggcatggtggtgcgcaccggtagtcccggctactccggaggagaatcacctgaacccacaaggtggaggttgcagcgagccgagatcgtgccactgcactctaccttgggcgatggagcgagactccgtctcaaaaaaaaggtgcaaagtgctcaaagccagctcctgaatttagaaaatgctccgtagcatcagctgtcgtttctctgggctgatcatcaccatcttcatcattgttaccgtcacaccaagttactcccccactgtaaccgtccggtgggttcaccttgcccgctgcctagacagagccgatttatctagacgggggaactgcagtggagaaagagtcattcccrcagagctggctgtgcgggagaccggagtttcatttttactcaaatcagtctccctgagcatgtggggagcagagtttttaaagataatttggcgtgtaggggcttggtaagtggggagtgctgattggtcaggttgaagatggactcacagggggtcgaagggaggttttcttgctgtcttctgttcctgggtgggatggcagaacttgttgagccagattacagtctgggtggcgtcagactgagtgcagggtctgcaaactatcttaagcactcatcttaggttttacagtagtgatgttatccccaggagcaatcggggaagccagaggctgcgtgacccctaaacctaaatttctaatcttgtagctaatttgtgagtcttgcgaaggcaggtccttaggcaaaaaggggtcttttccagaaagggctattaccaatttcgtttcagagtcaagccacgaaccaaattccttcccaaagttagttctgcctatgcccaggactgaacaaggacagcttaaaggttagaagcaagatggaatcggttaggtgtgatttctttccactgtcataatttcctcagttacggttttgcaaaggcggtttcacctccagcaatctgtgattgtcctcatggctccaggccccagagcctgggactgttctgagccctttcctcttctttctccatttctttctagtgtccacccccttaaacccaccccaccccgacaccacactttgaccttgaggaaccacgtgttcatacccccgtcccctcctccaggctccggatggtggagacgctgagcaacttgctgcgctccgtggtggccctgtcgcctccagacctcctccctgtcctctacctcagcctcaaccaccttgggccaccccagcagggcctggagcttggcgtgggtgatggtgtccttctcaaggcagtggcccaggccacaggtaagggggactgtggttggagggaccagaaggacaggagctcagccagagaaaatgcagaggtcaggtggatcggagagatggtggagagaggctgtgaaacrgggttgaggagaaggctgagagggaggagagcctgatggggacagatttgcaggggtgtgggagagaacacaggggcagcagttcaggtgagggaggaccaggcatgtgctgggacrgggggtgtggggtgcagggaaggggagggctggggaaagatgctggaggcagagacagcaggatttgggggctgagatggaaggttggggcttagagaggtctgaaaggactttgactggagggattggaaggagtgggaggaaagaacatggtgtgtggggggccagcagcctgaaggggcccagccgccagtgstgggtggaaaggctggtgatgcggatggcccgcctgccaagggcctggagtgctcggtgcttatcatgaggacactggggagccatggaaggattgtgagcaggcaaggggcagcatccagggggaagaggagctggaccccagctgtagagaagagagaagagggcaggagagatctggcagacagtggatgtcagggtgaggaggcaggaggaatgcctccaggatctccctgggtgactggatggatgacaaagccgtcggcagcttgggaccctgrtgaggggcaggcacctgcagggggcattaatcaccccagygtggggcaggcatgagcaacctctatctgtgggcccccagggccatccaggaagtttggaaacgggtctgaggctcaccaggtctggctcagagcccagggttcgggctggtcagtgtaggagggatgaccacccactggtgggttctcatccrcctggggagaggatgtgctgggagcactggagctggcttagggccatgggcaccaacatttagggaagkcrggggtttcaggctttcatgagaggacagagggactgagaaaggttgacttggatcaggaaagagttacgggcttatgggagccagaggagatgagactcaagattttctcactcattcactcaagatgtgtttcgggagcactgacgtcataccagacccagcacacacggggtcggttaagaatactctgagctgcrggtaacagaaaacccaactacattggcttgsacaaagaaggatctgtttttcycacaaaagaagttgcagatgctggctttcctgcccaacaatccatggcagctggggcctcttccactgtctcatgcctccacccttgatgggtcgtgttcacactcacactgctctccgtgccgccttgtggcccccgtggctgtccaagtcccgggtttgttgtgagttgttggccactttggagaatcccgtcccctttgatgtgtgattcgataacatcccattggtgaggctcacactgtcggctctcccatttgtggcagtttcgcttcaggcgcgaggcccaccttcatgtgctctgtgccgcggctgagcatctgtggactgaaacgcgcacttgttcgttcattacggattgctttccctttcattcttttctgtgttagggttagggcgttatctcgataggtgtaggcaggttatgttatctccacatttyatttcagaccagaaaagaggtgacacacagtatctggtgacaagggtgtgttggttctgataggttgagagctgcttgtcacagctgtcaccgtgacttgaggctccatctscccagctcttacacccaggcgcccatgggacccagctctggacagtaagtggggccagagcacatcccacgtgtgtaagctggtggctccaaaacaagccgaagggtctttggtcactgccagagatgttcatgacccgccaraggaaagggtcccttggccttctctgctctgtccacactcacttccctagtgaccttgtcccgcctgtggctttaaatcccatccgcgccctgatgacaccggcccagatgtctcccctgagtgtggtcatgctcgttcwtccacygctttcctggctccacgtgcatgtttgctgacttcctacagccagcrtggctgggggcacgttccccaagccatttctaccaagtgggtgagcgttagacacagggaggtgcagggactcgccacaagcacacacagctggagaaaattcatccaggccgcgagagaagggagacacgcagccacaactgtcaccctygacacccccacccgcgctctcccctgaaggtcggcagctggagtccrtccgggctgaggcagccgagaaaggcgacgtggggctggtggccgagaacagccgcagcacccagaggctcatgctgccaccacctccgctcactgcctccggggtcttcagcaagttccgcgacatcgccaggctcactggcagtgctgtgagtggggcgggccgctcatcccggaccccagacatcttggggacctgaggccacgcgtgtgtcaggaaggcttctgggtagaycatcagctgggtcgcatcagtccttctcatggggtgcacagcttcctctcctccttcctgcacccaakcctaggggagtctcctcttcagagtctagcagacctaatgccatggctgccacatgacaggactcagtaaatacttcctggataaagggagagggaggcaaggaggagagctagctcgttcttactgccctaagagtgggcggccatgggagctgggacatggggatggggtgagggaaggagggcaggtattccaaaatgcagggcagcagcacggctggtggggtggaggtgtggtccctgccttcaccaggcactgacrgctcttcccctgactctccagtccacagccaagaagatagacatcatcaaaggcctctttgtggcctgccgccactcagaagcccggttcatcgctaggtaagcgtgtgggcctgtgaggctacagagsgggactgcaggctcggaggtgaaaggagggagggactggcagctggaatcatcacaaatgccctgaccatccttggatgagaaaarcatgagcaggaggcccagcccctaaagagtgggaagggacaccatttcctttcacaggccagcttctgtcccttggtagtgctgtctagagaaggcccctgggcccctgtgggtgaagcatgctgtgattgattggtgaggtctgcctcggcttgggcgcgggccctgcagcaggaagccagggtttgtttgccatgacagtgagagcaaatccattgagggctcacatcatggarcatttcttgggagccctgccctgtgccccgtgccttacctcatcagttcctaccagcaactctgtgagactggtcttgttaccctcacctccagtttatagaaggggaaatggagacatggggaggcaaactaagccacttgtctcctgccactggctcaaagcaaggaccatgctggggtcctgaccatyacagtcaccagggcgggcgccaggctyagttctctccctgactcatcctcctcaagcctcgccaacccctcagggcagctgagatgggaggtgctggtgcacctacttgtgcccctccccagtctatgctagtgggcaggatcattactgcctggctcagtttcctcatctgtcacatggggctgtgtgatatctggggtcccttccaggctctgmagattcttctggtttttgaggagagggtctacrtacatcaaggtcgaggagatcagagaagggaggaggcaagattsgggaggtgcagacaagcccccttccctggcctgctctctccccaggtccctgagcggacggctgcgccttgggctggcagagcagtcggtgctggctgccctctcccaggcagtgagcctcacgcccccgggccaaggtgagctcctgtggcccgtctctgcatccctcgctggagttacctcaggcttcccycctcctcttcagaggcccatgcccgccccttccccagcgggcccctgccataccaggctcctctctcctgggtgggggggagggggcgtcttgggccgcggcatctgcattccttgccatacagcaaaccacccactgcaccctggtgtagccaaggatgtgggtgccttccaaagcctctggtgggtcttttcttagaattcccaccagccatggtggatgctgggaagggcaagacagcagaggccagaaagacgtggctggaggagcaaggcatgatcctgaagcagacgttctggtgagagctggrcagtgggtggagttgccaggggctgtgggcagagtgccagggtgggggtggagccagaggagcagtgggtggggccagtgaagtgacggacaggcatcacgagtgccggtcacggggtgactgagagcagaggtggtgatctagacaaggctggtgcttgacacaaggatggtgacaaagatcaggaaggtggcaaacagtgaagggtcartgaccccaggagaggtatagaaagacrctggcagcggccaggcacagtgkctcaygcctgtaatcccagcacttgggagcctgaagcaggcagatcacttgaggtcaggagtttgagaccagcctggccaacatggtgaaaccctgtctctactaaaaatacaaaaattagcctgtaatcccagctacttgggaaactgaggcacaagaatcatttgaacccaggagttggaggctgcagtgagctgagatcacgccactgcgttccagcctgggcaacagagtgagactgtcttaaaaaaaagaaagacgctgacagcaagggagggcagccggcaacatgaggtttctgagtkccagacagggctgtgcatgcagaaaggccttaagggacccagagaggagcaggtgactgacacatggtgaagggtcttgacagtcatggagaggacatccgtggagcggccacgagggctccagagagagccatgtggagggacctaggccagcagctgacccagggctggtgactccaagatcatgactgccccagagaggatgtcagaggcaggagggccgatggcagttccacagatggcctcagagcacctgctctgggccagggccccccactgggtgctgagcagagagtggtgaacaggcccgggcagcaagctcaactctgcctgcacgtggggctctatcagctgctgacctcaggcctaccccacaccagctacatcaaaatctttgtaggtggaacctagccttgaaaacctttgtctatttttattttgtttgagacggagtctcgccctgtcatccaggctggagtgcagcagcacaatctcmgctcactgcaacttccgcctccagggttcaagtgattctcctgcctcagtctcctgagtagctgggactacaggcgcgtgccaccacccccagctaacttttatatttttagtaaagatgggatttcaccatgttggctaggctggtcttgaactcctgggctcaagtgatgcacccacctcggcctcccaaagtgctgggattacatgcctgtaggcatgagccaccatgcccggccaaaaacctttttttaaaaactgtattcttgagtggtctcmtgtgtagccgagtagagaatcgctggtctcgtggtgacagatagggaacaggggcaaggccagactaagggagacaaagcaacagatagtgacacgaagggagagcacagagacagggtggcaagaggagcttggcaggtggtgactcagtgggcagaggcatccaggagcccaggcttctgggagcaggccgagctctctttccaaactgtgtgagttctagaaaggcttcccctatcttgttctcacccgccaccccagcgaggttcccgacctggaccgaattatccccgtgctgctggagcacggcctggaacgtctcccggagcactgcaagctsagcccaggtacaggccccaggggcgctcaccagcctggcagcagccctgctccctcctgagtcggcgtgagggtggccatcgtaggcgcccctctcagaacttgcagagtcctctcccccaccaaaaccaaatgctcctccctggtgctgaaacccactgcttttctccttggaatttccccttgtggagtagatagggtgtaggtgacactgctgtgataaacaggagccgggcgtggtggcgtgtgcctgtgatcccagctactcgggaggctgaggtgggaggatcgcttgagcccaggagttcaaggctgcagtgagccgtcatcgcgctactgcactccagctgggcgacagagtgagacaataaataagtaaataaaaatgggccagaaggcagtgggtcaggccagatagaatttctttctgtcacacagaagtgtccagagcaagggaggtggccagggaaggtacaggtgtgcagytgtgtcccagggatgaccyggggacccaggttcctgtgtccctctgmcctccaaaggttgtcrccccaatgtctgtgatcaaatgtggctcacttccctgttctaattgtgggaggagggacgcagaggagggaggggaggcaaccagattccttgcaaggatgtgagccagacattgcacatgctgcgtgggttccaatcacatggcctttcccacctggaaggmaggccgggggctgtagtccccagtgggaggctaggtccccttctaaaacgtgggaggcttcgtgactgaatagcaagaaagcagaatggtcctggggcccattagcagttctcctctccatgttccccctctaatccattgccttccctctcctctaactcactctcctcctttcccagggattcccctgaaaccaatgttggcccatcccacccggggcatcagcgaggtcctgaaacgctttgaggaggcagctttcacctgcgaatacaaatatgacgggcagagggcacaggtatggggagtgggacatgtcccttccayagacaggaaaacgtcaaagagcaggggtgtggggtcactgaggcctgagcttcaagccggcctgcgccacagactgccgagccctcgctcatctctctgggcttcagcatccacctccatgcagtgagtgtgttctttttttttttttttttttttttttttgagacagagtctcactctgtcatccaggctggagtgcattggcatgatcttggctcactgtaacctcyacctcctrgcttcaagtgattctcctgcctcagcctcccaagtagctgggactacaggcgcccgctaccrtgcccggctaattttttgtatttttagtagagacgaggtttcaccatgttggccaagatggtctcgatctcttgacctcatgatccacccacctcagcctcccaaagtgctgggattacaggcatgaaccatcgtgcctggcctctagggtgtggtcttaactacctcaccagcttatccgaagctacaatcctccagagtcctgacygatgatagtgggagctcatgaaacgtgggctccgctgatgctgctggtgggtgtgttcattttaacagccgttctgggaggtgcctacatgaccccttcatgccgtgacgtgcatgtgtgtcctgtgatccagggcctcaggcgtccttggtcctggggtctgtaagaatgtgttgtgtctcttctgtcctggcaagtgtggggccttctcacctggggataggtaagcaggcaaagtgggtgggagccacagggctcggggcagttasaggaagtggacccctgaggagaccagcctggccaacatggtgaaaccccatctctactaaaaccacaaaaatgagccagtgtggtggcgtgtgcctgtagtcccagctactcgggaggctgaggcaggagaattgcttgaacccaggaggcagagggtgcagtgagccaagatcgtgccactacactacagcctccacgataagagtgagactccatcttttaaaaaaaaaaaaaaaaaagggtggatccaacagacacaggatcagagatggatctccaaaatagtgttgagaaaaaagacacaagatgatttacgatagtgacaatgatttcttgacaactgttcctggaaataataacaaacatataagatgctatatatgccgccctgctcaagggctgtgaccggactgtcttaaaataaatagacatagaggctgggcgcagtggctcacgcctgtaatcccagcrctttgggaggctaaggtgggcggatcacctgaggtcgaaagttcaagaccagcctggctctactaaaaatacaaaaattagccaggtgtggtggtgggcgcctgtaatcccagctccttgggaggctgaggcggaaggctctcttgaacccgggaggtggaggttgcaktgagcagagattgcaccactgctctccagcctgggcgagactccgcctcaaaaaaaaatcagaatgagatctagagcataatgacatttaaacaaatcagcacccacatgcagcaaggtgcaygtgcctacatggggagaggtgtagggattggaaatgaagaagaaaatgatggtagggccttccagagcagggctgggaggtgctgttggaactgaggagatgattcgctcaagtctctgcaccagttcctcctccagagcttccagaaccttctaccagtgcaggtggggtcagaagagaaagctgaggccacatgaggggactcagctgatttcccctcccttctcccatcgtgacagatccacgccctggaaggcggggaggtgaagatcttcagcaggaatcaggaagacaacactgggaagtacccggacatcatcagccgcatccccaaggtgggcgtctgccwcacacttgcactctgccaggrtctgtggtcaggggtgcaaaggcctgaggcccatctaggccagtgtggcacagtgcggggtttattgggaggagatcaggttgcgtttggctgcaaatgacagagcactcagtcctgcgtggtgtragcccatrtgattttttctcacatctagaggtgggcaccccagcaccgacttggctgagcactgatgtccccctgaaccaagcttatcgctacctctatcccctgctgtccttggctggttggcttttagtgccaatgcttgtccccttagagtttcccaaacagatgtcattcttccagacagaaagagggaaaagggattctagcttgagttaacactttcctggacacctcccacccacaacccctcccccgccgtggactgcagctgggagtcactgtccagcactgggttccatggccaccctagtgcaacaaagcctcrgaaagccagagtctaactctgcagcctctccagccaggaacgcggggaggaggagtcaggacgagtttggagggggccagcctgtggataggccccaagcctcagaaatagcagctcagagtcatacagggctgggcctcacaggccccagagttggggacttctctgcacccagtaggggtctcgtgcctgttcgaggagtmccctatcaaagagcctttctctttgcctgcccctaattaaataggaaataagttatttaagaaagyagggggcacggtgcccatcattctgcctgttagagacagtgacrgagagaggcacagttcagtgcacgtgttaggggagctcctgttccgtgccaagcactgttctttaaatcaattttcttaagatgtaatttccctaaaagttagtgattttcagtgtgcactatgctgtttgatgagttttgaaaagttcatacacccaagtaaccgacaccccaatgaatgtataaaatatttccacattctcatcattctaacatatttccgctgggcgcagtggcccacgcctgtaatcccagcactttgggaggctgaggcgggtggatcacctgaggtcaggagttcaagaccagcctggctgacatggtgaaatcccrtctctactaaaaatacaaaaattagctgggtgtggtggcacgcacctgtagtcccagctacttgggaggctgaggcacgagaatcgtttgtacccaggaggcggaggttgcagtgagctgagatcgggccactgtactctagcctgggtgacagtaagactccatctcaaaaaaataaaaataaaaaatcaaatatttccttgtgtccctggccaagcaaggccccctcctctgyccaacaccatgcatccaccagaggcaaccccaggtctgctttttggtcgccacaggttggttttacctgttctagagcttcctgttggtggtataatatggcactagtctcttgcatctggctgcttttgctcattcgttcagcaagtatttactgggcatctgctccgagctaggccccatgctggaggctgggagtgtaacaggcctgccatggtctctgccctcactgagctcacagcccagcagagcaggcagaccttcaccagagagtcctgcagctggctctgtaaattatatgtggagatccgggctccacaggaaaggaccagcattctgtgagcctatgtaacaaacaggcctggcyggtgacagtggctcctgtaatcccagcactttgggagggcaaggcgggtgaatcacttgaggttaggagttcgagaccagcctggccaacatggtgaaaccctgactactaaaaatacagaaattagctggatgtggtggcrtgctcttgtagtcccagctacttgggaggctgaggcaggagaatcacttgaacgtgggaggcagaggctgcactgagcggagattgcaccactgcacgccaggctggacaacagtgggagactgtctcaaaaaagaaaagaggccaggcgtggtggctcacgcctataatcccagcactttgggaggccaaagcaggcagatcacttgcggtcaggagttcgagaccagcctggccaacatggtgaaaccgtttctactaaaatacaaaatttatccaggcatggtggcatgtgcctgtaatcccagctactcgggaggctgaggcaggagaattgcttgagcctgggaggcagaggttgcagtgagccaagatcgcaccactgcactgcagcctgggcgacagagctagactctgactcaaaaagaaataggtgtggcttagacttggtgtcagggaagctacctggctccaggatacaacatgaatgctgcccccggcttgggcaacagtgttcccttgagggaaaagaaggcttgccagtggaggagacagacaggggcaggggttctagagggaacggcacatgcaaaggcccagtagtggaagaggcattgcccayttatttgagaaacagagaggctcacgtgctggggtgaagagaggctcagggggccaggtgaggcgagggacgacccaggctgacccgggagagtccccccagctttggggaatcatggggatggtttttagcagggaggtgctgtgatcggatttggggcttgccagtgtcaccctggctgctatggggaagctggattggaggggatcggtgcaggacagggaagcccagtaggcgaggctgagcagggagttggtgggaagtggayggcttaggaaatcatcaggttcactgaggaactgaatgtgggtgacaggaggagggagatgacaagagctcctaggtttccagcttgtgagaccaaatattacattctcagagacattagtttctgtctcctcttggtggggaataaaagaaaagcatctrtgtgcacctgcctctttgttagtgcatcttgagagctgcagaaggaaaagggaatttatctccccgtgtttgtctttccacctcatcttcyacctctctcaggccctgggtctctcccttcacttttcagattaaactcccatcggtcacatccttcatcctggacaccgaagccgtggcttgggaccgggaaaagaagcagatccagccattccaagtgctcaccaccckcaaacgcaaggtagcatcacccgctccactgcctgccaaggccccgtacttcctcatcttccacccagtcctggctgtgggtcctgcccagtgcccagaagggcagagtgtcagtctggatgcacttctctcagccttctgcagaatggctgccacagctccagccatcgcattctcatcccagcatcccaagtaggaagaggggaagggcccttttcgggcatctctgttgttttactatgaaagaagatctgttctggaaaaccccacaacctgcaccccacaggtttccccttttccatctcattggccagaactgtgccatgtcactgccattagctgcagaaaagtctaggagagcaaatatctggtgaaggggaatgaggttgtcggaattagctragagccgttaasgatccagcacctggagccagcagcatggccgccytcacagatgggcagccagttaggtggcgagagggagaccggtagatgaatgctgtcggcctcaggcacagtgccccgtctcaccttcctgcactcacgaactccgttgtgccccaacccaggaggtggatgcgtctgagatccaggtgcaggtgtgtttgtacgccttcgacctcatctacctcaatggagaggtgagttccagcttcctgtccaggggcagctgaggggtgacggggtggggtgtgagcctggcagctgcccctctgacttccatttccgactctgccacttcacatggccaggaagccacacttgggcagcagttctcaaagtgtggtctgaggacccctgaggttccttaagattctttcaaggacatcttcaaggtccctctctttccaactccacattggcgtgaggtggatcttcctcaggtcctgcaacgagaagagtgtgtcgtagaagcacgcaggagaatccrgcctctgttaagccagatattagaggatttgcaaaagtgtaaaataatgcctctagtctcaccactttctcaaaacttgggttatgtttcatcaaaatatgttatttagagccaggcactgtggttcacgcctgtaatcagagcactttgggaggtgggaggatcgcttgagcccagtagttcaagaccagcctgggcaatatagaaaagaccttgtgtctattcmaaaaaaaaaaaaaaattaatattatttgggtgagcatattggatttatttttttaatttctcattttaaatttctaataggtgtaactataatattatgtaacccacatgaacaagctctatggagtgagtcttgaatttttttttttttttttgagataagagtcttgctcagtcacccaggctggagtgcagtggtgagatctcagctcactacaactgcctcctcccaggttcaagtgattctcctgcctcagcctcccaagtagctgggattacagatgtgcaccaccaggtccagctaatttttgtatttttagtagagacggggtttcaccatgttggccaggctggtctcgaactcttgacctcaggtgatctgcccaccttggcctcctgaagtgctgggattacaggcgtgaaccaccacgcctggccttgaataatttttaagagtgttaaagaggcctcaagacaacagtttgagaacagcttgctttaggatgtcaggaatctggagccaggccacatgccgtcatatcccagccctaaccttcctagcggcatggctacagatgaatgactcagcctctctgtgtgtcagtttcttgatctacagtaaggagctaacagtggcaggtgctttrtctgttagggtgagggctaaacagtgggataggggtgtggaactcagtagttagtacatggaagctctcaaaaaaaattagctgyaatcatcaatatcccagataatcttttttttttttttttttgagatggagtctcactctgttgcccaggctggagtgcagtggcatgatctcagctcactgcaacctccgcctcctggggtcaagcgattcccctgcctcagcctcccgagtagctgggattacaggcgtgcaccaccacgcctggcgaattttttgtattttagtagagacggtgtttcaccatgttggccaggatggtcttgatctcctgacatcgtgatctgcccacctcagcctcccaaagtgctgggatttacaggcgtgagccaccacgcccggcccatcccagatgatcatctggtagatgaaccacgatcttgtggtaacttggtcacttctgtcttattaatggatattgatgatcaatcatcttttcaggtttgttggccgcgtgcatttgttccgtgacttgcctccgcgtgtcttttgcctgcctgtctggtgggttctcactcatgtcttcctggtctgtaaacgttttttctccgttaggcccatctgtccttcgccgggacaggtggagctggtagtggttctaatgcagagatgcctttgatgctcaaacccccaatttcatgatgcagactgatgtttcactacatgaaattactgtaggaagacagtcagagtctgatttttgtttcccgtgatgtctggggagaggaaagtcaagtatcaggtgctttccaaacactggatactttgtgggtttttctgcaggatttgatcatccctgctcagctggttcctttgtctcccatgagcatttcaaatatttcttctcattccttcaaatattccttctttaaaatttattgatggcctattttgttgtataggacttgtttgagctattacttttacaaatttttttattagtagtagttgaacatggatgaactatttttatgtagtcaagtatatcattttttttctgtttaatgtgtcctcatccccatgattttttttttttttttgagacacagtctctgtcgcccaggctggagtgcagtggtgtgatcttggctcactgcagcctccgcctctggcgttcaagtgattctcctgcgtcagcctcccaagtagctgggattacaggcacccaccaccacacccagctaatttgtgcatttttagtagagtcggggtttcaccatgttggccaggctgatgttgaactcctgacctcaggtgatccacccacctccgctttccaaagcgctgagattacaggcatgagccactgcagtagcctacatttctaattttagagcttctagtagccatattaaaaggtaagaagaaacagrtaaaatcatattttctttaatccaatgtctaagatattatcctttcaatgtgtgatgaatataagaaattattaacatggaattttacactcttttcttggattaagtcttctaaagccagtgactgttttgcccttggcacatctccgattgaacttgctacatttcaagggctcaattgctacacatggctggtggcggctacactgggtagcacgggctcagctgatcttcccagacgtgccctgagtaggtattgctgcattttacagatgggagctctgaggtacacagagggaaacgcttgcctgaagtcaccagctaggaagcgtgtggctgggatgtaaacctgaaatggtctgaccccagataaattgtacctgcttaacccttgtggctcctctctctcatcttttcatacaaaatgttcatgagcacaattttacaacagaaaaaagctgtccatggaaaacacgtgaatgtccccctggagggcaagtggtgaaggtagtttaacatcatcacagagaagccctgagcaaagggcagaccagaaacactgcgcgtgggtggggaccgatcgaacaaaagagaaaagcaattcaaagccacaagacggattagtcagtgttgacatgtggagacaactgctttgtcctttgtttaaaaacaytcagatcacctccttcctctctgacacacactcttgcaaggtccagctggaactgatttcaaagcaaaacacaaaactgtaaatgtgctggaaaaactcagtgaaaacttttggaattctaaggaaaggaggactttttttttttttttwwaattatcttggggatgaggctggatgcagtggctcacgcctgtaatcccaacactttgggaggctgaggtgggtggatctcttgtgatgtgcacctgtagtcccagctactcgggaggccgacgcaagacagtcgcttgaattcaggaggcggaggctgcagtcagccaagatygcaccaccgcactccagcctgggcgacagagcgagattccgtctcaaaaaaacaaaaacaaaaaacaaaactgatgagatgcccgtaaagtgttaattcaagctccagcaaggccgcagccccccgtctgatgctcctgaagtcaccgactctaaatggtgtcgggccctcttgccagtgactagccccatgctttaagctctcagaatccttctgacatcagggttcttccctctcaaggctttccacgaacsctgtcactagttgtgacccgcacatgtcctgttcgcctcacatttagggcttattgtctttattctcacaaagatgtctyatctctcttctccctgccggccctgcagtccctggtacgtgagcccctttcccggcgccggcagctgctccgggagaactttgtggagacagagggcgagtttgtcttcgccacctccctggacaccaaggacatcgagcagatcgccgagttcctggagcagtcagtgaaaggtgagggtgctcacttttctctcctgaggtctgcagcttgcrctgaccccggcctcccagcctgtccccagtcctggaccgtttgaccagaatcctgcctgctccggcgcttgtgagccagggcttcccaaggaccacgcttctrtgtctccctcagactcctgcgaggggctgatggtgaagaccctggatgttgatgccacctacgagatcgccaagagatcgcacaactggctcaaggtgattctcgacccccaactgggccttctccaccccgggtctggaggtctgtcccagctaggcagtggatttcgagcctccactgtgtaccctgtctgagctcagggccccttttcacaatcccaccccagccccctgctgcaactgagttcagaccttctccctgctgcgagcccttgctcacgagttctgatggagaacagccccagcccaagcaccgcacatcccacgaggtgcagcgtgatgaggtgtctctctcctgagcctgccgcccgtgtcgggccaggctcttgggcaggaattaagccaggacatgaataagagaaagtcaggcaggagtgggcgccatgaagaaaagcaagtcagctccgggccagcaaggcggggctgggagtgccccggatgatcaggaagagtctttcccaaagtgagggacagagcactagggaggaaaacccccggtgcagagaccctgagggaggagcagcctctgcgtgtgcagggagcaagggcaggcgaggcgggaggtgagctcagagtggggagcaggccccagatgaggcagcacctggggccactgtgagataaaactggatcttcctcttgaaggtttcaggaagtcagtgggggttccgtgccgggagtcacaggttgtcattgtgcgaagctcctggggtttcccctygagtggaggacgggtgtgttgagggccagcgagcaggagcctgtcatcagtaagagttgatggatgtttgagtggagaggggcagtgaggggtggacaaggggactggagcgggaggcattgtggcactgagccggccaggcctgctgactagctcttcctgtgtacttatgtctgtctgtggctggtttccctccagcacagacctttcctgtctcaggaaatagcactgttgtgcccccagggctgagcttctgcctggcacatggttagcacttagtgaacgtttctgaaygaatgggaaaatgctctccctttggaggagtggccagagtgagttggccacgtctctgtcctgagggaaagacggcggcaaggctgactcctgaggtcccatcgatcccgcctgcgtttcccatttgttcttatttatttatttatttattttaagacggagtttcactctcattgcccaggctggagtgcaatggcacgatcttggctcactgcaacctccgcctcccgggttcaagcgattcccctgcctcagcctcccragtagctgggattacaggcacacgccaccacgcccggctaattttgtatttttartagagacggggtttctccatgttggtcagactggtctcgaactcccgacctcaggtgatccacccgcctcggcctcccaaaatgctgggattacaggcatgagccaccgtgcccggccccatttgttcttatttaaacctagaaacccttcccatgtccagtctcttcycaggggccatccttggggttccttctggaagttcccttcagacttacttctagtccctcctcagtccactgaggagcccctccccagcagtgagggccccrccttgggcgctcccccttctcatctcttgcctccccttctcccagctgaagaaggactaccttgatggcgtgggtgacaccctggacctggtggtgatyggcgcctacctgggccgggggaagygggccggccgrtacgggggcttcctgctggcctcctacgacgaggacagtgaggagctgcaggccatatgcaaggtcctggggaactggggctgatggcagaagcaggagggaaggagattagactcccgggggtatttcctattgcacaacccagaccgaggggtgctcacatccccctgtgaaggatccgttctccccagtttttatttactttttctggttctatgagcaactcttgcttcatatagaaaaacaggctgggatagaaagatgtcaggaatgtgtgtcagtgagagattgagattagctacaaatagtggtggctcacataagaaaagaatttttttgttatgaaatgagaagtgtggagggggcagtctgatgccattagggattcaggttcctcctctccccacatttttttttgtccccacattttttttttctgccatgtgcctctggcctcatcatcacaatgtggctgcaggagttccagccctcatggccatgcctgctccacgcaccagggaagagcaaagggggttsgaccytgagtcagcctcagccagtgaacaccttctgctcaagttctgttgctcatcactttgctccatggctcacccctagctgcaaggaattctgggaaatgtaaagtgatttactttttttcaagttaaagtttttcttaaagctgtgcacattttggactagattttcttacgtatttcctatattcccctctccaacaaatttgggtcttttgccacagaaacagaacaaaatatcacctagaatcgtaccacccagagacacgcagtagtgacatttgagggaatgttttatttacatttttgcaaagttgtgatccttctctatgagtaattttcttttctgcctttttaccctggaagtactttgttttcagtgttgtatatgcccttaagcaatatggcaacaggacctgaatgcccgcacaagagttttcaagtgctgtgccccatagcacatagtgctgtgtcctgaaccagctccccgtggctgtgtggggaagttgttgccggctttgttctgatgggtaatgtgattacttagtgtccgttaacctaaacgatcagtgacagaagtgacttttataaatcacaaatgttttggccaccaatctacattgtcaccattttgcattatttagaatagatttttaaatgagctattgtcaggacaaaaggcaaaaagaatccttaagactctcaatgcaaaaggggctttccaggtgaygtttatattggtgattattgcccacttgctgcgtatctgccagcatccagcattactgctaatttttagcctttcctattttggtaggtgaaagaagctcttggcagtgttaacattggagatgggctgggcatggccactcacgcctgtaatcccagcactttgggaggctgaggtgggaggatcacttgagcccaggagttcgggaccagcctgggcaacatagtgagaccccacctctacaaaaacttttttaaaaaattagccaggcgtggtggygcatgcctgtggtcccagctacttgggaggctgaggcaggaggattgcttgagcccaggaggtggaggttgcagtgagccaagattgcaccactgcactccagcctggataacagagctacaccctgtctcaaaaaaaaaaaaaaaaaaaaaaaaaaagactggaagtgaggacagccagttactgggcagtgaggatgtgggtgagcataagggagtgacttcctggggccagggagacagtggaagcagcaagagtttctccataaagcagaagacagggagtggttcacggcaggcctgctgggagaacattcccacccgggagtctctggatggatgctccgcacccccagctccctacttccctggttttctgtggatactgcgtagaccagagyggggtgggggccatgagtgtacacagctttagatggcaggagcaagtgctgggcctgtggcyggctgagcctctgacctcccgcttcctccctgcagcttggaactggcttcagtgaygaggagctggaggagcatcaccagagcctcaaggtgagccatggyggctgcrcctcagcctccacccctctccyccctgcccctgacagcacagtccttccatgcagggctcttggcttccaccatcttggggctccaggtgtgggcaggagggcagcaggcagtggagctggctttggagtccagcatctccaggttcatgtctcagcactgccrgctactagctggtgaccctgctcaagcagcctcacctccccaagccctgtgcctcattcacaccaggggttagccaaaggacacagcaggtgccatagctgctccttgtgaagtgcctgtgagccctgatcaatgtgaatgaatgttgtcatggtcacaggcatttcaggcatgagtgtctgtcctacatattggatctgtattagtttattttcatactcatactgctatgaagaaataacccaagacttgccgggcgtggtggcgcatgcctgtggtcccagctacttgggaggctgaggcagaagaattgcttgaacccaggatgcagaggttgcagtgagctgaaatcatgccattgcactccagcctgggaaacagagtgagactctgtctcaaaaaaaaaaaaaaaaaaaaaaaggatcatttataaagagaggtttcctggactcacagttccacacggctggggaggcctcacagtcatggcagaaggcgaaagaggagcaaaggcacatcttacatggygccaggcaagagagcgtgtgcaggggaactgccctttataaagccgtcagatctcgtgagacttcctcactatcacgagaacagcacgggaaaaacctgcccccatcgttcagttacctcccaccaggtccctccaygacacatggggattttgggagctatgattcaagacaagatgtgggtggggacacacggaccctgacaccatctctgtcccactctttggttctctctctccattgccctctctctctacatctctgtccctgtcccactgtgtctctgtctccttcctccaggtctctggccctttctctgcctctttttgtctttaatgtcctgcctcagcccccagggcctttcatttctttccatctcccattcctcccaactcccacctttctcaactttttacttcaagggggtcttgtttcttttcccttctttcactttctgtttctctttctatttctgtttacttcaagggggtgtcttgtttcttttcccttatttcacttcctatttctgtttacttcaagggggtgcctgtttttttcccttcctccctctccccagccctccaacacttggccttgactttgagattccagaccctctgttcctctcttcctctgctcactgcaggcsctggtgctgcccagcccacgcccttacgtgcggatagatggcgctgtgattcccgaccactggctggaccccagcgctgtgtgggaggtgaagtgcgctgacctctccctctctcccatctaccctgctgcgcggggcctggtgagtggcagaggacctggccgtggccctgtgtgggattctgggcgggcacacagagagcagagtagggaggggaccttggctcacatctgctcttccaggtaaggatcaggaagatgagcttgcattttatttgagtgtcagataaaaagatcaaaacattttttctttaaaaatgggccgggcatgggggctcgtgcctgtaatcccagcactttgggagaccgaggcaggcagatcacttgaggtcaggagttcaaggccagcctggccaacatggtgaaaccccatctctaccaaaaatacaaaaattagccatgtgtgatggcgggtgcctgtagtcccagctacccaggaggctgaggcaggagaatcgcttgaacctgggaggcggaggttgcagtgagccgagatcacaccactgtactccatcctgggtgacaaagcaagactctgtctcaaaaaaagaaaagaaaattcttttcttaaataaaagaattcccagggcaagcacagtggctcatgcctgtaatcccagcactttgggaggccgaggcaggcagatcacttgaggtcaggagttcaagaccagcctgaccaacacggtgaaaccccacctctaccaaaaaatagaaaaattagctgggtatggtgacccgtgcctgtagagacggggtttcaccatgttgactaggctggtcacaaacacctggcctcaatccgcccacctcggcctcccaaagtgctgggattacaggtgtgggccaccatgcccagccaagaacttacatttttgatctaatttttaaaaatgttttaccatgctgcacgttagacagccagggacccttagtaacaaggcacaggagccggtgtgtatccagcccttgctgtgcagtgggcactgtgtggtcatcagcgtgtcactcatagacactcatttaatcctctcaaaatccgtaagacgtagtgacacaaacatctccattttacggtgaggatgtagagccctagagagcctgagtaactgcccctgcatcacgcggctcctgagagttgggagctgggattggaatcccacagtcagattctagaacccataccctggcgccgtagttcagcctctcagcccgaattaccgtcattatcgtaacggctgtagcaggtggcattttttttttttttttttttgagttggagtctcgctctgtcacccaggctggagtacagtggcgcaatctcagctcactgcaagctccccacctcccggattcacgccattctcctgcctcagcttcctgagtagctgggactacaggcgcccgccaccacaccyggctaatttctttttgtatttttagtagaggcggggtttcaccgtgttagccaggatagtctccatctcctgacctcgtgatccacccgcctcggcctcccaaagtgctgggattacaggggtgagccaccgcacccggccaacaggcagcatttcttgagcacttactgtgcccgggtactgttccaagcactttgtcaacttgtttaatccttatgacaacccatcgttcggccccgtcatgtggatcaggaaacagtccagagtggaggagggaggagactgagcagggggtcgctggggctggaccgcaggagtctccatcccgcttccgcaggtggatagtgacaagggcatctcccttcgcttccctcggtttattcgagtccgtgaagacaagcagccrgagcaggccaccaccagtgctcakgtgaggtcctgggaagcaggggtgggccgcccagctgcttggccctaccagctttttagcgtggtggcctctctggaaccttgtggaggtgggagcagccagggagcttctgaccaccccgtcccaccctctctccgcaggtggcctgtttgtaccggaagcaragtcagattcagaaccaacaaggcgaggactcaggctctgaccctgaagatacctactaagccctcgccctcctagggcctgggtacagggcatgagttggacggaccccagggttattattgcctttgctttttagcaaatctgctgtggcaggctgtggattttgagagtcaggggaggggtgtgtgtgtgagggggtggcttactcyggagtctgggattcatcccgtcatttctttcaataaataattatyggatagctactttgtgacagggtctgtgctgggctctgggggcaaagctgtcatgggtgtcacctgcatagcatgtagccatgtagccatggcctaggaactgccagagccagtgccagccatggaactgcctgcagtggtgggcgtcttctctatctgctctgtgcagtgtgaccgccactggccacctgcaatgcccgagcccttgacaggtggccagcatgacagaggatgcgaatttgttttgttttgttttgttttgattttgttttgagacagagtctcgctctgttgcccaggctggagtgcgatgatgagatctcagctcactgcaacctccaccttccgggttcaagtgattctcttgcctcagcctcccatgtagctgggattacaggaatgtgacaccacgcctggctaatttttgtatttttagtagagatggggtttcgccatgttggccaggctgatcttgaactcttggcctcaagcgatccaccctcctcagcccccctaagtgctgggattacaggcgtgagccaccacacccagccataccaaatattttatttaattgtattggacagcagtagtctaaaatctttacatacatatatttttttaacttgtttaaccttccagccatcccacagggaggcaccatcgtgagccctgttaaggaagacaaatgcagtgtcttaaaataacacagatgtattccctaaacagtttcggaggtcagaagttcaaaatcagttttactgggctaacatcaaagtggtggcagggccggttccttctgggagctccaggagagaaactgtgtcctttttccagcttccagaggccacctggttcctaggctcatggcttcttcctccgtcctcaaagccagcagcatcgcacctgcaaatctctctcctgaggtcatcaggtcacgtcctctcctccatcagatctctgtttctctcttccaagtactcaagtggttacatttagggccccctggatgatccaggataatctcatttcaggatcctaactcaatcccaaagtccctttagtcacataagatcacacattcacagaggccaggcacagtggctcacgccttggggaggacttggggaggctgaggtgggaggatcacttgaagccaggagttcaagactagcttgtccaacacagccagacttcatctcctctaattttattaataaaattaataaaaatgtaaaagggccaggcgcggtggctcacgcatgtaatcccagcactttgggaggctgaggcaggtggatcacctgaggtcaggagttcgagaccagcctggccaacatggcaaaaccccgtctctactaaaaatacaaaaattagctgggcatggtggcgcgtgcctgtaatcccagctactagtggggtgaggcaggaggatcacttgaatctgggagacaggttgcagtgacccgagatcgtgccactgcattccagcctgggcgacagagcgagactccatctcaaaaaaaaaaaaaaaataggtcacatcaaaggtttcagcgattaagacctggatatctatgggggctgttattattgcagccaccccacatgggatgatatgttagaggaaaaccatcgggaaatggtcagacaaggcaagcaggatgcctggaacacccacccagccctgggcaccacggggctggcttggggaaaacggctgcacgcggagcggggcccaggctcgggtcttccagagcaggaggcctctaaccccggggcccagcgtggaacaggagcttccgggcatgagagtgtcagggtgtcctgatactcccgcaggggggacacagggctcccagctgtcccctgcccctcacactctgtttctgcctctcacatctgccctccctccttcccttctctctcatcaggttcctctgcccttgtctcccacccgccctctctccccttccttctctatctgcgaggctttgctctctgccgtgcaagtctgtgccaggcttactttgctgtctgtcactgtgactcagcctccctgtctctcttcctgtgtctccatcatggtctcttgtgcacacaatctcttgggcattctgtttctatttgttgtagcccaagaagacaacattgccttccgagtctccttggggctagcagtggccctgtagccctgtgtgggcagacccaggggacataagcacaggggctgctggggacttctggagaaacatctttcctgaccaaaaaggacagccctggttgtggcagctcctcccctcctcctgccttgactagagatgatggctggagccaagtcaccaccttgtaatgatgaggaaaaagagtaacaaactctcctgacgaccctaaaccggcgaacctagggcagcagctgcctaactgtgggcttttgttcatgggagtaggggaagaataagccccagggcgattatgccactctaaaacatggctttcagccgggcacagtggctcatgcctgtcatcccagcacttcgggaggccgaggcgggcagatcacctgaggtcgggagttcaagaccagcctgaccaacatggagaaaccccgtctccactaaaaatacaaaattagccgggcgtagtggcacatgcctgttactcccagctactcaggaggttgaggcaggagaatcgcttgaacccgggaggaggaggttgcagtgagccgagatcgagccattgcactccagcctgggcaacaagagcaaaactccgtctcaaaaaaaaaaaaaaaaaaaaaagacttgtttctcatagctaagagttcctgatacagctctgccttaaagaactggcaaattagtgtgcatttgtgtttcaatttcaaataaaatgtttaaggcaaaaaaaaaaagtaaatgttgtatgtcaggggatccccacattactggctttgtgtggagaccatggttcctttgggcttggctcttcctccctgcaccagtgcagggccccaggaacacatctgccacacacggccgccatgtccctctgctgaagctagtcagggtcatcctcactcctcagtgaccctcatgatggctccaccaggtaggtacttttattctccccatttaacaggtgaggacactgaggggcacagggatgtaagttaccttccctaggtccactatctaggaagtggtgggccagggtttggtccatgctgtcagctccttgaccctgcatctataactactaactatactatggagagcctcatgagctcctgcgaggtgtagaaccttatcccgcaggcggggcagtggcatggtcaggtctaggagtgaaaagatcctgcgatggttggagttgcgggcactgaagaggtgagcctggcgttagggggagcaggggagaccatcttccccctggtgaaatcctgttctaaaattggtgatactcctgccttggcctcccaaagtgctaggattatggcctcatatctatttttaaaaaataagaattcaagctgggtgcggtggctcgcgcctgtaatcccagcactttgggaagccgaggcaggtggatcacttgagttcagcagttcgagccagcctggccaacatggtgaaaccctgtctctactaaaaatacaaaaataattagccgggcgtggtggcagatgcctatgttcccagctactcgggaggctgaggtaggagaatcgcttgaacccaggagacggaggttgcagtgagccgagattgcaccactgcacaccagcctgggcgacaaagagtaagactccatctcaaaaaaaaaaaaaaaaaaattcaaaacccatcgagttgggatgacgcttagtgctgggcttcaggaagagtaggcaggagggtagtatgggaggtttctaggagccactcttggaagcggtgctccccacagatgcccgattgcactgactggaactcggtcacatgaccacataactcgctcacatgaccacacctagctgcaaaggtgctgggaaatgtggtaccctgttgggaggccacttctgggcttcaaaccttcactgtgaatggagctcacaggttttctaaaaatggacattaaatgaaccagagttggccctaaggatctggctcactgcaacctccacctcccaggatgaagcacctgcctcagcctcccgagtagtagctgggattacaggcacatgccaccatgccgagctaatttttgtatttttagtagagaaggtgtttcaccatgttggccaggctggtctcgaactcctgacttcacatgatccgcctgcctcagcctcccaaagtgctaggattacaggcgtaagccaccacgcctggcctcaatatttctttttctgggtatttgagtatgatattatatatgatggttattagacagccagatgcataggaggattagctaatctgttttgaggaatacttatctccaatatagttatataacgacaacattctttttttgaatactggtctcgggtgcctaatgacagaagggtgacatcactaaggaagcctggaaagtcccagccctccacgtgatcccacggatgaaaatagctccgggtgagctctggaacagctgaaaaagctggagcaaccaagcagggcctacaagccgaggagggctgtttaaaggcgcaggggccattttaccctccaggttggccctgctcaggaccaggaggaaacacctccagcccgcgacctcctcccacagggggaaaaggaaagcaggaggaccacagaagctttggcaccgaggatccccgcagtcttcacccgcggagattccggctgaaggagctgtccagcgactacaccgctaagcgcagggagcccaagcctccgcaccggattccggagcacaagctccaccgcgcatgcgcacacgccccagacccaggctcaggcaagccgtgggggcagggagggctgtttcatcccgctggggcggccataaccaagtaccagggattgggtgcaattaaataacaggatttctttttcttttttattttattttattttatttatttatttattttttttgagacagcatctcgctctgtcgcctaggctggagtgcagtgacgcgatctcggctcactgcaagctccgcctccggggttcaagcgattctcctgcctcaacctcccgagtagctgggattacaggcgcacaccaccacacccggctaatttttgtatttttagtagagatggggtttcaccatgttggccaggctggtctcaaactcctgaactcgtgatccaccccactcggccttccaaagtgctgggattacaggcgtgagccaccgcgcccggctaggaatttattttctaacacttctggaagctagaagtccaagatcaaggtgttggcagggttggtttctcctgaagcctcttgcagaggccctaatctctccttataaaaccaatcaggctgggcgcggtggctcacgcctgtaatcccagccctttgggaagacgaggcgggcggatcctgaggtcaggagatcgagatcatcctggctaacacagtgaaaccccgtctcaactaaaaatacaaaaaattagctgggcgtggtggcgggcgcctgtagtcccagctactccggaggctgaggcgggagaatggcgtgagcccggaaggcggagcttgcagtgagccgagactgcgccactgcactccagcctagggcacaaagcgagactccatctcaaaaaaaaataaaataaaataaaccaatcaaaccaaattccaggccaccctcaggaccccactttaacttagtcacccctttaagagcctatgtctggccgagtgcgatgactcatgcctataatcccagcgttttgggaagccaaggtggaaagctctcttgagcctaggagttcaagaccagcctgggtgacataacaagacctgatctctacaaaacat

SEQ ID NO: 93219 - DNA, 232431 bp, Homo sapiens
aatggaataaactaacctatgatctttctattacttacagaaactttttattatattttatgtagtaaaatgtacaaattattttaagtttttggtttttatcacgtgtagaaacaagactcaaatgctctaaataaattcactcatacctccttctagtatgttatgactcagatttttatatggaaatctaaatgttattaaacagaaaagagcttaagggtagatcctagaacatacaggaatttgaatatgatacagagaggatttcgtttctgtggggggaaagctgaattattaggtaaagatgtggggacaaaggggtcgctgctgctaccaccaaaataaattccatatggatgaaagaataaaatgtgaaaaacaaagccataaaaattttaaaagaaaatatgggagaatatttttggtaacagaaaaaaaaatggcttttaagcagagaaaaatatcctcaaatagaatagaaaattataactgtaatgagatatcattttacatctattagactgggaaagataaaaacagtttgataatgctgtattggtgaagatgtggggaaacacagtatgctatcaaactttccgtctttgttaggatgactggaacttgtaccacttatctggaaggcagcccggttttgtctatcaaaatgtaaaatgtgagcgggcacaatggtccaacgcctgtaatcccagcactttcggaggccgaggcgggtggatcacctgaggtcaggagttggagaccagcctggccaacatggtgaaaccccatctctactaaaaatacaaaaattagccgggcgtggtggcttgtgcctgtaatcccagctattcgggaggctgaggcaggagaatcgcttgaacccaggaggcggaggttgtagtgagacgagattgcgccattgcactccagccagtgtgacaagagcaaaactccgtctcaaaaaaaaaaaaagtaaagtaaaatgttctttaatctagcaattttacttctagaagctaaacctacagatgtacaccacatgtaagccagaatcgtttacaaagagatatatttcaacttgaaaccccgtctctactaaaaatacaaaaaattagctgggcatggtggcaggcgcctatagtcccagctactcgggaggctgaggcaggagaatggcgtgaacccggcaggcagagcttgcagtgagccgagatcgcgccactgcactccagcctgggctacagagcaagactccatcttaaaaaaaaaaaaaaaagggaatagcaaagacttggaaataacgtatatgctcattgaaaagtgaggagttaaataaattatgctacatctaagcaagagaatactacacagcctttcaaaagaactaggctcatctaaagcatctgataacagaaataaaatacatattatgaagttaaaaaatcaatatactagatgagtaatatcctttggaaaaggatatttaggtgtgtgtgtctgaaaagatacacaagaaataactaggtttctcaacaccgtaacctgaatgatacacatcatcccgccctttgcctgtacctagttgactgcttgagcctgctgctaatcattctaatttatactttattttaatattttttatgtaactcccactcatttattttctttttaagactcttcttatttttgaatggcactcttccaaatgaatttttaaatcattttatcaaattcctaaaagtatcctgttggacatttgattagaattatactggataggctgggtgtggtgggtcacacctgtaatcccagcaatttgggaggccaaggagggaggattgcttgagcccaggagtttgagactaatctgggcaacatagcaagacccctctctacaaaacttttttaaaaaattagctgggcatggtggtgtgcacctgtagtcctagctacttgggaggctgaggcaggaggatagcttgagcataggaggttgaggcttcagtgagctgtgaccacactactacactccagcctgggtaacagagcaagaccgtgtctcaaaaaaaaacaacaataaaaaacccaaaaaattatactggatatataacttacttttaaaagataattatacattctttcaaccttggtatttaatttaaaagaagattgcttttttatttcaaacattgttatttctcataagtctgtcatgattctaaaattttttttagagaagggatcttgctgtgttgcccaagctagcatgcagtggctaatcataggcacaatcatagtccactacaaattatatcatttttaaagtatgtcttataacttttgtttatattttacattatgtatgtatttattttttttaaataaagatggggtcttgctatgttacccaggctggtcttgaattcccaggctcaaacagccctcctgccttggccttctaaagtgctaggattacaggcgtgagccaccatgcccagccagttttataaatttattttagtgtttatttttagctacttaaatttctgtggctactgtaagtgggatggattctttttatattgtattttcaaattggttatgataatacatgagaaagctcttgattttcatatgtttttttattattattattattgttatttttgagacaggatctcactctgttgcccaggctgtagtgcagtggtgggatcatggctcacttcagcctcgacatcctggcctcaagcaatcctcccacctcagcctccagagtacctgggactacaggtgcatcccaccatgcttggctaacttttttattgtttgtagagaaagggtttcaccatgttgcccagactggtattgaactcctggactcaagtgatctgtccacttcagcctcccagagtgttggcattacaggcataagccactgtgccccaccccccgtatgttaattttataactagttatcttaatttatcttttattgcctctaaaagcttttcagttgatgctttggagttttcatattatttgcaaacaaatgacaaccctgacttatttacagtacttaatttcttatttctattttatatctaattgcattggctatcgtttctattgttacaatgtgatggtgaacattcttgccttgtacttgacttcaataggaataattacgatgttatgttataaaggaagtggctggctttagtataacatatatatatatttaaattattacaaattctaatttttattgggaatgatgctggactttacaaaatccttttcagcatcaactgagatcctcataatgttttcctcctttgacttactaatataatcaagcatatgagaaaattttctgttattgaactattgccataactatacacatgaaataatttctcttaattttgttatattatttgtaatgtagtgctgggttccatttgttagtattgacttttacattatatccaaaaggaatttaacctgtagatttcccttgtgtgtactttttaacagattgtattttaaaaccagtctttcagctcatccaaaacagagggattactggtgaaaatgccttgagggcaaccacctgaaatggccttaataaaaaaaaaaacacgaagaagaaaaagaaaaggaaaaaagctaacaacactgtggtttgtctacttttgcggaaatttacaacactatacttgctataccttctttctgatgtgaatccacaagctattgcagccattaattaaggatattgcttttctttccaataaatacatgaactttctttcagaggcaaacagagacagatgtttcatgaaagtttctgttcttcccaacctgcctttcctacctccctgatagatgatccagaacatttaaaaatgggggaagaactgagaaaagggctccaatcatccacttgtgtttcccatccaaggagcctggcctgttatttactttcaccacttatccctgctgctgctgtttagtttttgttgttcccctcaactgactttcctcatctttgctgcattcatcaaagcccagtgtaaattcccctcttccataaactgaggaatccagcccattttacatagcaaactttctcttagctgctacctactcaaagtttggctgcacattttagctataattgttctcaaattgtttcaagagtgctagttttctttcttaggctccaggttagctccttgggagcggggacttagcttaaaatcctgctgtgtattttccgttgtgtttagccctatgagtaatcacattcaatgcatacttgtaaggcatatttgactgaagatatctatcatagttattcatttagtaaatgatataatgaaaactcaagtgctcgccaaagataaatcattactattaattccctcattcatcatacatgtatggcagcctcaggggctagggaacctaggattgctgctttgactttttttggggaagccaaataagcctcagatctctccactttggagccagccatgaaattcagatttacctagggctcaacattaagggtctcagactaaatttatcttcaggtaccctttccagagtggaccagtttaccttatacctctgagaataacccaaaactttcaaaactcaaatcacaggatattatttgttcatgaattcagcaagactctcttgtttaactattgaaactcaaatatttcggcttgcagcaaggaggggtacagctgtctggatataccttggccaaatttcagtgtatatagaaaagtgggaggttatcgactatgttaaacmttttccttaaattttcaaacttcgggattattttagtctcatagataaaataacaaggcaagtatttacaaacttttttcaaaaatatgagaatttcagttttccctagggcatttggcgttgtgctgtcaccacacttttgaagatagctttacaaccgtgggaaaactcaccgggcttttttcgttgaccccgccatttctaagttgctatattgctgcaaggagctggcaaagccatgctcttcctctcccccattctcctcttcctttcaaagaccaaagcgccccgtgagaatatagaaacaaggctgagaggcagcgaagagtaagggaggagccagcacttacgcatttttcactctcctcctcactccctagggtcatagttttgattctgaagttagaagtgtgggggtcgtcggctgcattttcaacttggcctaaaagttggagttcaccacactgcaggcgctaggaactctgccgctcggtcaccaacctgagcctctggctagtccgaagaacgcgaaaagccaggcccaaggcactggttgtcatggcaaccggggcgctggtctccctggcgacctcgtccctagggaggaggtggagctggatgccaggcgggccaatgaggtcgaggggagctcggggtgggagatctgcggtcctcccagtgccggggaatggttgagtgacaggaccgggggggcggagccggcgcggctgcccgaggtggagccccagtggtgcgagtagctccagcggccacgctgaggcgagggtgacacaccatgctcacggcccctggagaccgtcgtgctggcgagccgtgctccgtagctccccggtccgcctcggcagcggtcagagtcgcctacaggagttgagccgcccgcgccagaaggttttggcgaagctcttggagaggcgtcgagcacagtagggcggcgggggtgcgttgagcgctcgggggtcaggcagtcggccgggatcgccgctggggagcgtttccgaggcgaggaggaggaggaggagatgctgctcctcttctccccctccccaggctccttctacagctccttcagcccacgcccgcagccgcttgtgggagaagtggtggtggctctcggcgcccgcggcggctgccggcggcccgccccgacgccgcgtccctgcagccctcgcccggcgctccagtagcaggacccggtctcgggaccagccggtaaggacgagagccgccctgggctctgcgctgcatgtgcagaagtgcaaaacaaagtacattgcgctcgttctcttcctcctctctctgctttcgctccagtccctaaacccaactcctcggttgccctggtagaaggaacttttctttggttttggtggtgggtgtttttgtacgttagagtgggggtggggtgactggagtggggaagaatgagatgaaactccattgctaattaggtagatccatctcctctgcggaagaaagccggattctcgggaatgaaacccacagggggagtaagagattgtggggtaatagggagtgacattgccccgtcgtgcttgcacagctccgctctgtgcgtgcttaagggaagggctcccggagtctgtttctaatttctgcaaatgattgtggagatggtgtggttagaggccgcccagaagaatgtgtgtgtaagggctcgagaagggggtgggatggcggggaagcagaggaagagggggcagagggagagacactgtctgatgcaaggtcttttattgcttttcttctgcttgctaaagttaacactctaccctccggccccctagccccaccgctttgctcattacgtgatactgtaagagcagacagctgggaagctaaagttaaaccaaagtcaagaaaattcttacaaagtttaatttccttctgttgtgaatataatggagagaggaggatggggagaaatatcactaagagatttacagcaatacagttttcattggccatacacgtatatgatcgacaccaccgcacacttccaactaatctgttcgacagccttgtgtcattttcatttaattgcatctttgaaacaacaaacgcggtgacttcatagggagctgcctggagctgagctccctcgcagaaaatggggcaatcgggtttgttttcaaggcaggacctgaacaaaatgtaggacacctgatctgtgggatgaagggcgctggtaactaattataaattttaagattttaaaatttatatctagaaagtttactaaaggatgggggggggagtaaaagtgcatgtattatgaaacaagcttaggtattttcctaaagtcttcatgactgtgttggcagggtccaggtgaaaacttgcttcatgctcattggctgcttgtagtggtgccaatatacaaattatttctcgttttaatatcactaggagcatttgttagtaaattcatacatatattgatttagtaaatttatacagaggcgcactgactgacgtccaatcttgtttattatactttgttcataacattgtgttctacttgatgttctagaggctttgtgggagtatgtgtggggagaggataggatggaaattagaactaaaaacagaaaaatatttgaggttagttgttaagaaaaggactgatttcatagtgtttttcacttttacaattagagaatgatagcttgctttaccattatgtaggtttatctttgaatttgcatttgtcccaccatttttacttgcatgtaaagcctagttatattttggagggtgattaccagcatccaaaaatataaatggcttttcatgtcacaagtaacatacacgcacaccattaaaaccagtgtcaatttaaaagtcagattttaatkctatgatggggtcacgttataaaacttaggtcatctttttgttgttgtttttgagggctgcctcctaaatacggtatgtgaatgtgagaattagctaatcatttgttttggagtagataatataaatgataggtgttcatctttaaatgaatgaaatttatgtattctttgttattgagaaaaacgggtgttgatttgttctgtctttaatgtgttaaggattggatggggaagtgttgtagcttctcccgtatcaatggggtgtatatttttccagctcatcttagtgcccagccccaaatgtactggagagaaggactgtaagggataaactattacttcttttttttcctcttcaccctcttcttttgacagagggtgtaatttttaaataaaccccaaaacatttttatgcataattaaattataattaacaccatttgaaatgaaaaagaaacacaaccatactccaagccagtgcatttagtagttactcctgtcaacatattcttgttttggaatatgctttgggagaactctgtgtagttcaaagtattctcctgtttgcctctgatgcaaccaagtacgactcatttgagttaatatcactttacaaggtaggggcctgagaaaggagaaaagataatgggccttaggatagaagaatcagtgctgatggaaatgacgagaatcttttgggctgggcttccttttttttttttttccctgaaaaactctcttttaatttgaaaattaaaatgggtcaaataacttaggaactaaatgttttaaagatagcttttaagatagggtctctgttgcccagtttggaatgcagtggctcgatcatggctcactgctgcctcaacttaccaggctcaagcaatcctcctaactcagcccccaaagtagcaggtaccacaggtgtacaacaccacacctagctaattttgtttattttatttttttaaatagagacaatgtctcgctgtattgaccaaggctaaaagatagcttttaatgagtacattaatgtaggacttttaatggcttaagttaaagttgaaagtttcatactagctgtaaatgtcccatcaaaactcccgtctgtaaactgctttgggaggtggagttctaataatcctttgagtttgggaagaaaatgaaaacacctttaagacccttattcttgtttagtgtcaggcactgtgaataagcaccctgctctatcctgcccaaccctgttcccaagaatgtgtgactgtcactaatagtaaggcagtaggtgggccatttcttaggataaaaagagaagaattcctaaataatcttgtatagaggctggtgtagatttaaaccataaacttcacatgtttttcccagagtttgctatcaaatgcatgggaaatacaggaacagggtctggttcaagtgcttgtttagatgtgtttgccttatcctgtgctctgccattgaatcctgcttttttaatttttgttttgttttgatttgttttcacactggaaaagtatgaaaattctctgaaacaaactgtctcaaagaaaatccttctgcatagtataaaaagtgtggaggactgctgtctgacaaatatgtatccaaatcctagagactaagtttatttttaataatttaataatatatacttctcaaggcttttttgctttgttgtgctttttttttttttaagatggaatctcgcccaggctggaatacagtggcacaatcttgtctcactgcaacctctgcccccgatcctgggttcaagcaattctcctgcctcagcctccttagtaagctgggattacaggcgtgtgctaccacacctggctaatttctatatttttagtagagacgaggttttgccatgttggccagkctggtcttgaactcctgacctcaagcgatcggcctgcctcagcctcccaaagtgctgggattacaggcgtgagccaccgtgcctggtccctctcaaggtattttgaggatgaaattaatatgtgcaaatgtggtttaagtgcaagctgacagtatttagtttgcttccttccttgccaattttctttaaaaaattaaataatcacaaaaacctataactactcaaatcattcttgaatgtgtaacttgaatctggctggtgaaaaggccctctttacctactagccaataaatgtcttttgttgcatacttcatctgtgcttaataaacagtttcttttttttcctcctagtttagtagtattcaactctgcctgtaccttagaatcacctggatagcttttttaagttttttaatttttttttaagagacaagatctcactctgtcacccaggctagaatacagtggtgtgatcatagctcactgcaactttaaattgctgggctcaagtgatccctccgcctcagcatcctgaataactgatactgcaggtgcgcgctatccagctaattttttattttttgtagagataatggtcttcctatgttacccagcctggtcttaaactccctggcctaaagcagttgtccctccttggcctcccaaagcacggggattacagatgtgagccactgcacctggtctggatagcttttaataatctccatgccccggcctcaactcagactattaaaccagaatcattgtggatgagaccctggcatctgtatttttagaaactccttaagaaaccatagtcaactttggaaccaatgttctagactctactagaatagagtgtagaaaatttggttcccataaatgcagcaacattttttgtgttggattatattttatatttatgtattttttctatataaatcttaagaatttaaaacacaaaaatgtctcagaagcatctatgtatatgcctatctacaggcctttttactatttggatgagaatttaaggtacaaatatttccctagagctgtactgtcaaatgtagtttccctggccatatatggtatgtaaatttatattttaattaattaaaattagatacaatttaaaattctgcttattacaactagccatattttaagtgctcaggagccacttgcagctactagctactgtagcaaacagctcagatatagaacatttcctcatcacagaaagtcctgtactgcttagaggttttgaaatttgtgtatgtttcttatcatctgaaatggcatatatataattcctgttatttccttcagatttataatttaaaaatatattgtgttattttttaaagttactttttttaaagtcaggagaaataccacattttttatacatttcctctttcctcagtcttttgtacctagttaaaggtttttcttttcaaagttaactgagaagaggaaatttagtgtccttgtttttattacttatatcagtatgctctaaacctaactaatggcttaattgcccttgtgtactgcaagtttcaggtctggaaatgtgatgtcccaaaatactgaaaatagtcatcatttcaacacaaatgttaggatttgattaaaagttttcctttttgctaaagatcctttttcttttgcatacagaaattctgagttatcaaatgatgtgattgagctttcaacagaaaactgttttattagttttaacatgagcataaaggtgtgagagaaaatttttttcttataggggaaggcatttccttgaaaaaaatgagattcctaaagaattcccaatgtttggaagctaagactgtgtcatcaaacttaatggtatttgccacttggtaactactgatgcacagcttacaagaaactgctgtgtggttcatcctatamcccctccttacacacctagaaaagatgtttcctaatcaaagttttattggtttagtatgctctgagtagagtaggaacaataattaatttcaattaaaaatattccttcttggtagatggtattttttttttttacataaccacttttttttttttttttttttttttacctattctgatcaggtagatttgcctacagaacactgggagttatattgttgaaagaatgcttgatggaatgttttgtgtacgatatcagtttcatgttttaatgcttccccacttagttgtaatagagtctgtggaacaaaaatgaaacattcttgttgaacttaaggttagaatgattatataacctgagattgtgttaaagatattcaaagttgtgttctgttttgttttttgaggaaagatacagcctgggaattttaaaaacttcttttagcactatttaagtatttttgcttcttctaaaaaagtgtaattttaaaaataaacatttaaattatttaggggatgattattttaggtcttagtgtagttaaatatttcttctggaacatataatgtaattcagtttttgaagcaaaaataattagtattttagaacagaagtttcagtttttaatgataaattcccttgtcagtgtcttttatatttctgactttagctgagatgtaatttcatgaaattatttgaacaccatattgattaaattcattctttacacaatctgttctaattttattttgatgctgatttctctgcctggttcaaggaatgagcttaaagcaatgtataacatatgtgaattttctagtactctatgaaaatttaccaagactgaaatgtatttttgtagctgtacttcatgaaagctgggacaggtggtttaaaacaaaaacctaaaaattaaataaaaaatcactatgataatataatagaaactttagtttgggaatgttcggttatcaaatctacaccagataaaactattgtagctataccatttacttgagttccattggagcttaaattctggcactgccttaagtagtatagaaatgaaaaacaggatatgtgttattacatagtacccagagatactgtaacttcagttataatttaacatattcccctatgttcacagtttgtggcatataattcttagagttacagtgaaaaatttagaatatattattctctaatattaaaacttaatatttaatagaaatttccttcaatttttgaacaaaagaaaatattttaatatggttacataatatatcacactgattgtgtgaagaccaaattgagctctgtttttaaggtaagatttcacctgaatctttttcaggtttatgttagtacatcaaactttctaacttcaaagggattttaagattgtattgagatactaacattcaattgaaaaaatgaatactgctgttcttccaccgcggggatacttaagaatcactgtctgtgagccacaatgtttgaggayttttctagatgaatctgtaatgataaatctgggcttatccaacatttgtatacctagttccctttttaattgttccttattcattgattcctattctttgccagacactctactaggcactggtggtgcatagagaagacacatttccaagacaggcaacttaggggaatagtctgaggccacatagctttaatcatctgagttcatgctgaataaatcaatctattggcaggatgtattgtacagagtggctgtgaagataatattaaataacatgtaaattgccttgtaaaacttagcaaacatgtgggtacctatctgaatatatatacaggtgatttgtttttagatgttgctgtgcatggtgttgaccactcctgtttgatttagagaaacagtatagtatggtatttaaagcatagactaggagccagaatgcctgggttttgatctgactctatggtttacaagctctgtgaccttgcccaagttacttaaccttgctgtactttattttcctcatcttcaaaatgaggatgataaccaagcctactttatgggattgttgtgagaaccaaatgagttaatacatgaaaagcacttagaatagtgcttaatacatactatgtgtttaataaatattagctattattatttttagtatacttatatttgatttataacagtttttttaacacggtacaggtaatatatgaacttaaatatggtttcttgtttcaaagtttataggcctactttgttccttgggccacatgttccttccagtcatcgcttgggcttgttgatacatgtgatgtgtgccagatttttacacacttactagaacttgtgaaatgaatgtcatccttttcaaactactataattatttttctgattttttttttttttttgagacaaggtctcagtcactcaggctggagtgtagtgacccaatcacaggttactgcagcacttcaacctcccatgctcaactgatcctcctacttcagccccgcaaagcacttggattacaggcacctgctgccacacacacctggctaattttatttgtatttatttgtagaaatggggtctccttatgttgcgcaggctggtctcaaactactggactcaagcgatcctcctgcctcagcctcttaaggtgttgggattacaggatgagctgccatgcctggcctcaaactactcatgtttagaacactgtatttcctgtttaggaatcacttttaggacatatggcatattgttttaaacatcctttttggtggtatatctcttctttgagagtaggtttgatttaattaaataatatattttttcatgttttagaaaggtgagtgataagaagtataatttgaattaaaatgaaaaatggagtataaagtaaaatgaatattttaaaaatatctaaacataattagaaaagaagattccaaaaatatttttgataacttgtccttgtttacccttctgaagtgtctatttagaaaggtgacactgtcagatatataaattgtagtttgttaaaatgtacatgttcacagtctcacacagaattattacttaatatttgtgaatcttatgttgctatgcttctgaggctaagtactgtgtaatataacctaaaattctttagaaagtgtttgtggtcacatttcctagctgatattgtgcatgcttttaatagcttttctgttaaaaattatttggtatttctcacagaactttaaatatgctctaatgtatgttatgaattccaaagatgatatggtatgtataatttttcatttattaactacagaattcataacacatctcttagcatctcttatacccagttcccttttttaactatataaaatgagtcattacattatatgttttacatgtcattttgtcttcacagctattctctgcaatatatcctgccaataaattgatttattcagcatgaactcagataattagcatcactcagatgatgctaataaagtacctcgacctagtggatatttaagaaactggatttactcttcagggagactagttcatggccattaagatcatttggtacttttgtgctttgcattgtttgacatttaattatttgtaataatatgattaatttatataattaaaaaatcaatatttgacccactattgaaatactaaattgagttattgttaaccttttaacaagacaaaattaatgtctacttatattcattcttaagtgtttagcttttgtgaaaactgaattcaggtagtgttatgacttgtttattcatgttcagacctaaattaggaagcacagtataatagaaagagcaaacacattgaatttgggtagtcctcggtttgagttttagctcttttagtaattagaatgactttggataaatttaatctatttctgatctgtaaaatgcaaataataatatatatctcaaaaggttttgtaagctttattcctgaattatacacatataaaatgattgggcatagcctactgattctgtttacaggaattgtttacctttacttccctcttcaattgtgttactgagagaaatagtaacctaataaatctgattaataatgctgagataaaagcatctctttatcactcagattttagcctctttagtttacattggtttgattaggccactgctattgctttggttatcagattgttttatatgtaagatctttttaggtacagtagctacatataagctactttaagactaaaatggttgacattttaaaggaaacaaaataggtaaatccgccatgtccccttgaatatgtgaaaaatacagaaattgatagaaaaaaataccacagcattattcgaccatttaaaaaatagcaacaattagaaatgttttataaatacatttatttttttaatatcctttgtttcttgtgtaaactaattatactactgtaacatatttgaccactctatgttcagaattattttccgtattttgagaaatattgaaaaataaaagtggttgctaccaaaaaacttaaaatcttgcttgaaacacacagagaaaagacaggaagccattatatattgtaaaataatgattaactgcaatgaaagctttaaggaagaaagtgtggtctgatttaatcaggattcacttggggagtagagtgtgagctgagtcttgaagacattaaatgtctgtagatgggaatggtatgtcatggagtaaaacaaaagataagagtaagtgaattcatgagggaagtgtttacaaagaaatgctgaagatgacctgtcaaagtgagaaaaggatgaggacagagaagggagtgcctaagaaactaggaaaatgttatgttaaagaaagtgccttaggagagtggagggtaaaggaccaatagttccagatgccacagggagccaaagagagaaggctaaagaaaagtagaacattgtgatcagttgaatattgcagggatagaaaggaaattgaaatgggggatgatatttggtttcaaaacagatgaaagttggatgatctgatctatgaggattcatagggtcagaacatttttcctttttaagatcaaaggtggtgaaagaacagattgattctgtgagattaagagatttaaaatggcagagtgagaaagaatcatctccttttatgaggattgtctggatggtaaagaatgagtcctaggtagaggtattcattttagtcagggggaaacaactttttcctgtaagattgaaggaaaggctacaaagatagatgtgggcctattgatgaatagaaataaaaataagattttatagataatttacacttaatgatagtatcttcagaaagtgctgtcataggaggcaagattatctcttggcatataaaatctaaaaataagattttatagataatttacacttagtgatagtatcttcagaaagtgctgtcataggaggcaagattatctcaggcattatttgggtagtggtgaaaataaagagatataggtaaagttgggaatcattactgttgggaaagtaatgagaggttgttaaaggatttatagaggctttgtgagtttgaagttgaataagttgaacagtgatggcctcagtccacatttgcagaaaacgaagagtaaagtgaaagaaattattacagtctataatggtcaagtaaaatatggggcttgtagtaatgaggaaatcccactgaggctgggaggattgggtgaaatggaaagtgatttttttagtagtttctaaatttgctcaataagccaactattgattgaattaaagatatttatcattttcctctatctgccacttttttagaacaagcgccaacaaaggatcttgatcctaaaacaagtatatgatgtttgtttaattgaatatgctgtgtggattagttactgcttggttcacttaatctgggattggggctgtatttaaaatgagccacctacactatacacttagaaaaaaactgtttaaatcaaaatcttactcattttttaatattctgctatagtagttggttttatatttgccccagtgtgactttactgttagtctttatgcttatttattgtgataatcactaggattcataatttaaaattaattgtaagtgctttccacaaattgttttgactactgtctaaagaaatagaaatgaatgaatgaaataatgaaaataattctattctcctcttacaaattagcattatacttggcaggtatctattcctaaaaagtttctaaatgaatcgcatctttccatctgaaaatcagataaatgttttatttggcgtaccgtcaagtgcaatgcaattcaataaataggtttagtattttacccactcaagactagatttttttcttaattcttgaaataacataatgaaactccttgactctacaaatacctagttgattgcataaagtcacctagttgcttgttaaataacagcaaaattcagtatagacctctaaaagtactattttagctagccatatcatctgaaggattgtcattgccttgattaataactgtccataatggtggccagtacattttctgctgctttttgtattgccacatagttctaagaaaaataactcaagaggaaataatgttattccagctgataaattaatcctggagcacttagcattcttttaaattcattaaacctcttaatcatataaaataagacttaaaaatttgattctgtctcaagataaaaattataattgtatgtgctataaacagcaaaattcatgtttatgattcctttaaaactgttaatcttttttttaaaaaaagtctttaaatacccttactaccctaatgagggatatcataaagatttttatatatccatctacattttacaacctttttatactacatgaaaatattttaaaagatatctatgatgtctataaataggattctatgccattataatctgtagattacaccattaatatatacgtgtatgcttatattgtctttcacatcatctaaatgaacactgaaaatgactccaatgataaggtactatttgaatattattgtgtgctaggcactcttttaagaaattgagacgtagtatattatttatctttacagtcctgttgaggtacacgcaatcctgtgaagtaaatgctgttattcttattttacagatgagaaaactgaggcttagagaggcttaatgagtggtagtggagtacacacttgaatccaagcctgtcctactccagtcagctatcataactgtaacttctcatatcagtagtgtcttttgacatgagcagtattaaggtggggcaaaaaatcgcctcaatttccctagaaaagatgaaagagaccttggcagtctaatttggcatctaaattcatgagtttttttatgagcttttaaaacagttcttgcaatgatatattttccttttagcttttcttttttcaaggtcttcctctactaacttgtcacttttgggcttcacagygccgagttcctataaaactgttgagtaaagtaaagataatgaagtgcccttttgaaaatcttttaacaatgtttagatgctcatcacagcattatttgtagtaatataaaattggaaacaaatagcttagaaaagaggaatgatttattctaaatccttacaatagaattttgtggtcatcaaaaattagattgataaggagctttttgtaacatggaaatatgttaaatagataaaaggtaaaacctggcaaataaagcatgatcataactattgtttttgtgttgccttattttttaataaaaactttcatttaaaaaggccagaaaaaaatagtgagggacattataaagatttgtatagggagaaccaacctattttaggagtagagagattcgaytgtgaagaattcactatgtatagaatctggtttgttaagttgaggaacaaattatgatattttgcccgaagatttttttcttctaaatatggaggaagcttactgattctaatgctttatgttattctagccaattcttggaagatttacttgaggctctgttgctgctttacaaagatgactagaaatgatagtacatgcttataaaattaggctgggttgctgctttacaaagatgattaggtaattataatgatagtacatgcttataaaatatactgtttaataaaaatttaattcctcaaaataactttatggtaaatactactgttatcttcctttttatagataatggaaactgaggtgcacttagattaattaaaatctgcccaaatatagatggtaagtgggagagccagcattttgcatctaggcaatctggttccgaagcctgtgtgcctaaacactatgcactaggtattttaatagtgaaaatcatttataacttttagttcagagttggaaataattatcttattaaggtatggccattgagaatagtttatgaccaagtcttcattacatacttagtacgtttaaaaatcatcctttggtttggttgatggcagttatttacagagccccaaactgttgttgactgctaacaaagtttcttttcttctcctttgaattgactctttcagtagggctggatgctttgtatgtggtgatgtaaaaagtgtctgaggagaactacaaaagtttctaaattttagtttatcacatggttttagaattcattcacaattggttgccatttgctcttagttggagaagtggactttgtagcttagagttctttgagacataaaattgaaatcactattaatcctttccctcaactggctgtcttcacatctatttttttcttacgagtcatgtactgttatccctatgaaaatagtttagatgatcatgtaattcttttattaagtaaacagttttgttatcctctgaagaggatgagttatgcagactttagttatagcagataaagtttattattaagtatcttattttatagaataggtaaaacttgtatttatataaggttgaaaatgtacaaagattgaaaagtaagtcatctttgttttgcctccaagtccccttcctggggtgcttttctgtatccttcattttcagtaatgtcaccgaagccaggaggagacataatgttgcactaaactggtgttttagtcttcctcagtgtgaaactttgtatgtaccctcgtagtatgctaaaagctcttggcttttgaaaagaatttatacaaataaagtattcatcttttatatattaaatagcataacttattttttctgcttttcttttttttcctcagattacctcattagtcaaacatgtttcacacttttaacctgttaatccctttcttttgttagcacttagatatcagttagtcgtaaaagcaaacgtggatgtcttagcagtactaattttatggttttgtttaagttgaaaattttcttttaattgaggttgacaaatattgggtacaaccgaagttgtacttcgggggacttagatctatttcagttatcttatagagcattggtgtgcaaagaagctagatacatagaaatttttaaaaacatgtttgtttttctagttttctttccttggcttaagtatgaatactaagactaaatatggagttagtcttattatgtacctaaagtttagattcaacatggtgaaaccccatctctactaaaaatacaaaaattggccgggtgtggtggcacgctcctgtagtcccagctacttgggaggctgaggcaggagaatcgcttgaacccaggaggcagaggttgcggtgagccaagatcacaccactgcactccagccagacgacagcaaaactccatctcaaaaataaaataaaataaaataaagattttggaatacttcctgcagccccagtaatctgtagtttaaaaatgtgccccaaagacagcttcctactattggtagaaaataagaactctttcaaagtatctttctaggaatctatctcccctttagagaaattagaaattttggtcatgcttttatgcagttattctcaaagtcaaaaaatgttagtttgttagaatattattatacatagcctaaatcaagtgtcactagcctaaatgcctgcaggggcaaaaaaggggccagggcagttaagtgaggaggaagacaataatgagtgatgaaaactgtagtgaactaaagagctcagactagataaagtgggaagctactatccaccttgagtgctgccacatctcctatttttccctccaatttttatatgaaatctccctaatttgtgaagtcttctaatttgtaaacgttggaatgcaaatttacacttttgcaaatgtggtgtaggctgttgtcctataggccaaacaaaacatgtcagcaggccaaataaagcccatgggccaccagtatggagtttatgccctagattatcttaacagccttacacttgcatgaacttgcctattctgttttgatacttattaagagataatggtattaataatgattccagctgtctgttttgattaatattttaccttagcatattaatgaagtaaataattggattttttgtgtaggaagagagagcaaaagactagttcctaaaatgtatagaagatgatgtcttatgtgtaaatatatgacttgatttccattatttttcttagaaaaattttattctgatcccctttcattgtcaagttctgctattcttcctttttcctactttcacattcagtatctccctgcttctcccacgattattattttcatttgcaagagttataaaataaaaatcctcttgtacaaactctgtagaaagtcaatcactttgtgatttatttacctgcacaaacttccagacattcttccccatagcattacaattccttacttagtcttaatattacttcttttaaaattgctttttaagcagaatggactgcctttaaggcagttagtgaaaaggcccacagaaaacaatctagaggggtgatctcataaccatgtaagatttgaccctactctatcagggatgattgaactgggatgccatttacagtggttcagtacagagaaataagcataagttagtgaaacttgtagctaagatggaataacagggataagatttacccacctgcctgcaaaaaactaaaatagggacaaaatatgtgaaacaacaattttcaggacactgtacatcgggtaataaaggacagtgatccgtgagagatggaaacaagataagccttatcactacctctacttactaccttgagagagtttccaggctgcggcatatggtgggagaaaccagatggagaatggtagactccctgagttcaggagatggagctgaaagtctgaggagaccaaggcagttagagttaacaggacagagtactagagaagtgagaactgcagagaaaaaaccctggagatctacagatggtcccctttgagtattcagctgagtattcaacattacatgcatgtcaggaaaggaccagaggcctgacaaggaaccacacaaaaggattcaaagaaaccgtacttgtgctcacacagggctaggaatagtgcctgttcccacaaactgggctgcaaatgctcaagatttatgaagcactgggtagagcacacagaagaatcttacgcagtagtgaggaataattagccctagactgagtactgctctggacaagtccaacaaatctttaaaataagacctgaaaagatcaaactttgaagttttcaaataatttaacttcaagcctgagcaaaactcaaaaatatttacaaatattttacacccaactagataaaatttatgatatatagcatccggtaattttcaggcacacaaagaagcaggaaaatatgatctataatgagaagataataatcataactgtctcaaaactgacacagaggttagaattagcagataaatacattaaaagttttatgtaactatttcatgtgttcaaaagttaagtaggaatatattaaacctctaaagactcaaaaatgaacagaatatctgagctgtgggaactttaagtagctcaacatatgaaatttgagtccctgaagtagaggagagagaaagcatgatagaaaaaatattggaagaaataatggctgagatttttctggatttgatgaaaactataaacccacaccttcggaatctccgtgaacacaaagcataggaaacatgaagaaaattacaccaaggcacattatattcaaactgttcaacacctctgataaagagaaaatcttagaagtagtcatagaaaaaaaagccaaagaaaaaggcaagcgagcatgtgggacagagagaggaaattgggttacgtacagaggaacaaagatgactattacagtatattacttgtcaaaaatagtgcaaacaagaagaaggcatagtgacatctttaaagtgctgaaactgtcagcctaaaatttctacccaaagaaaatatctttcaaaaacaaaggcgaaataaagtgktttttttyccccagatatacagtagctgaaagaattgataaccagcagatctgcattaccagaaatgttaaagacagttgttcaggcagtagggtaatgataccaaatggatttacacaacaaaatgaagaacactggaaatgctaactacatcaataaatgtatctgatacttttctaattattgaacttgataataggctgagaaaagtaaattggcccactttataagactctttaaagtgcagtaatgaaataataatggctaacattttgactacttactgtgggcaaggaatattaccttcagggctgatcatgtgggtaacctctgccgagcacttaccaaaattccagattcccataaggaaagcaggtgttcagcataaaccacattgtttgcacaaatagtttagacacacagtgtgccacttttaagagtttggggagtagtggcctggtgcggtggctcacgcctgtaatcctaacactttgggaggccgaggcgggcagatcacgaagtcaggagatcgacatcatcctggctaacacagtgaaacccgtgtctactaaaaatacgaaaagttagccgggcgtggtgacgggcgcctgtaatcccagctactagagaggctgaggcaggggaatggcatgaacccgggaggcggcgcttgcagtgagccaagattgtgccactgcactccagcctgggcgacaaggtgagactccgtctcaaaaaaaaaaaaaaaaaagagtttggggagtagtgagaaccctcctgaaatcaaagttctcagatgccagctaaaggtcaaccttgcgagcaagcctgctatgttaattcttttttgcatcgctagacaaagaataaagacatttcccctcatttatctttttgttaggaaggaaaatctttcctggtttctctctcactacattctgtctcagtaccattagctaggatgggttgcttatatcctcactgcagtgagactgggaagttaaatacctagaatttctgatctctgtattggaagacagattgtgcaacagggagtaagggcagtggaaatggaagaagaatatctgttaagagttgtgtatttttctaactcataattgtcaatcctattgtttttaagggtaaggggctcagagatacatagctaggaaaaataagcaccatggcatttactttttatataaaatacaatcgaatttattagcaactttttcagtatatagggtagttttgttgtaatatacaagacggatttctagacaaagtgtttaagacaaaatctgtgtcagtaaactgaacagaaaaacaacccaaaattacccccatttataaacagaacaaaataaccccactctaaattactctgtttgatttattagtttaaatgaattgtttttactaaaactgtaatattgcaattttatttgcacacaaaagtttttgtcaacactattgtatggttgattttacaaattgataagatactattcttcaaaaaggataatcttttttttactataaaaaatttaatcatttctcagtaaagctattatttcttggtttgacttctaaaaatttcctttacttctgacagaatacttttgacatggtcaattaaacaaatagccaattcatgccaaaaaccagttggaattatcaggtaaatgtaaatgggtatttatagtgaaacaaaaaacatcaagatatatttcctgataataaggttgtgttgtcttgccatggactaaaacaaaacagtcctgtaatggaaaatgtaaagcttgcttactcgaaaatctcagtactaaaggaatgctaccaattccagtaaagtattgttgattttggaaataacctctaacattagactgctaagatgtagatttaggtttaagaaagctgaaatgccctttgtaaacctcagacctaaaaattatacttggtttttgaattaagaaaaaaacctggttgtattataattgtactgattacctaagatgtaattactaattgaagtagggggttgtcatctagattctgattattaactaacaagtttgaatctgctactgaactacatgtctagtcctagcatatattatagtacacaatttgtttttagcagatttttcaagttcctaggaattaatggacctattagttgtaggttttaagagtaaatctctcacggtctattgattggaaccaaggatttatcgtgttttgttagtccaagtgaaatgttagaagatggcatatgctattgcattgattttgttttctgttagccgaatacttttaagaatgactttctaataatgcagatacagaaattacatagtgactatgctaataaaacctgacaagtcatttttaagttgaaccataaagatggtcaaatattattagtttcatatggttcaatctgatacttacatgactgtatttctgcaagcacaggtacatagtgttcttaattattcagtagaatatttgtgtgttaattctgttttgatcctcattttcattccctactgtctgtcaaccctgaaagttattacttgtaacaagcaggaagcaacttgttagaaaataacatatattaatttgcgttcattatagcattttacagacaatatagtgttagacttggaaaacatgttagaggtcctctgaggccaccccagtcacctaatataggaaaatccctatgacatcctctccagatggttatttccctctgcttaaccacttaaggacattatctcaagagtttttctatattattagaaggtacatatatgatactgaaaactacccaattttaactcattggtctcagttctgcattctgttaggaataccataaaaagactacttcttccagatggcaaatgttttaacattaaaagatagacatcatatctcctactctcttccccaatggaaacagttccagctatttctaagtcataggctcaaaacttaggatttaaagaactttaaggagtattccagcagtaatctgatttacagggtctaagctactttcaatttgaattccctacattgtctgatgcagtgccttgtaaataatgagcactgaataaatatttcttatgtgactgtaagactgagagagggtaaatgagatttgagtttattgtcattcagtaaatatttattgagaatctgttgtgtactagcagttgtcctagacatttagggatacaccagttaacaaaagagacaaaatctctgtcctcattagttttacattttgttgtcaaatacattcaataaagattaattctataatataaagtgttataaatgtcatgaagtgttatgtaattggataatggtatgagagagtgagggagtgggtgatgctggtattttagattgaggtggtcaaggaaggcctcatagagatgttacctcatagagatgaggtaagaattgatcaatgaactgaatgaagtgaggcagctcagacgtggatatttcagacaggagttgatatagtttagatgtttgtccctgcccaaatctcatcctgacatgtaatccccaatgttagaggtggggcctggttgggaggtatttagatcgtggggccatggggggtgggtgggcagatttctcatgaatggcttgggtcatccccttggtgataagtgagctcttgctctgggttcatacgaggtcaggttgtttaaaagtatrtgacacctccccacccactctttctctcccttgctcctgctttcaccatgtgatgtgcctactcccccttctccttctaagcttcctgagatctccccagaagccttccaatgccatgctttctataaagcctacagaaccatgagtcaattaaacctcttttctttatgaattacctagcctcagatatttctttacagcaatgcaagaacagcctaatacaggagtgttctagacaaatgcaagggcttaattaagagtcaccaagactggagttgagtgtgtcaggactgaaggggagagcgtgaatagttgagatgagatagtttgaggaaaaaatcttgtagggagctgtgagcttgagtaggaatttaaaatttttattctaagtgtgatgggaagccacgaagcattggaattacatgattagacctatattgaagagtcactagtgagaatagactactgagggacaagagaggaagcaaagcaacctgttataaccctattttcataattttctagggctttactatctaatgtggtagccacaagttccctgtggccatttaaatttacattaattaaaattaaataaaaattaaaaattcaattcgtctgttgcactgaccagatttttcaagttatatgtctacagacggtcctcgacttaggagggttcaacttaatgatttttttactttacgatggtgcaaaaacagtaggcattgaattgaaacagtacttggaattttgaatttttatttttatttttttacttttttaaattatattttaagttttagggtacatgtgcacaatgtgcaggtttgttacacatgtacacatgtaccatgttggtatgctgcacccattaactcrtcatttagcattaggtatatctcctaatgctatccctcccccttccccttccagcatctgttgtttcctgactttttaatgatcgccattctaactggtgtgagatggtatctcattgtggttttgatttgcatttctctgatggccagtgatgatgagcattttttcatgtgtcttttggctgcatacatgtcttcttttgagaagtgtctgttgatatccttcacccactttttgatggggttttttttcttgtaaatttgtttgaattctttgtagattctggatattagccctttgtcagatgagtagattgcaaaaattttctcccattctgtaggttgcctgttcactctgatggtagtttcttttgctgtgcagaagctctttagtttaattagatcccatttgtcaattttggcttttgttgccattgcttttggtgttttagacatgaagtccttgcccatgcctatgtcctgaatggtaataccaagggttttcttctagggtttttatggttttaggtctaacgtttaaatctttaatccatcttgaattaatttttgtataaggtgtaaggaagggatccagtttcagctttctacatatggctagccagttttcccagcaccatttattaaatagggaatcgtttccccatttcttgtttttgtcaggtttgtcaaagatcagatagttgtagatatgtggcattatttctgagggctctgttctgttccattgttctgtatctctcttttggtaccagtaccatgctgttttggttactgtagtcttgtagtatagtttgaagtcaggtagcgtgatgcctccagctttgttcttttggcttaggattgacttggcgatgtgggctcttttttggttccatatgaactttaaagtagttttttcctattctgtgaagaaagtcattggtagcttgatggggatggcattgaatctataaattaccttgggcattatggccattttcacaatattgattcttcctacccatgagcatagactgttcttccatttgtttgtatcctcttttatttcattgggcagtggtttgtagttctccttgaagaggtccttcacatcccttgtaagttggattcctaagtattttattctctttgaagcaattttgaatgggagttcacttatgatttggctctctgtttgtctgttattgatgtataagaatacttgtgatttttgtacattgattttgtatcctgagactttgctgaagttgcttatcagcttaaggagattttgggctgagacaatggggttttctaggtatacaatcatgtcgtctgcaaacagggacaatttgacttcctcttttcctaattgaataccctttatttccttctcctgcctgattgcccctggccagaacttccaacagtacgttgaataggagtggtgagagagtgcatccctgtcttgtgccagttttcaaagggaatgcttccagtttttgcccattcagtatgatactgactgtgggtttgatacgcagttggacactctctcacaatgccaatcagtggcagagagctacagctcccagtcagccacgcgatcacaagggtaaacaactgacacggtagcctacagtgtactgtattcaaccttatgtatggtgttcagaaggttaggtatattaatcaggagtagaaacaaatttgattctagagaaaataaatggaagagtaagcccaaataacttctcaaatcacagatgaaacattatacatctatgtatattccagtaattacaacaatttcaacttaatatttggacattgtcaaaaattctactcaaattgctccattctaaaaatgattttgatattaccaatttccattttgaaatattttatacatttcagtttttaaaaaatctaatttttatatctaagcagtgacatgagattttatcctgaatctttccaaatcttcaggcctttcatttcttaggagaagtggaaaaggcagtggagggagggaagagtccagatttcaactcctgtcaccataccacatttctatatttctaaatgttttctctaacatctctgattattacatttggcttaaggtagagcttttctaagagtagtaatatggtaagagaggtaatttctgcagctaaatttcagaaaatcaaatcctgcaataagcaagttcctttctttttcttttttctttttttttttcccccaatacttgtctccatgatgaggtcatggagagagtcccattctggtgctagtttgtttgtttgacttgctaatctccctttttaacaaatagagacatgtcccaagcttggagtgttgctgcacaggcaggccacactcttgtggctcatattcaataacattattgtgttctcatgtatggattgatagtgacttttgtacttaccttctatttatggaacattttactggttttccatttaagaacataatattgacctaagatttgctttttaaataaattcaaatgtaaaaatgagacatttaaaaaatattaaataaggacatttgggtatggtaagattataaggggaggaaataaatcttaaataaattttattattgttaattattattatttttgagacaagttcttgctctgttgcccgggctggagtgcagtggcacaggcccggttcactgcagccttgacttccccagctcaagcaatcctcccaccacagcctcccaggtagctgggaccacaggcacacaccaccatagccagctaatttttgtatttttttagagatggggtttcaccatgttgtccaggctggactcctgagctcaagcagtttgtccactctggtctccccaaagtgctgggattataggtatgagcactgcacccgcagaaattttattcttaagaaaaaataggtgacttagcaagatgattcattaatgcagtacacatatgggttatttgtaaaggagaatagagcaaaaacattctaggacctctttctccaagtttcatgacctagaactgtactagaacatcatgtctaaatagccaacattactgatataatgaaatttaaatgctacactgcaattaaatttaattttcaaattctatcacaaaatgtacttatttgtgtatagtttacattttctaacttaacaaaggaaataatatttctaccaagtgctcttccctaaatcagtgcattactatctctttctagcaggtctaatttcgggctagctagctttacctctgggaattatagaagtgattttagaaataaatgtcaaataacgattattcctgctgtttccctcttattagccaagtgtttaatagacatagctaaagatttttatctttttgtttaggtatctgttgtcgcaagaagactcactctgctatttttatctagaagcacyccgtttctccctaaaacacagatttatgacttaattctctttcatgtaggacacctgttacctctatttggatcttgtgcttccagtttctcactcgtttaatgaattctgtacacttagaaggcacacaaagcctgggctggggtacacgtggggatcacactgcaggctgtgaatgtagacaaaaatcctttgttgtgggtgtgatcactttaacaattagtgcatcaaaatctcttgtattcacaataagcaattgcatatttaaaaattttttatctccatttaaagatgtagccctcatgtatttagactttaccgtataaattttaattaagttcagttccactctcaagtccctagaattatggcaaaatgctttcaaagatagccgactttcttatagagttaaccagcctttttagtgaaatatgtgtccacaatctctcatctgcaattcaaaatccaaaaatgtctgaaaaagcaagtgtttttttttaactcatttgaatgcaaaactgtacttgagcttttttggtggcaaaacctgactgaactgacatgaagctatttacagtttttatttatcccacttagtgtaaatattcatcagtttactgcagaaatgttgatgtgttagattactgggtgttgccccagacctttgctggggatgtttcagaatatagagtaaagcactgcattacttttttaaacataacatagctggtccagagtttgtcataagtagttgggaacccgtgtgtagataagaatatgcataagagataaagtgaggctagatatttttcttttttttcttattcttttccttttttgtcagtcatgttcttctttgtctcttccttttgctccctctctcctcatcctccctcctaataaaagtcagtagcaataacccaataagcagtatcaaatgtgtcgagttctgtccttaatacattttaaatgaccttaataagatatatagttcactgtttataatagaatccataacagacagaaccttaaataaacattattctttgctaaaaacttctctgctttgtttctccaaaaggtcatttgagttatcattacaaccccctgtgttttcttccttctgaattgcacactgagtaattaccacacaaattagtaaaattctgttacatttatcttcagactgatagaatatggagaataagaccattgcccttattttgtgctctgtaaatcagtgtgaacataaattatcaattttactttttatcatttactgtagcttagatttttctgctaatttaataaaggctaattctttaaaaacatactgtagttttgagagagataattacagaatacgagcttatggagagtctttggtaataactaagtacataaagccccttttaatgtatgttaacgaagggtagtaaaactttacctatttgctgtgaatttacttcatttgtttctaatgatgggactctaggtcttaaaatgaaaggaaaaaagttgaactttaaaaatataaccaataacgaagggattactgttttagattaaaagagatatacagtgtatagaccttgtttgaatcctcatttcaacaaatgctatttaaaagccaaacctattctgagataatcagggctctctagaagaggtggttttggggcaaagccacttagtcttcttttcttgttagtcttcatctctctgtccttggatgtctcttctatctgtgtgtactactttagagtctcatgaaatttcagggctttaaaatacaatctatatgttgactattctaaatgtttatgcccaccgcatatattcagttacctacttagcatcttcacttgaatgtctaatcagcattgcaaacataacatacaaaatcaaactctgaaactttccctccaaaccaactcctttcacaggcttcctgtcttagttaatggtaactccctcctgccaatttcttagggcaaagagcatcaatatcaacaaaaacttttggcccttccttcaagatatttccagaatctgatcacttcccacctgtcccacagctaccagtttgggagctcaatgtctcaatgtttttatgttgagaaccagggaagctgatggtgtaactcattcagaggctgaaaacctcccgggggtctgctggtgtaagtcatggagtctaaagacaggcaggtatgcagttctgatgtccaaggcagtggaagaaaagtttgttccagttctcagagagagaccagttcaccttctgtgtgtgtcctatccaggcccctgactaattggatggtgcctgccaatattgagggaagattttctctacccactccactcagactcacatactaatctctggaaaccccctcacagacacacccaaaataatgctttaccaggtttctagatattccttaatccaattaagctgacacctaaaattaaatccacaagtctactccttgtcaacttggcattcatatgcatctcctcaaaccataactcatttccaaataaagacaataaccaggcaatagtttcacctaacacgatgcaactatcctgtgattgtgattttcagaattttagactttagggattttgatcttttgagatttcaacatttgggattatgactttcaggattctgtcttttggaattatgatccaaattctttactttctgcccagaatgttctttcctatgtatatgcacatctcactctctcacctcctttagaactttgctcaaatgacaaactctcagtgagggcttccttgattgttatattttaaatgtctactttctgactttcctgctattccctaggcctccttcttagttattttcctccatcacatttattaccatacgatattctagttattgtacttatttattgtctgtcttctccataggaccagttatttttgtctagtttattcactcttatctcctcagtacttaaaacagtgcctggctcatagtaaataataaatatttgttaattgattgaataaaaacctagcacctatcaatgcatagcacataatagttgtaacaaatatttaaataaatgaaggaattaataatctagttggtggatcgttccattcttttacaatttatttgactctcttgtagctttattttcttttttatactgcatagaccccataatccttccccacaataactcctgccacaactctcaactctctttctgcagtatcctccaagcaaatctttgacttctctctacttatttgttggttgctaaatgcaaccaagaaaaagctgaggatctgatctctggctcaagggacagccaaaaagagaatacccagggaccagtgctctcattataagatgatatatgattctatagtacctgagctctgcagctctaatagtccctttgctttgtttagttttctagttttgtagacttaaaagggcaccactcaaaatagccctttgttgaatagttagttcagttgctaaaatcaaggatgagcatggtaaggaagtattcaactagctgacctctgagtaattaggaaagtctggcattgactgctcatcttagaattgattaacatcataggagctattggaattgagggttaaagctttatccaaaagctgggtgcagtggcatgcctatagttgcagctacttgggaggctgaggcgggattgcttaaggccaagagtttgagaatgcagtgtgccatgatcatgcctgtgaatagccactgtactccaatctggttaacatagtcagaacctgactctaaaaagcaacaaaaaagctttatccaaaaatgcaatggttctttaacattattgtgtatgggacctacctggggagctacagattcctgaatacacagtgaaagccattctttgagggtatatataagcacatgggcaggtatatgaagcatttgaaataggtcatgaggactacctcactaagccaatgaatgaggccattagacaagaagtcctccacctaacatttccatctctaaacatgaaacatgctcctttccctttgacttcagcagaccagatgaagtatcattggaaaggtaatcactctctaatctttgtgactttacctattgcttacccacctcctcctatatcttggaactttcatgatctgactggtatttaccacttagcttcatctcttgtcttctcttccccttctctggatagtctacagaatttgaatacctcctactgtttcttgtctctctcttaatacaggttatttcccctacctggaaggccttaactataacccccttatatcttctttatctaccttcttcttacttacaccctcctccctcatcccaaccttggaatcatttctaaaatcttcctttctggtctaattaaataccctttttggaatcccatggcactttgaaccattatgatatttaacacaatatatattataatcattgatttatcctctcacctgctagatatttttagtttgtttttgtttgcttatttttttgtgtgtatgtgtgtgtgtttaatgtctggtaccacaccacacctattcaacttttagtcccagactcatggtcctgaagtctaaaggcttgttggtagaattcagtccttgtgattgtaggaccttttcttcctggtcgttggctgggatacacttttggctcctagaggccacccttaggtcyttgcgatatgccccactacgtaggcagtttacaacgtgaaaggaatcttgagggcaatcgcagaatgctgcttagcacactattttttacaatgtaaaggacaaatatgaatttttacttgwtcttttgtgttttatccgtatttgtttcctttggttgctgtccagtagacattttaagtctatgtaatttaggaagatcagcagtatcctaaagcaatgatcttaacataagtctgtaggtagcgaggaaaggtgttgtagaaagacaatactcaacatcaaaattctaccattgcattgttttctgttggtaccttccagttggtgaagagaaagaacaaatgtgaaattagagatttcccccctggttttacttttctcctaagtttaaatgatgcagagagggactgaagaattccagagtttttcttcttattctttgaagctgtcctttgaaagcagggactaggcatacatgatttctatttagataagtagttgacatgaaccagaggcccagaaaggcaatttagacttgtgtttattttagtttatcttctttcacagggaaagcataatggaaaagttgacaaatactaaacattgctccaactgcaacaaaaacatttagatacatgctgtttctaccttgtggcaacatccaattaaaacttcactgagctttattcctttttctcttaaaattcctattctttcttagttttttgtaactatattaggcaataatattttttctctactacctgatctataactacttctaatggaaagaaatattaatgtattttgtattagggagatgaacccttaatcttctacacctctaatagtgcttttattagtgagagtgcaaagatgctggaactctttgcattgttggtggggatgtaaaatggtgcagctactatgaaaaacagtaatcctgaataaattaaaaatacaattaccatatgatttagcaattccacttttgggtatacagttgaaccttaagttttaggggaataaaaagttatatgtggattttcaactgcacagagggtcagttcccccaacccctacgttactcaagggtcagctgtatatccaaaataattcaaagcaggatctcaaagagatatctgcatacccatgttcatcacagcattatgtgtaatagccaagaactggaaacaaccccaaatgttctaaacaggtgaatggatacagaaaatgtggtatatacatatatggtaaaatattttgcagccttaaaaaagaaggaaatcctgtcacatgctataacatggatgaaccttgaggacattatgtgaagcaaaataagctagtcatttaggacaagtactaaatgattccactcatatgaaatatctaaaatagtcaaaatcatagaaacagaaagtacaaagttggttaccaagggcatttcagttttacaaggtaaagttccagaggtctgttcaataacgatgtgaatatatttaacactactgaactatacacttaaaaatgggttaaaatagtaaatttaacattgtatatttttaccacaataaaaaaaatgagaaaagttaacttttagaaaacaaatttaccatttattattatttcttaaaaagcaaatgttacctgaagttgtggttagtttcttctaacactaaaaacatccaggcagcttcatggaacaaagaaaaggattgctgtttcacctttgattgggtttagtttttggtttttttttttctttttaacagctttattgaggcatgtttgacatataataaactgtacatatttaaagtgtataatttgttaagttttgacatatgtatgtacctatgagatcatcaccacaatcagaataatggacatatttatgacctccaaatgtttccacatttcctcatgcccctttttaatctttcccacatgcctctccatagggcaataccatcttcaggcaaccactgatctgctttctgtaactgtaaattagtttgtattttctataattttgtataaatgtaatcatacaacatgtacacttgtttctgtcttgctttcttcatttagcataattatttcagatttatccatgttgtcacatgtatcagtaataatttttattgctgattagtattccattgtgaggatatactaagatttttttttgtccattcacctgttgatagatatttgcttgtttccagtttttagctgttacaattaaaactgctatgaacatttgtgtacaggtctttgtatggacatatgctttaatttctattgggtaagcagcttggcatggaatggctaggtcatatgttaagtgtatatttaactttttaagaaactatattaacagttttccaaagtgtgccattttacattcccactagcaacgtatgaaaattccagtttctctacatctttgtcaatacttagtatgctttgtcaacacattgtggttaatctttttaattttagatatcctcatagctatgtagtcatatctcattgttttatttttattttcctaatgactaatgatgttgagaattgtttcatgtgctcatttgccagccgtatatcttctctgatgtccattcaaatctaaaaaaaactggattgtttggttttttaattatatattctggatataagtcctttatcagttatatgatttgcagtatttttccttagtttgtggttcatttttttttttaatttttttttttattatactctaagttttagggtacatgtgcacattgtgcaggttagttacatatgtatacatgtgccatgctggtgcgctgcacccactaacgtgtcatctagcattaggtatatctcccaatgctatccctcccccctcccccgaccccaccacagtccccagagtgtgatattccccttcctgtgtccatgtgatctcattgttcaattcccacctatgagtgagaacatgcggtgtttggttttttgttcttgcgatagtttactgagaatgatggtttccaatttcatccatgtccctacaaaggacatgaactcatcattttttatggctgcatagtattccatggtgtatatgtgccacattttcttaaaccagtctatcattgttggacatttgggttggttccaagtctttgctattgtgaatagtgccgcaataaacatacgtgtgcatgtgtctttatagcagcatgatttatagtcctttgggtatatacccagtcaggacataggcgtgggcaaggacttcatgtccaaaacaccaaaagcaatggcaacaaaagccaaaattgacaaatgggatctaattaaactcaagagcttctgcacagcaaaagaaactaccatcagagygaacaggcaacctacaacatgggagaaaattttcgcaacctactcatctgacaaagggctaatatccagaatctacaatgaactcaaacaaatttacaagaaaaaaacaaacaaccccatcaaaaagtgggcgaaggacatgaacagacacttctcaaaagaagacatttatgcagccaaaaaacacatgaagaaatgctcatcatcactggccatcagagaaatgcaaatcaaaaccactatgagatatcatctcacaccagttagaatggcaatcattaaaaagtcaggaaacaacaggtgctggagaggatgtggagaaataggaacacttttacactgttggtgggactgtggttcattttttaacagttctttcttttcaaatagcaaagatgtttaattttgatgaattccagtttatcaattttgtttttctaatctgggtcatgcatttgttttcatatctacaaaaacattggctaactgaagtcaccataattttctcctaactttttaatggccttcaagaccttattgtgtgcagaaaagcttattgaaaattatttttaaatgaacattcttattacattaaaaattctaaaacctatgtcttactttttttttaatggggtcttgctctgttgcccaggctggagtggagtggtgcaattatagcattgcagtctccacctcccaggctcaagcaatcctcccatctcaacctctcaggtagctgggactacaggcacgcaccatcatgttcagctaatttttttaaaaagcattattatatatagagacgaggtatcgctgtattgcccaggcagtcttgaacccctggactcaagtgatcctctcaccttggcctcccaaagtgctgggattacaggcataagtcactgcacctggccatagttcttaagcttttaaggtcaatttaattattttttctatttatacatgcagaaaatttcaagggaccctttgagtgtataatctcattttcaaatttagtcarttaacatcccataaacactttaaactgcattcatacaattaaaagccaatttttaaagtatttcttgtatctgactgacagaaaaaaccttcccaagtacccaaataagtcttctaatgaatgaaaacttatatagtaagacttatgtatagcaagcctttaagggtctcttgtatgttccagtggcattttgtatgttttaaaatacaagcctcaaccattttctcattacactatttaaattggaatcaccatgcgaatctgttattctaactcacctatttctcctagctaagatactatatatgtacagattctttaattttaaaaaatactaatatatgggctgtgtctcaaacttttctatacttaattctgaatcttcctggatgaaaagatgcttacaattttggggttgccttctcaactcactgtggttttttaatgaccaaagatgtccttagcctggatggtgagtgaatccttgctcaaactagtggcatacacagagctcyattttatagctgctttgttcttgaaacagcatgtttctattagccctatttctttagattcaagttaaacattcctaattaatctgtctccagacaggttattttatcacttgattggatttagttaatctgtttactgttcattctgttctcaatcactggtatgtactagctgtgcgtgccacaatccttcaggattaaaatgacatctgttagaatctccttgtggctttgtctctgtgagcagttttaaggtcatgtcagtaatacctgtgttaaccaaaaacataataatgattctggttatgtgatagaattaatttttcttatttgaaatttttttccaaaaactttctagttatcatgcagcatataaccttcaagagaataaaagtaaataatatggctatgtttattgtaaaatttaacctttgtgataggttaatgtgataacgtctgttatatatctgtactcccaagttacctagtactgtgtctaaaggaaacaattgaagcaataggctttaaaaaatttttgtaactaattctgtcctcatctgttggttgacttcaagcttttttccctccattttcttttttcttttttgcattcctcttcagcttctgcatttctttcattcccttgttatcttcggagctaatgatctgaagtgctataacagtaaaataaacatgtgagagagaaagatggtgctagtaggcaatttataagctgatagctttgttgtttgttttctagaaagctgctgtaatactacattaaattctgacattgggtaattagaatgaggcagttttaaaaaaatctttaagttcttgcctagcaaagctgtaaattaaaaatattaaatctattctgatagcttgatgataactttgaaaaacaaatgttcctttctatgttttggagttctaagaagttctaaccagaaatgttcataaagatcccatattgaatatacaaaaaaagtttaaataaaaattaacacggtattgatataattcgtacccgattcaatcaagcaacagaggtataattagcaatctttgtagctagaaaaattaattgctgaaaaaattctattgtgtgagaagttacttttaaccttttcatttttttatttatagggaataattatattttaaaacccaatttatttttaaaaagtaaggaaaaacagtatcttaagatttaaaacctagtctgtctcttgtgctctctatatatacacataaatatatgtgtgtatgtatgtataaagccaacatactggttttacaatgggatacataacatatcatcataagcaacctaattttgttctccttccttttgtccttccatccttccttatatcaccagaggaagttctgcctctatataaaaacccagattcataattccctccttgccctttggtaatactaatgactacagtcacttaaactccataattaaaagtacctagtcagtatattaatcaacctttcaatgtccattcagagctaaaacttttcccttccctagctaagattatctatagatggaagacagtgtgattagcttctctttttgttgcttatctcctcacccactggcaagttgctatatctgaccccatcaggatctaaaccaggggaaggaagagagaaagcaaggcaaacagtttttgttgttgtttttcccacactcctgttgtgaaattgctttactgtttttgaacttgatatgtgtttaaggctggccctttttcttcggtgtgcttttgtgggttcttcacaatccttcactggaactacactacatgtgacactccagaatttttccctccaactagccagtaacccctaacccctctagccctcagcctagttttctttcaggccattccacagtagaaataattctaatttgaatccttcttctttctctttctcctcttctttcccttctctccttttcccctcctccccctgcgcctcctcccttcttcctttttcttggtggtggtctgggtacttcaggtggaactctgggtagaattttttaaacagcttttcgagatatacttcacatacaataaaacttaccctttaaaaaaattctttttagttttttagaaacggtctcactctgtcaaccaggctggagtacagaagcatgatcatagctcactgtaacctcagactcctgggctcaagcgagcctcccttttcagcctccttaataggtaggactacagtaggcaccaccatgcccggctgattttattttttgtagagatgagggtctccccatgttgtccaggctggttttgaacttctggcctgaagcgatcctcctaccttagcctcccaaattgctgggattacaggcttaagccactatgctcagccttcacccttataaagtgtacctttagttatttttagaatttttgtgcaaccattgccactatctaaattttaggacattttaatcctctgggtaggatttcatataggtccaagctggccctctgtgtggccgtgcttccttgcccctctcttaccctgagcagtggaagtatagctggcttctgatacagtatgtctcctcactcttgtgtgccctccctctcctgtctacctcatgttgctgcctcagagtgataggcaacacctttagattcctaaagtgtgtattaggcactgcctgatgtgccctccactaactccagagaacatatatcaaggactcccaggggtcccattaaagcttctttcactggcttgaggtgaaaggaaggcacctttccacatccctcccactttggaggagacatgaaaatcagcacacaactctcttcaaagaaattcttgttctatctttgctctactctttataccctgagtatatgcgttagagctatctaaccagttctcagacatattactttggaaatttgctacagggtagtccttcacacaagtcatgttggtatctgattgctaatattatctgatccctctgttgaaacttccaatttatcaatatttttcatgtagaagataactcacatatctttagaaaggaatgaagcttctacttttttctcttgaataaatatgctattatataataaagtcaatgagaacctagagactttggtgcaggcaggggatctaaataaataatcgcacttcttgtacaacctaagtaaaaacgcttttggcttttttaaagcagtatcttatagtttccttttaactttcacattgtgtatataagtagacaccctggaggcagactttaagcataaaatgttttagtaaacatttaaaaaggaaagtgaaaggacaagactggcctcatttatagttggaattgcttttttcagtcaggattaagtaccataaatgtaaattaaaagaaaatagtagcttgtcttgttagttgagtaaacaaagtcaacttttatctaaaacagatgtttttataggttaacttttaaactccttatttggcttcttttccaaatctgcttctcccttacagtagaaatatactatatatgttatgcttaaattggttttgtctgggtagaaatcttatgaatcactctaaagaacaattttcaagctgtgtcaatttaggaaaatttatatagaaggattttaactagttacattttcctcttttaacatgaaaataggcttattaagccccatagaaaatcttaagttttatcagtatatcatcacttaactgaacgccattggaaaaattgacctgacaaaaatttcagcacagacacttatctgatcttttattaattcaccttctgtagaatcatatatcaaagcatgttcacaagcatagccacttcccttgtcatagccacccaaaatgacatttttattgttactatcattcctgtgttacaatagggaaacagaggtttaaaggaaaagtgactctcccagggaaaatggtgagttgccaacaaagctgggtctggaaatacttaattgcatttagtgcaaaatatacagttatagtatatatattggagataatagaaatcaactaaagaatgaaagaaatgtgttccatcttattcccaacttcccctaccatggctgtaggttctcctctctatttctctctacttttatatctgggatggataggatgaaacctggaacagaaatctgaaaggccttcagttcagtctgactgctttggtttatgatctgtattttggtgcctcctagtaccctggggtctcttcctttttccgtaaagcagtcaccacccccattctccagttctgtctctgaagttgaccgtgttgggctagggcaagtggttgttttgagggtttttccctccaattcctttaccttctrtgagtttaagataacatttagattggtagccatattgagaaattaggtagacagggggcttrtagtctgtcatcactgatgtagagcttttactactgcaagtatagttaagttgctgatgcatagaccatctgttacctttgtttcccaggtaatatgcacgtgtcactagctgaggccctggaggttcggggtggaccacttcaggaggaagaaatatgggctgtattaaatcaaagtgctgaaagtctccaagaattattcagaaaaggtaagctgctgctgctgctgctgttgttgttgttgtttcagtattgggtacttaaaaaacagatacagggtcagagattagatttttgtttcattattcctgtgcctttggcagagtatgaaaggaatactttccttatctcttttagggctgaaaaagctcagctattatctacattcatttgaatatcttctatgtgcccaatattacaccaggcagcaaaagtgtaatggtgattgaaaccgaaacagttcttctcagtttagagctcacagttcaatgtggaaaatagctattaacaaaatatttgggccaggtgcggtggcttacacctctgttcccagcactttgggaggctgaggttggggtgtcacttgaggtcaggcggttgagaccagcctggtgaacatgatgaaaccccatctctactaaaaatacaaaatttagccggtgtagtggtgggcacctgtaatcccagctactcgggaggctgaggcaggagaatcacttgaatccaggaggtggaggttgcagtgagccaagattatgccactgcactccagcctgggtgacagagtgagactcctctcaaaaaataaataaatacacacacactcacacacgaacacatttgtactgtataaacaaatgtaaaaaatgcagccatgacaaaggctaaaaaggaggrattcagtgactctctgagaactcataataggaggatttgacttgatcatggcacagaaaaggaaggctctcctacacaagctaagacccaaaagaaaagttaaccaggtgagagggaggggaaaaaaatctggtagaataatatatgcatccgtgttactctaaatcagaatgatatagggtcaacaagtattttggtgtttccctgtggaggaggtcacttggtccaaatggttttgcggcattgtggagttagaaaagttagaatcatcctttggttgtccaaaaacatttgatatcatgccagaagttgcacatgaagatgttgtttgccattcatagcacctgaccaaaacttacttagaatagtaggtgaaaaaaccaagcgtcatctaaagaatcagtctctaaaattgatttgaatgcatacatcagacacaaaaaagcctgacagaaataagtaaggattgagggtagtgatagttctgaaagtgtggtaccagcaacattagcatcttttgaaaacttgttagaaatgaaggcagaaataaagatgttctttgaaaccaacgagaacaaagacacaacataccagaatctctgggacacattcaaagcagtgtgtagagggaaatttatagcactaaatgcccacaagagaaagcaggaaagatccaaaattgacaccctaacatcacaattgaaagaactagaaaagcaagaacaaatacattcaaaagctaccagaaggcaagaaataactaaaatcagagcagaactgaaggaaatagagactaaaaaaaacccttcaaaaaattaatgaatccaggagctggttttttgaaaggatcaacaaaattgatagaccgctagcaagactaataaagaaaaaaagagagaagaatcaaatagacgcaataaaaaatgataaaggggatatcaccaccgatcccacagaaatacaaactaccatcagagaatactacaaatacctctacgcaaataaactagaaaatccagaagaaatggataaattcctcgacacatacactctcccaagactaaaccaggaaaaagttgaatctctgaatagaccaataacaggatctgaaattgtggcaataatcagtagcttaccaaccaaaaagagtccaggaccagatggattcacagccgaattctaccagaggtacaaggaggaactggtaccattccttctgaaactattccaatcaacagaaaaagagggaatcctccctaactcattttatgaggccagcatcatcctgataccaaagccgggaagagacacaaccaaaaaagagaattttagaccaatatccttgatgaacattgatgcaaaaatcctcaataaaatactggcaaaccgaatccagcagcacatcaaaaagcttatccaccatgatcaagtgggcttcatccctggggtgcaaggctggttcaatatacgcaaatcaataaatgtaatccagcatataaacagaaccaaagacaaaaaccacatgattatctcaatagaggcagaaaaggcctttgacaaaattcaacaacccttcatgctaaaaactctcaataaattaggtattgatgggacatatctcaaaataataagagctatctatgacaaacccacagccaatatcatactgaatgggcaaaaactggaagcattccctttgaaaactggcacaagacagggatgccctctctcaccactcctattcaacatagtgttggaagttctggccagggcaattaggcaggagaaggaaataaagggtattcaattaggaaaagaggaagtcaaattgtccctgtttgcagacgacatgattgtatatctagaaaaccccatcgtctcagcccaaaatctccttaagctgataagcaacttcagcagtctcaggatacaaaatcaatgtacaaaaatcacaagcattcttatacaccaataacagacaaacagagagccaaatcatgagtgaactcccattcacagttgcttcaaagagaataaaatacttaggaatccaacttacaaggaacgtgaaggacctcttcaaggagaactacaaaccactgctcaaggaaataaaagaggatacaaacaaatggaagaatattccatgctcatgggtaggaagagtcaatatcgtgaaaatggccatactgcccaaggtaatttatacattcaatgccatccccatcaagctaccaatgactttcttcccagaataggaaaaaactactttaaagttcatatggaaccaaaaaagagcctgcatcgccaagtcagtcctaaaccaaaagaacaaagctggaggcatcacgctacctgacttcaaactatactacaaggctacagtaaccaaaacagcatggtactggtaccacaacagagatatagatgaatggaactgaacagagccctcagaaataatgccacatatctacaactatctgatctttgacaaacctgacaaaaacaagcaatggggaaacgattcgctatttaataagtggtgctgggaaaactggctagccatatgtagaaagctgaaactggatcccttccttacaccttatacaaaaattaattcaagatggattaaagatttaaacgttagacctaaaaccataaaaaccctagaagaaaacccttggtattaccattcaggacataggcatgggcaaggacttcatgtctaaaacaccaaaagcaatggcaacaaaagccaaaattgacaaatgggatctaattaaactaaagagcttctgcacagcaaaagaaactaccatcagggtgaacaggcaacctacagaatgggagaaaatgttcgcaacctactcatctgacaaagrgctaatatccagaatctacaatgaactcaaacaaatttacaagaaaaaaacaaccccatcaaaaagtgggcaaaggatatgaacagacacttctcaaaagaagacatttacgcagccaaaagacacatgaaaaaatgctcatcatcactggccatcagagaaatgcaaatcaaaaccacaatgagataccatctcacaccagttagaatggcaatcattaaaaagtcaggaaacaacaggtgctggagaggatgtggagaaayaggaacacttttacactgttggtgggactgtaaactagttcaaccattgtggaagtcaatgtggcgattcctcagggatctagaactagaaataccatttgacccagccatcccattactgggtatatacccaaaggactataaatcatgctgctataaagacacacgcacacatatgtttattgcggcactattcacaatagcaaagacttggaaccaagccaaatgtccaacaatgatagactggattaagaaaatgtggcacatatacaccatggaatactatgcagccataaaaaaatgatgagttcatgtcctttgtagggacatggatgaaattggaaatcatcattctcagcaaactatcgcaaggacaaaaaaccaaacaccgccatgttctctctcatagatgggaattgaacaatgagaacacatggacacaggaagggaaacatcacactctggggactgttgtggggtggggggaagggggaaggatagcattaggagatatacctaatgctaaatgacgagttaatgggtgcagcacaccagcatggcacttgtatacatatgtaactaacctgcacaatgtgcacatgtaccctaaaacttaaagtataaaaaaaaaaatgcaacagtaaaacacacattagagacctactaaataagcaactctgggggtgcagcccagcaatttgtgttttaacaagccctcaaggacattgtgatgcatgctaaagtttgagaaccatttataggatagagtttctaaagaccaggagccatgggaaccttctggaaagatgtagggataactactgattgagtacaggaaggtctagagacaggggaagagtgtttggggacagatggtaaagctttgttgtttttgttgttgttttttaattcagagacaggattgtgaaaaaacagtgttagggcccacacatcagtgctataacctttatgtttgatgatctttaattagagttaggattaatttaaagaaaatttattcatttaatctaatatcacttaaccaaaaatctgggtgttttaaataaacattatttctttgtttgcttcactttatttttcagaaaattttcagaaaattggaaagtatagacagtccagaatatacaggatgtagctatactccaaaggtgttattgaaggaaagatatgttgatggcactattcagtcaattaataattgtcaattaatatttaagaaataccttctacttgtgaggtattgtgtggaagatccaaataagtaggtgtcacttttgcccttaagggatttgttcagataaaagacacaactgcaaatttaccacttcaaaacaaagtgccaaataagtgacatagacgataagtactacagatgttcagaggagggagagagaatacctctttttattatactaatggcaggattactgcccaggccatgactcacagtatataaagcatcttgcatactgtaagtacctaagggtttttccttgtttcacatttcataatgttaatagagatcaaatgaatataaaggtgttgtcactgagaggcaattattgcataacatattggcacattataattaaaagacttaccagatgtattataaaattaattgtgaggtagctgtgtcttaaatactgtccagtaggagctggttagcataaggcctccagtctaattcacagagtattatcagtaatacagagagattgaatttggtttctttggcagtttgaagattaccaattgttatgattgctaattggaaatttctatttatttggaggaaacaaatgcttatttgatttaatttgtcagaaatttatgatttttcattctttgtatttgataacacaatatcttttttgtatatttgatcacacaatatctttttgtcccaagttcttctcctgactcttgtaacgaattgaaataattattagtttttttattttatggatgaatggtggttgtcttagttctctcttagaatccttatgcataacactgggagtggcggggggaaaatagcaggtaaagtataatggtgtccaagaagtttatgtgtttttttaaaatgctttcttgtcaatggcttttcccccttatcatcttgaacttgtacgttgttcctgtttctttttcagaatatgagtgcaagcatgctactgacattcctataagagggggctggaaataagcatttctactggggtattattgaacaaaagccaagaaaattatctgtttcttcatatttttgagcctcccagcaatcgaaggctttccatttttaaaagcaaaattgctatggttattattcataggataatgatatctaagcatggccttgttgaaagacaccatcttcaaatgaacttctcttcagaggagggaaaatgtaaaacttttgataatcatgcaattctaacatgtagatgaaggtgatgaaaggtggttccccttttggtgtaagtttcttagttttgttgccttgtggttactaaaacgtacaatctgtatgactaccctgagaaatcatgagatagtattttttgagattttcttgtgatcttacacatgatctatctttgtaaatattctgtaggcatttgaaaagaattgtactgtctattcctaggctatagcttaagctcgtgaatgtttgtgcttacaatttttttaaactttattagtctgtattcttcatctgtcaaattcctagggatagtcaaaacttcccactatgattatatttttgtctgtcttcttctgtagttacatattttcgcaattttgtgtgatacatgtgatggctaatgactaatataaatggacaagatattttattaatataaagtaagtttttttctttctacaagtcattgcaataaattctgttatctgcccttaatatggccacctttgcttcatttttgttgacacttgcctacctttcctatctctagtatagctttcctccttcctttattttcacatcctttatgctataatttaggtactttttgtgaatggtagatagctagatttttattttaacctagctaaggagttgcttttcttcaattaggaagttaattgtagttattgaaataaaagttctgggaaattttactaagaatcttcctgtgttatgatttcccagttgtatgcctttcagttcatcttttcttttcttcttcttcttcttctttttttttttttttttttttttgagatggagtctcactctgtcactcaggctggagtgcagtggtgcaatctcggctcactgcaacctccacctcccgggctcaagcgattttcgtgtttcagcctcctgagtagctgggattacaggcatgtgccaccacacccggctaatttttttgtattttttgtagagacggggtttcaccatgttggccaggctggtcttgaactcctgacctcaggtgatccacccacctcggcctctcaaagtgctggaattacaggcgtgagccaccgcgcctggcccacttcacctttttaactgattgagaatcctagcttatgtcagaaaaacatatatacatttaagattttagcttttatatcatggatgaattcatgtaggagctcagtgttcctacataataaaaaaatgctattctcctgctctttatgaataatctttagaagtgaggttattgctaccttggaaaacttagcttacaactgtagtaattgtccaaaacagtaattttttttgttatggaactgttgctctctgcagaaaacagctctttcgaatcttgaggttttagggtgttagactgattgattagtcagaggaagagactcaatttccctcacttaggcaaggatataaatccctttataagtagtcacttctggttccctgtctaataaataaaagaattaatgaaatgagtaatttcaataaaccgttaaaaagataatagaataaagcatttgataaagagaaatattaaaaacaagccaggttcattgtctacattaaaaagttctaagagataccagcaagtgtcctgcaaaaattgaaagaccacattgtgtttcttatattctttgaaagacaaatttggatcagattgtagagaacagcttatataattatttcactgtatttcatttttatagtcttattataagtgaaaatgacaaattactatagaaagctaagacaaatatcaaatttcactcctaaaaaagtgcctaaaaattagaatttatagacaactttaaaaaatcttattagggaataaatctgttaaataatatcagcaaagtttagtgaatattatgttctgttttttatacaattacttttattgcataaatactttcaggaaaattatcttgctactaaaagaaaaaagtgtgtatgagaaatacctacatatactcagaaccacacacacttcttttatttatggaatcaaactcttagagctgaaaagattttaatctgttcggtctaatcattttagagataaggaarcagcccagtttaaatgacttataggagttagtattggcagagcagaaataatgtaactattttaaagcaaatcattatgaacttacacctatttagagctataaaatcacttcatgtgtacataacaatgaagtttaaaaattgataacactcttatcaatacagcaacaggaggtttacaaaaacagtatcaggtgacatgatttcagattctatagttatttaaaaaaataataagggaaaatgatgaacaaagttgttgaagtatttaacaacttacatgaaatggacatcttaaaagatacaaacagctcactcaagaaaaaaatagacaacccgaattgtcctatatctattaagatgattgatttttttttttttcttttcggagacagaaatctcactctgccactcaggctgaagtgcagtggcgtgatcttggctcactgtaacctctgcttcccaggttcaagctattctgcctcagcctcccaagtagctgggactacaggtgtgtgctaccacgctcggccaaattttttttgtgtgtatttttagtagagatggaatttcgccatgtttgccaggctggtcttgaactcctgccctcaagcgacccgctcgcatcagcctcgcaaagtgttaggattacaggcatgagccaccacacctggccaaggtgatttaatttatagtttaaaataccccacaaagaaaattccaggcccatgttgtttcactagggaattctactaaaaatataaggaagaaataatagcacttctatacaaacactaatagaacattgaagagaaggatgtacttcccaactcattcattctatgagggcagcattactatgatttcaaaatcagacaaatacattagagaaaaactacaaaccaatatgtcttatgaacatagatgcagaaattcttgagaaaactttaattaattgaatccaacaatatataaaaatgatagcacctcatgatcaaatggatcctaggaatgcaagattagttgaactttcacaaatcaatcaatataattgaccatagtaatgactaaaaaagaaaactatattatctttttaatagatgcagaaaarcatttggtaacatctaatatccatttcaatcttaaaaagctctcaactcaacgccgggcttggcagctcacacctgtaatcccagcactttgggaggctgaggcagaagagactgcttgagttcaggagttcgtgaccagcctgcgaaacacggtgaaacctcatctctacaaaaaatacaaaaattagtcagacgtggtgacatatacctgtagtcccagctattcaagaggatgacttgagcccaggaggttgcagtgagccaagatagcaccactgcactccaccctgggcaacagagttaggccccgtctccaaaaacaaacaaacaaacaaacaagcaaactctcatctaggaatagaaaggaactacctcaacctaataacgggtatctacacatcatacttactggtaaaacattgactcttcccctaagatcaggaacaggtcaagggtatctgctctcattacttatattgaacattgtattctaagttctgactagtacaaataaagcaagacaaataaaaggcatccagattagaaaaaagcagaactgtttgtatttgaatatggcatgttctatgtagaaaatttgatagaatccagaaaagccacttgaactcatagatgtttaacaagttgaaagatacaagatcaatatgcaaaaaacaacttttaccatttagaaatgataaaaaaagtaaaatatggaatacaaaatttaacaatatgaaaaaattaagaataaacctgacaaaagatatgaaggcctatgaaacaaaaagtaaaacacagtgctgagagaaattaaagaacacctaaatagagagctatggtgtgttcctgtatcgagagactcagtattgttcagatgtcagttttctctaaattgatctctagattcagtgcaattccaacaggctatatttttttttgtagaaaatgacaagtggattgtaaaattcatgtggaaattcagtggacttagagtagccaaaacaactttgaaaaaagaacaatgtttaaggactctcactacctgatctcaagatttattataaagctacagtaatcaaaataaacaactagatcaattgaacataacagcatccagaaataaatccacacctatatggtcaattgattttcaagaaagaaagatgcccttttcaatgaatggtgctgtaataattggatatccatatatcaaaaattaaagttcttaaaaaaaaatgagacggtagttgtgtccctgagttaggcagagatatcttaaataagacaaatgtatgatccataaaagaaaaaaaaagatacagtggacttcatcagaattaaaaacatccactcttctaaacatattattaagagaatgaaaggaaaagacctacactgggagaaaatatttgcaattttttttttttttttttttttttaaagacagaatctccctctgttgcctaggctggagaacagtggtgagatctcggctcactgcaacctccacatcccaggttcaagggatcctcccacctcagcctctcaagtagctggaatcacaggagtgtgccaccataccgggctattttctcgtattttagtaaagacgggattttgccatcttggccaggctggcctggaactcctggcctcaaatcatcggcctgccgcagcctcccaaagtgctgggatgacaggcacgagccactgtgcccagccagcaactggaagtttcatagactgctagtgaaaatgtaaaatgatacagctttacatttgggaaactgacagtttctttaaaagttaaatatacctgccatatacactcctagttacttacttaaaagagatgaaactgtgtgtccatacaaagacttgtacatgaatgttcatagcacatttctttgtagtaaccaacagctggaaaaaatacaaatgtctgtcaacaagtgaatagataaacaaattgtgatatattcatataatgaaacgctacacatcaataaaaaggagtgaactattgatacatgcaacaacatcgattaatctcaaaataattatgttgagtgaaggaagtcagacaaaaaaatagtacattctatatgattctaatctaaaattctaaagcatacaaactaagctgtagtgagtgacaaagcagatcagtggttgtttagggatgagagatgatgatggggatgaagcagggaattataaaagagcatgaggaaacttttagaggtgatggatatattaattatcttgatttgattgccataatagtttcacaggcatattcatatgtcagaacatcaaattgtactcttttagtatgtgcaattattgtatgtcagttattccctaacaaatctgcttaacgaaaaggaatatcaaacattttttcaaaaactgtttaaatttagagcttgatattttttcttactaattttaagctgtgtttttaaaagaaaaatgtttttcagtcaaatgctgtacctgacttttttgagccaaatgttcatttttctctttgtagagcatcaggagtagactacycacctttaaaaaataatatatgataatataattttctaataagtatatttaaattartttattgaatttagtttttaaaatgactaaaaacatttttaaaaatgagaaaaattttaaaaattttaaaaaacatttttaaaaatgagaaaacgttaaaagtaggcaatgttatgggattgtgttcctcaaacattcatgaagtcctaacccctaataacctccaaataggactgtatcaaagatagggttttcaaagaccttataatgttaaaatacagttattaaggtggggcctaatccaatatgactagtgtccttataagaagaggaaattaggacgtaaacacatacagaaggaaaactgtgagaagacatagagagaagatggccatctataagccaagaagagagtagtcagaagaaaccaaccctgccagcaccttgattttgcacttttacaaaagtacagaattgtgagaaaataaatttctctaacttaaaccgtccattctgtggtactttgttatagcagcccccaaaaatgaatacaggcagaataaaaaaaattaataaaacatctcaaaataaaatatatggtaactaaatttaaaatctcaatggagatcttcaacagattaaacagaatatcatttttatttttaattatgcttacatactagttatttttgaggtacatgtgatattttgaaaaaagcgtactctgtgtaatggtcaagtcagggtagctgggttattcatcacctcaagcatttatcatttctttgtgttaagaacattcaaattctactcttttagttattctgaaatatgcaataaattgttaattgtagttgccctattgtgctactgaacattacatcttattttttctgtctaactgtatttttatacccattaaccatcctctctttatcccccctccatactatctttcccagcttctagtaaccatcattctactctctatttccatgagttcaattttatttttgaagctcccgcctatgagtgagaacatgtgaaatttgtctttctgtacctggcttgtttcacttaacataatgtgctcccgttccatccatgttgttgcaaatgaaaggattttattcttttaatatggccaaataatatctgttgtgtatatatgccccattttctttacccattcatctgttggtagatacttgagatgattccgtaacttggctatggtgaatagtgctgccataaacataggagtgaagatatctctttgatacactgatttcctttgttttggatagatacctagcagtgggattgctgaatcatatggtagttccatttttattttttttgagaaacctccatactattctccatagtggctgtagtaatttacattcccaccaacagtatacaagggttcccctttcttcttatcctcaccaacatttatgattgcctttcttttttatacaagtcattttaactagggtgagatgatatttcattgtagctttaaatttatctgatgattagtgattttgagcattttttatatacttcttggccatttgtatgtcttcctttgagaaatgtctattcagatcctttgcccgctttttaatgggattatttgtttttttcctcttaagttgtttgtgttccttatatattctggttattaatccatcagatggatagtttacaaatatttctcccattctgtgggttgtctttttgttgtttcctttcctatgcagaagctttctagcttgatgtgatcctatttgttcaattttgctatgaacaaaaatggtttggttgcctatacttctgagatcttatgcaagaaatctttgtgcacgccagtgacctagggtttttccccaatgttttttcctagtagtttcattgttccaggtcttagatttaagtctttaatctattttgatttgatttttgtataaggcaagagataggggtctatcttcattcttcgacatatggatattaagttttcccagcatcatttatgaagagactgtcctttctccaatatatgttcctggcaccttagtcaaaactgagttcactgtgaatgtatgaatttatttctgggttctctattctttttcctttgtctatatgtctgtttctatgttaataccatgctgttttggtatctatagctttgtattataatttgaagtcaggtaatgtgatgcttccagctttgttcttcttgttcaagattgctctggctattctgggtcttttgtgactccatataaattttaagattttgttctatctctgtgaagaatttcattgatattctaatagtgattgtattgaatctgtagattgctttagacatgcgtcatgtctaaacctgcatcatatctaaatgcatgtcagctacagacatgcatcatgcttggataatttttatttaaacatttaagcaatattgattagtccaatccatgaacatggaatatctttccatttttgtgtgtcctcttcaacttattttcatcactgttttgttttgttttgttttgtggtagagtcttgctctctcacccyggctggagtccaatggcatgatcttggctcactgcagcctctgcctcccaggttcaagtgattctccctgcctcagccttccaagtagctgggattgcaggtgcccaccaccacacccggataatttttgtgtttttagtagagatggggttctgccatattggccaggctggtctcgaactcctgaccttaggtaatctgcctgcctcatcctcccaaagtgctgggattacaggcatgagctacaacgtctggccttcatcactgttttatagggttgtgttttcgttttttcgtttcaagatggggtctcactctgtcacccaggttggagtgcagtggcacaatcatggctcactgcagcctctgcctcctaggctcaagtgatcctcccacctcagcctcccgaagagctgggactacagacatgtgtcatgcttggctaatttttatatttgtttgcagagaaggggtttcaccatgttgcccaggctatccacctgcctcagactatccacctgcctcagtctcctaaagggctggaattataggcataaatcattgcacccagcctgttttatagttttaattgtagagatcttctgcttctttggttaagtttattcctaggtattttattttatttgtagcacttgtaaatggaattactttcttaatttctttgtcatattgtttgccattggtatagaaatgctactgatttttgtatgttgatttttgtatcccttaactttactgaatttgtttatcggttccaaaggttttctggtagagtgtttaggtttttctaaatacaagatcrtatcatttgctaataagaataatttgacttcttcttttccaatttggatgtcctttattatttctcttatctaattgctctggctagaacttctagttttattttgaataaaagtggaagtagacatccttaccttgttacagatcttagaggaaaagctttcagtttttccccattcagtataatactagctgtgagtttgtcatatatggccttgatcatgttgaggtatgttccttctatactgtttgtcaagagtttttatcatgaagagatgttgaattttattgaatgcttttccagcatgtattgaaatgatcatatagtttttgtcttttattctgttgatatgatatctaccattgattgatttgcccatgttgaactatccttccattcctgggatgaatcccacttgaacataatgaatgatctttttattgcattgtttaattcagattgctagtattttgttgaggatttttgcatttctatttatcagtaatattggcctgtagttagtttgtttccttcctccttccatcccttcctccctccctccctccgtccttccctcccttccttccttccttccttcctgatgtttttttgtctggttttaatatcagggtaatactggcttcagaaaatgagtttggaagtattcccatctccttgatttattggaatcatttgagtagagttggtattacttttttaaatgtttagcagaattcagcagtgaagccatcaggtcctgggcttttctttgatgggagactttttattactgctcttatctcattacttgttattggtctattgttatttggatttcttcatgcttcactcttggttgggtgtatatttctaggaattgatccatttcttctaggttttccaatttattgggatattgtttctcctaatagtctctaatgatcctttgaatttctgtgatatcagttgtaatgtcccctttttcatctctgcttttatttaattgggtcttgtctctttttttcttaccttggctaaaagtttttcaattttgtttatcttttcaaaaaaccaattagccagatgcagtggcacacatctgtagtccaagctacacaggaggctgaggcaggagaattggatcagccgagactaggagtttgaggcttcagtgcactatgatcacacctgtgaatagccactgtattctagcttgggcaacatagtgatgaaccatctgttaaaaacaaaaaacaaaaaaatccagtttttttgtttggttgatcttttgtatttttttaatctcaattttaataatttttgctctgatctttcttttcttctaattttgagtttggtttgctattgctttctctttaaaagttattttagttattatttttgatgggtttttcttttagtctactaaaatatgcatgatttatatacaacaattacagtgttagagtattctgtattttttatgtacttattatcactagtgaattttattctgtcagatgatttcttgttgctcataaacattcttccagattgaagacctctctttagcattttttgtaaggcacatctagtgctacaaaatccatcagcttttgtttgtctggggaagtctttatctctccttcatgtttgaaggataattttgctggatataatattctaggttggaacagttttttccttcagcattttgaatgggtcattccatttcctcctggcctatgaggtgtccagtaggaattctgctgtcagaaatgtcagagctcctttatatgttatttgtatattttctcttgctgcttttaggatcctttctttatccttctcctttgagtttgataattatataccttgaggtagttgtatttgggttaaatcttcttggtgttctgtgatcttttcatacttggatattcatactgtaggtttgaagagttctctgtaactaaactttctattgcactgtctgtctttacatcctctttaaggccaataattcttagatttgcccttttgaggttattttccagatctcgtagccatgctttattcttttttattctttcttatttttcccccgactgtgtatttccatatagcctgttgttgagctcatcagtttttccttctgcttgatcagttctgctgttgagattctttgatgatttttcagtttgtcatttgaatttttcagttccagaatttctacttgatttttaaaattttaatctcttagttaaatttctctgatagaattctgaattccttctcttgttttcttgatgttcattgagtttcctccagacagctattttgaatttcctatctgaaaggaataccttcatcactccaagattggtcactagtgccttatttagtccatttggtgaagtcatgtttccttgtgtgtccctgatgctttcggatgttcattgatgtctgggcattgaagagttaggtatttattccagtctttgcagtctagtcttgtttgtacccaactttcttgacaaggctttccatgaattcaaaggggattgagtattgtgatctaagcctgcaattactgcagccatttcagcactagggggcgccctaagctccggagcgcctcaactcttttttttttttttgattttgtgtttattgttttttattaaccattcacagaaaaacatgcacctaatatgcaacttgaaagtccagttcacaactcatgattcaaaaagcagaaatttcaaaccattgttttcagaagtccataatataaaatactccaaacataaattcaacattgcatgcagcaactggccatttgcttcaaaagaagtgatcacagtgtktatatatttaaaaagagaaacctttatttgtattattttttaaaaaactaagaagaaatacaacttcagaaaatcttttccagaataaatatttctagaaaattgaaaagtaactaaagacattgaaaagcagagctttattaagaaacatctgtggtgcagatacgaatatttwacttaaagctgtgatgtgtacctaaacttcaatgcataaaatgtaaagtttaacrtatcaaaactccaggatttttagctttggatcatcttaaaactataagatagctcttatcacatttaaagcagtgtgtagagggaaatttatagcactaaatgcccacaagagaaagcaggaaagatctaaaattgacaccctaacatcacaattaaaagaactagagaagcaagagcaaacacattcaaaagctagcagaaggcaagaaataactaagaccagagcagaactgaaggagatagacacacaaaaaaacccttcaaaaaaatcaatgaatccaggagctggttttttgaaaagatcaacaaaattgatagaccgctagcaagactaataaaggagaaaagagagaagaatcaaatagacacaataaaaaatgataaaggggatatcaccactgatcccacagaaatacagactaccatcagagagtactataaatttccctctacacactgctgtaaatgtgtcccagagattctggtatgttgtgtctttgttctcattggtttcaaagaacatctttatttctgccttcatttcgttatgtacccagtagtcattcagaagcaggttgttcagtttccatgtagttgagcggttttgagtgagtttcttaatcctgagttctagtttgattgcactgtggtctgagagtttgttgtaatttctgttcttttacatttgctgaggagtgctttacttccaactatgtggtcaattttggaataagtgtgatgtggtgctgagaagaatgtatattctgttgattttgggtggagagttctgttgatgtctattaggtctgcttggtgcagagctgaattcaattcctggatatccttgttaactttctgtctcattgatatgtctaatgttgacagtggggtgttaaagtctcccattattattgtgtgggagtctaagtctctttgtaggtctctaaggacttgctttatgaatctgggtgctcctgtattgggtgcatatatatttaggacagttaactcttcttgttgaattgatcccttcaacattatgtaatggccttctttgtctcttttgatctttgttggtttaaagtctgttttatcagagactaggattgcaacccctgcctttttttgttttccatttgcttggtagatcttcctgcgtccctttattttgagcccatgtgtgtctctgcacatgagatgggtctcctgaatacagcacactgatgggtcttgaytctttatccaatttgccagtctgtgtcttttaatttgagtatttagcccatttacatttaaggttaatattgttatgtgtgaatttgatcctgtcattatgatgttagctagttattttgctcgttagttgatgcagtttcttcctagcatcgatggtctttacaatttggcatgtttttgcagtggctggtaccggttgttcttttccatgtttagtgcttctttcaggagctcttttagggcaggcttggtggtgacaaaatctctctgcatttgcttgtctgtaaaggattttatttctccttcacttatgaagcttagtttggctggatatgaaattctgggttgaaaattcttttctttaagaatgttgaatattggcccccactctcttctggcgtgtagagtttctgctgagagatcagctgttagtctgatgggcttccctttgagggtaacccgacctttctctctggctgcccttaacattttttccttcatttcaactttggtgaatctgacaattatgtgtcttggagttgttcttctcgaggagtatctttgtggcattctctgtatttcctgaatttgaacgttggcctgccttgctaggttggggaagttctcctggataatatcctgcagagtgttttccaacttggttccattctccccatcactttcaggtacaccaatcagacgtagatttggtcttttgacatagttccatatttcttggaggctttgttagtttctttttactcttttttctctaaacttctcttctcgcttcttttcatttatttgatcttcagtcactgataccctttcttccagttgatctaatcggctactgaagcttgtgcatgcatcacgtagttcttgtgccatggttttcagctccttcaggtcatttaaggacttctctacactggttattctagttagccatttgtctaatcttttttcaaggtttttagcttctttgcgatgagttccaacttcctcctttagctcagagaagtttgatcatctgaagccttcttctcccaactcgtcaaagtcattctccatccagctttgttgcgtttctggcaaggagctgtgctcctttggagtgggagaggccctctggtttttagaattttcagcttttctgctttgttttatccccatctttctggttttatctacctttggtctttgatgatggtgacgtacagatggggttttggtgtggatgtcctttctgtttgttagttttccttctaacagtgaggaccctcagctgcaggtctgttggagtttgctggaagtccactccagaccctgtttgccagggtatcagcagcagaggctgcagaacagcaaatgttgctgcctgatcgttcctctggaagctttgtctgagaggagtacccggctgtgtgaggtgtcagtctgcccctactggagggtgcctcccagttaggctactcgggggtcagggacccacttgaggaggcagtctgtcygttctcagatctgaaactccatgctgggagaaccactgctctcttcaaagctgtcagacagggacatttaagtctgcaaaggtttctgctgccttttgtttggctatgccctgcccccagaggtggagtctacagaggcaggcaggcctccttgagctggggtgggctccactcagttcgagcttcctggctgctttgtttacctactcaagcctcagcaatggcaggcgcccatccccgagcctcgctgccgccttgcagtttgatctcagactgctgtgctagcagtgagcgaggctctgtgggcgtgggagcctccaagccaggagcaggatattatctcttggtgtgccgtttgctaagaccgttggaaaagtgcagtattagggtgggagtgacccaattttccaggtgccatctgtcacagcttcccttggctaggaaagggaattccccgaccccttgcacttccctgggtaaggtgatgcctcgtcctgcttcggctcatgctcggtgggctgcacccactgtcctgcacccactgtctgacaagccccagtgagatgatcccggtacctcagttggaaatgtctctgcattttctgcrtcgctcacgctgggagctatagactggagctgttcctattcggccatcttggaactgccctcactgcaactcttgcagacccctaaatacactgccttggtgaacttggataagataaggaagattccctaggttagcaggcaaagtcacttgctctcttttctctcttttccccagtcagaaggaacctctctctgtactaggctgcctggagttgagggagaggtgacacagactttcctgtgatcaccacagctgacactacagagtctcacctgaaggcttgcagaccagcacagtactggagttcaccagtactggtagccactaccgcctagctgctgctgatgtttattcaaggaccatgaccactttagtcagcaggtggtgaatcctgctgggactgagtctcttccatcaggacagtgcattttcttctggcccagaatgggtctagaaacaccatctaggagcaaagacttggaattgggggcttcgggaatctgctaagctggtgcccaagttgcaagacaaagtcctctgtgctcttcccactccatcctccacatagaagatgtctccccaagagctgcactgcctggaactggggaggggtgatacaggcactcccttagctgccacagttggttttgccctgggttgcattccaagtccactgcctctgagactagtgcagcaccagcgtttgcctgaggactgcagtccttgtggcctgactgccactcaaatttattctgtgatccaggccactttagtcagctggtggggaagccccactggcctgaaactgggttcttctcgctggagttggggattcccctgtggcccactggtagtctgaatgctccctccataggcattgacggaattcctacctgtgttgtgttctgctatgacagagcagcactgagctccattgtaaagtcccccactaacttcactctctcctccatgcacatagactctgtctcctcaatgcactgcctgggattgctgtagtcaatgcaagactgtctctcctacattcttgaatgcctctttccttgataaaaagtacctggtttgaacataggtacttttatcactcacctgatctttttgttcttatgaagatgctttcttgcatggatggttgttcaatttagtgttcctgatgggggattattgctcagggttctatctggccatcttgctctgtctcctacttcctggttatttttaaaaacttctgttttcttttcaaagagaaaattagtaaaatagaaaatagtgctgaagagatcaccctaatactaaaaatatgagagagtttaggtttatgaagcattcaatgagaaggtccaacatacctctgagttccagaaggaaaaccaagaggataggaaacagaacaattaatgaagatataatagttgataatttttgagagctgataaaatatatagatcttcaaattctagaagcttaaggcacagtcaaaattttaaaaaaaattctacacgtagattaatgggattggaaatacaggacaccataaacaaggagaaggtttttaaagcagtcagagagaaaaagaaagctgaattatctacaaagaaaaaggaattagctaagagcagactgaacagtaaaaataaggtcagaatttggtagaattaaataaattcttaaaactacttaatttcactaagaaataaaatcttaaaactgctgtgaggatacatcataattattttaaggaaaaagagaaaatattatcactataacaacctagaataacattgtctaatagaaatatcataaacatcatatatartttaatgttctctatgacctgcattagaaggatgaaaagagatagatgaaattgatttctgtattttatttaatccaatatactaaaaatatcattttcatatgtaaccagtatgaaaaagtgttaataatatgttgtacactttatttgtactaagtcatcaaaatctaacactcataacatatgccaattcagactctaaattttatcaaaaatatttatatttcataaaaaatacagatgaaaaagtaatttacatacctaagttgttacaagcatacttagaagttttccaatatctgattaagtattcatctgaaattaaattttaaataaattaaaaactcaattcctcagtttctgaagccacatttcaaatttttaaaagtgaccaggtgtagtggctcacacctgtaatcccagcactttgggaggccaaggtggacggatcacttgatgtcaggagttcaagaccagcctggccaacatggtgaaaccccgtctctactaaaaatacaaaaattagctgggcatggtggtgcacgcctgtagtcccagctactcaggaggctgaagcaggagaattacttgaacctgggaggcagaggttgcggtgagccgagatggtgacaccgcactccagcctgggtgacagagtaagactcaaagtctcaaactacaaccacaacaacaacagaaaaaaaaaaaagaaaaaaacttaaaagccacacgtgcctgatagccactgcattggaatgtacagatagaatttgatgtctttctaaactttggttcaagattaaggtcaaaacaaaacattttcatatgaaaactgtgagtacttatgtatttcaagaagaaggaaatataacccagaaggaagtaaaaggttcaagaaggaacaataagcaaaataatcagtcaacttgatgatcaatctaagcaatcaatggctgtataaaacatcaacagcaatcatctcaaatttaaaattataagtaaaacagtagtatgtgagactgatgtcggtgataggagttaaagcagtctaagggtcgatctgtttatgagaatagcaataatttgccttagagtttgcatagttcaaatatccttaaagtttttagcaataatcacaaaataaaaaagaaagtgtaaaacttcccatctggtagaaacaaaggagaataagtaacacgattaaagcataagaagagagccaaagcatgaacttcaaattgaattcctgaggtttttttttaaaaaaaagactttataggaaatatagaaagtttttatggattaaaagttttaaagtaaatctttgtacagggtatgcagcttttaaaagatcaaattctaactagtgccttaattattatattcctttttatctatagccataattttgttgattaagagggtgtattagttgtctttgacatgctacatcttgccctgcattcgtaactccagaattaacatgtccttaagttaaatgtgtttgaactgtgtgaaattacgcatttgttccctggaaacaaactataaaatacaaaattaaatttaatatataacatgcttaatatgaataatgtaggttatttgataagtatatgacacacttgtagcaaactaccccttccccacaaacacagtcaatacactgtgttttaatttaaaactattttgacttcagatgttctaaacagccagttttatatatttaaatagccatgcagttagataggagagttgctacagttcatcttctctagtcctatccttggtgataaatgttacttttactcactatatttattgtttaaatttttatacttaacagagactttattattgttgaggtataacatatattgcaaacagcattattcttaattgtacagcctgattaattttatgaatgtatgcactcatacaattaccacccagattcagagcatttcagcacctagaagtctccctcatgttccctcctagtcaattcttgtttaccaagggtaatcactgctatgacatatcacacagataatatttgcctggttttggacatcataaaaatagaatcatacaatgtaaactcttgggtgtctgacttcttttactcaacattctgtgagacattcagattttgtgactaaggcttttacagaaaacattttacaagtatttctcaatatcttttctccaatatagaaattaaaaaagagctttacaccttgtatcatttagtaacaagttaaaattttactttcttggggtgatgtgtgtcagtcatagttagcatttttataagaaatgtatactattttaaaaaaattgaatagtttaccattcaaataatcttccttcctccttttctttttgagaaggaaaatgtctttacaaggtaagtggcaaggcagagaggggtgagggagttatgtcaatagcagcagagaatggcattagtgatcagaaaaatatttttcatgagttcctacagatcatgtttacatggaaccatgtcatcacaagtcaaagccagttccgctctgcaaagatatatgtattttcctctggaagctaaaaatatacactattcctcattgaccttttcatccaattctccaaaaatgaaatcaatgccagtcatcatctttgatattataggtgtttctgtctttgtgtaaatttcaggcccttgaaagtaaaatgaaatcactgagtttattctttaaattttgtgtctgctcctcttacacccccaaccccaagatttatgcagattgcagagatggaagaaaaaagatctcttttaacttgaaactttgtctgcacttgcaaaaataaaaaaaaatttaaaacctgctgctttataaaagtcctttactgtaaaacttttttttactggtaattatctctgttgtagtttattttgtctggcaaaatgtaatgtggcagctgtaaaatctacagaggcttaatgaaattgctaggtggcaacagaaatgctagcattttaaaaggcttagcacatcattccaaaattgctttgacaaaattgttaagctaacaataagatcaagtttttaaatagaatttaccattcatggttaacatttttatagctgctttaatagggtggtcaaataagatatgattgttatatttttatttcttatttatttcttatttatttatttgagacggagtctcactctgtcaccaggctggagtgtggtggtgcaatctcggctcactgtaacccccgcctcccaagttcaagtgattctcctgcctcagcctcccaaatacctggaactataagcacgcaccaccacgcccagctaatttttataattttagtagagatgggattttgccatgctggccaggatggtctccatctcttgacctcatgatccacctgcctcggcctcccaaagtgctgggattacaggcatgagccaccgtgcccagctgttatatttttaaaaagaaaccacttttaagcaaactgtcgtttagaagtctgcagctaaaatattacacatacatagagtagttttgctctcaaagtttggatactcttcaggaaaataaaaaattgatattawttccatgaccttgaggtactggttatatgcctaataatgcatttgtatatcagacagggtgagagattaaaggtgctcacctcatacgttatggatattggtttatagaacgtgttggataacaggcacttactacagctacttggaagcagaagcaggaggattgcttgagcccagaagtttgaggatgcagccagctatgattgcaccactgctctccagcctgggtgacagagtgagaccccaactcttaaaaataaatgagtaaatatagaaagtgttacagaagaaacaaaatgcttaggaagttcatttgtagtttgctttactttgggaatgagatagaaaaagccaaatgaaattaatgtttaattaagtggtgtaggggaaaagaagtatctctttcttacccattgctaggttcatggctgaggcccctataataaaagacagattaacaagagaaaagcatacaaatttatggtatataagttttgtataacacaagagcctttggaattgaaaacccgaaggtacaattaaacccatgggggggtttgcactgtttgatggagaagtggatgaagttgagagtataattggataacaaagtgtgatctaatggtaataaactgggggaaacttagcaaggcctttttgatcagattcttctttgcgtccctgtgtcttcagagatgaggatgtttctttcctccagctatacaaagggcacctcttgaatgaaggtcttatgacctatttcagaggaaaagggtgggagaaggtcagagagtgaccttcctgcttccgtggttttctcaaataccaaggtgccataattatggggcagcatgttctgaaccccatcagtggataaggcaatttatttctaaatgtcagtggcagtctcaaattggtgctctttaatcagcttccatattataaatagagaagagctatttaggtctcatttgtagttggaaattactgatagttattctgcctttctaataaaataatgtaattataatttggataaaatagttacttgtaacactttttggctagctgtatctcctgtaaaatgccttacttacagctttgtaagctgtaaaacaaacaaaaagcatcaggaaaggatataaagtcatacatacctcattttatgtacttaataccagttaattgacatataattggagcaagtacaagatcaagaagcaacttaattagtgataccattttaatgtccctaatgagagcagtggttttcatttgtgtgtaggataggttggtacacatattggaatctccaggaaactttttaaaaatactgtgtagattcctgtactctgtctccagaattcacaccaaagtcctcagtggatcaggaaacagaaagcctgcgtaatttcttaattaccttaaactcccaaagtcagacattgtaaataagtttgtttcagtattcaaataagccaagctgactcttatcttaaatcatacttgaaaatgtaactaaaagagattagagaataaagatcaagagtattttctgggtgaataatttatacagtttctggtatctgaaagttgaaagaaaactttgcttttcttgatagtggaacttcaaaatttttgtgtgtgtgtggtcagcaaagtctaaattagtaagttattctcaagcagggcagaaaggcaactttaaaaggttgtggacctgtggtatagattttaaatgggaaacaaattctttttcttgcaaatatttcaattagataattctaatggcattgtacctgatctttagagaaattatagtttgtatccttaaaccacttttattgtagaagaaatatgtgaaaacagagttacaaaaactttttttcagtattttggcatgtaattttgggagatacagtttttattgatggtaagcataaagcagttggtggaaaaggtggaagtgaaaggcaaatcaaagaggaagaacatagtatttcaaaggaataaagtgagcagctcctcagcacattattaggaaggaggaatgaaaggaactgctactatttctttcatgctacttgaatcaggtggccaagaaatcaagagacctgcttccctctatccacgttgtcccatcacttaagccttgttacttttaataataaccaatttggttttactaatatagtggccaagaaatcaagagacctgcttccctctatccacgttgtcccatcacttaagccttgttacttttaataataaccaatttggttttactaatatagattgtctgtatatcacttgtttcattagtgttttgttgccaagtagcatagttctggaagtacataacaaaacacaactactggaagcctaattgatcagtagccataccagcattccagtggttgtggtttgagcaagcagcttgcatgtgtttagtcattttaaaaagagagaaaatgtgtgtgtttgtgtggctaatgtcatcattaagaaataaaaatatcttttatctcctattcataaaacagaccaatttggagtaacatgtttgcatgatttcatgttattagaatattgcaacttgtattacaaataaaaatttctaaaactatatgctgatactgtactgatcatgtgcattcaaataaatgtcttcatttaataagtcatgttttacctaaagttaatgactatgtatagtaaaacaccaatttgacaaatgtagttactcaataagtactaattggtttgatcgtcaaatcttaaagcaattgttctaagttgaggatctgtgctaactaggaatatcatgtaataagtaataaatagactacttacaaaaaggatattccccaagaaattaattaaagaacaaattgatattttaggatactttgtaccttaaatcatttgtatttctaatatttttttctacgtaaaagatgccaaaaaatttcccaaagatctagaatagaacggtttgagaattagatctattattctggaactacagtacttgtcatggatgatatgctctttgtcttctgtggggggaaaatgctaagtaggtgattgaggaaaaattcaaggagtgacttttcttagacatgtagtctacatctggtatctctgagaaaaggtttattagataataatagtcaccacttttatatggcacttactgctgtatgccaggaaccgttctaagtctttagttttggtttttgtttttttctttaatcctcacagcagccttacctatgatgtaacaatgatttttataaataaggaaatgcaggcacagaggggctaaataactcactgaagatcactgtataaaccataaatatcaaacttgggatttgaacccagggattctggcttacactatactgtctctcagtaaaatgagactacatactaaattactgaagtcagctactataaaaagaatgaaatgaagctgacaagtttctctgatattgaagcagcgtcattgtctggggtaaatacccgaggttcgtagacttgcatcaagattaaggacagggacacacataaggagtgagtttaggaacagaggttttaataggcaaaggaaagagaaagaacagctctctcttctctctcttctctctcttctctctctctctttagaagagcagcttaaaaaggttgtggacctgtggtatagacttaaaatgggaaactaatttttgcaaatatttcaattaattataatggcattgtacctgatctttagggaaattataatttgtatccttaaaccacttttattctaggagaaatatgtgaaaacagggttacaaaaacattttctttttttctagagagagagaagaaaaagagactcccgaattggaatttcagcccagaatgggagtgtaccaaattttgtaggcaggcttgaggaggcgatatctgatttacataggacccacagattggctggaccaggtgtgatgtttacatagcacgtggtaaagggtggccaccccgccctaatcttattatgcaaatggactttccacttggctggcaccatgttgtctgctacttgctgtacaggtggctggcaaagagaagggaagatggagccgccattttgaacatgcctagtcccaggtaaccttttcctattggcacagctgccagtattcacctatgcaagcttccagcttgcttgtccgtctgcagctcaattgtacgggctactctctgttagaaaagaaaatgattttggtactgcttttcattaaaggaataccttactgaggacttccttactctcactatctgcctaaataattctttttaaactcctatatcagtatctttccaaatcttctaggtgagtttagggatttggatgattagcaagatctgaccaactaccaccagaatataaattcttgagaaccaaaagttcataggagtttagtaaatgatgttgcatgattatctataccaagaaaacttaaatgtaaaatgtctttaaagagactatgattatcaatttacattattgtagatatcaatttcaatcatttacacaattttattttcaataagggattgctgttttatcctttatggtatcagagaaacaagttttttttttaagtagtaacaaaacttttgaggaattaatacagctttattttgtaatcaacttctagcatatactacaatttccagtgaaccttaaataatttatgacaaaactatcaagaaaatgttaaaatgtaggggaactattctgaaccatttattttctatttgtgcattgttataccagattattgatttaacaatgtatgtattgttatgaacatatggactgaattttttagggaattccatattatagagggactttgtcaaatccttcagagtttggaacagcggcctctgcatacatttttgccagacaccctaatagaacgtataaaataggaagactacaatttcttgtgcctgaatatgcaaagggatttttcagatcaaaatcatgtcattgttgttctaagtctcaaaatggtttcctgatacttttgattagtgtttccttaccatgtttgttgcctagttaagattatttccctaatttttaatagtatgtgtggaagatgaaaaataaggggacaatctaaaggaaatggcaagaaccctcagggaaaaaaatggatgaacataaaatgatcttagtttaaaagaacattggaaagaagctctaaggtgtttgcatatcaaatttctgcttatccttaaccttgcctctagctgcttgaaattatgtttagcaacttttctgtggaatgttggtaaaatctataaatataatcattagactactggaatcaattcatatcagatttactctttcataatagcattcttgaatgcagtcaacacacaattaaaacacagtacacggaattataagcttctagaatctcatttttaaatattcttttgttagcatttttttgaaggattttaaatacatttgctttaaatttcttccttttagttagacaagatgagtgaattaaagactgattctagccacaactctaaattccctcacttgcaggtttgcataaccctttaaaattattttaaaatattttctgtggtttgactatgttttctcaagaatccagtacgtaaatgtcatgtgtgtgtttacggaatttgacagcaatgtagtttgttgtcacggtttctttaactttattacaagccatttaaaaaatcacatttgaaaatatttgtgtaatttctcatttttgttttctttcttttctttttttcttgagacagagtctcactctgtcacccaggctggagtgcagtggtgtgatcttggcttactgcaacctctgcctcccaggttcaagtgattctcctgcctcagcctcccgagtacctgggattacaggtacccaccaccacgcccagctaattttttttttttttttttttttttagtagagacggggtttctctatgttggccaggctggtcttgaacccctgacctcaggtgatctgcccacctcagcctcccaaagtgctgggattacaggcatgagccactgcgcccagcctgtctgtatttttttaacaagcaaaagtatgatcctccttggtaattctgtttctcactgctcttcaccatttctctgcccaaaattcttgctgttccttgtacaaacttagtaacttcctgacccacatgcctttgctttggccgtttcttcttttttgaatcctaaccttagccatggtcaagtcttacctattaaagggccacatataaaataagaaattaattctttattgtagttgaagtaatttggctatcctccaaactcttttttttcttagatacctaatactttctatcttgtatttatgtatgtattatctccccaataatactttagactctattagcaaatgacctgtaatgttgggaagaagatgtatatatatatatatatatatatatatatatagtgcttaaaataaagatatactttaaatgttcaataaaagcaaacaacatattgtataaaagttgaaatatatagtttcatcattacacattgtacatatgtaccaaaacattacactgtacgctataaataagtatgattatatgtccattaaaaacaaaatacaacttaataaaaaaggagagatacatatagttcttaacagagtaattatcagtttactgaccttggttgtcctggtaagtgaataaatctctacattttagagtgataaggaattatgaattgctttcaccttcagcagttctgattggtgctaccatgctgaggaggggagagggtcagtctgtatccagggatgaaaaggaagaatgtagcaagccttttctggtctgggtggataccagaatccacagtgacaggacagggacagggcatagcatttaggcttctaggtggcattcaggcctctgtgttagctgtgatccgcaatcatttataaatttgaaatggtaacagttacactcaaaatcataattttgcctccaaaagaaagacaatctggaattagccatgacagttagaatcccagcttcctaacttagattcgggacttaggtactggagaactggacagaaagtctagtaagtagaattaattaaaatagtgggatggagattggcagtagtgagcgaaagaagtgttagagggatgttacagcaccatacatgcatcagtccccaagagaagaggaagaatctggaaaaaaataaaaaaccgagaaggcgcagtctttgtgtttgagtaccctagggctcagtccttggtcttcatttcttttctatcttaattctttttttttttttttttggtgacctcatcaagtcacatggctttaaataccatctagtaggccagcaactcccaaaatatatctgcagttgtgatctttatcccacatttcagatcaaattgcctaattgacatccccattcaaatgtataacagatatcttaaatgtaataggttccaaagttctaattcctgccaccacctcctaacccccacctcagcagcctgcactattttagacaatctctgttgatggcactctgtccttttaattactcagatcaaaactttgatgtcatccagagtcctctttttctgtcactccacatccagtctgtcaggaaattctgttgtcactacctctgaaatatcttcagttaccagcaggttctcaccacctctattgccaccactgtgcttattggccatcatcatctcacaccagattattagtgcgttgtcttcctaattggtctcctagtgtttgttccccttagttgataatttgacagaaattgattttagattgttttgtgatatctgtgacatgaaatctcatggttttgaatggtatctttttgcaagggaaatattgttttgctttgtcagttcttttccagctagattgtgtgttgtctgtgtatgaaataactaagaggcggcttttaacagaaaacttgtatagtgactgtaaaatacgacaacatatacctaagattatgagctgtgatgattcattgaaatgattcattgaaatgtatttggcaataacaattgtgagccaagtttcagaagtctgatgtatgattggttaaggctttgaggaccattggtctataacaccacttcagtgcaacctaagatgtgctgactgattaaaagttgcattcaaacacatttttcttctttgacaccattattaaagacatgtctcagattcataaacatgcaggtttttgaccttcaaaggaggaatgacttttagtagtttactttttaatcataagtcatattctgatcatgtagatgataggtagaagttaaaaagtcagaatgattcagtcctgatttaaaaaaaattcagttctggttgttttcaggaaagtatagatactgtatgataaacttttccatgaacttctgtcaatgtcttatcatttgacagagtgatatcagtataatttattcagattgaataatggaatttcagtcataggccttttgtgatttttctatagctattatcttgagtctataaccaagttcacctagcagttttcttaaaacctgtattaacttactttttatatgagggacaaaataaagtttattctaatcagtctgttttgttgagcctaatgtacagctttacttctaggtggaggcctactggtgtctagggaatgtatttgtgttaatactcttaggtatgagctcttaggcatctatacagccaagcattaaaacaaaaagttaagggacctcattgatcacatttggtagtacaaaacaagctgcctgaaatgctagtgaaataatgaacaaatgtaaataagataaaatctaaattcaagcaaaatatatacttcgactcaagacatttcattgtagttagaaaccttgtgaatgcctaacaggaattttcaaaggaattgatttctatccatttcagaacactatagtctaaatcggaatcttaacttgggatctataaatgggttataagtagatccataaaacttcagaatttatacagagctttatatttatgggcaatgtccttgagagagaaaccacacctttcaccaatttcttaaaggaatgcataattcaaaaaacattaaagagctactaatccttatccatatctatatgtcacgttgataaaacatttgaaccaagtttaattcttaagaacaatgaaagggctctatttctagtttctaggatctaccatccagattttgaaagattaagccaaatcaaggcattgttgttaataatgctacctgttgtatttgtatgaaacccaatctttttgtagcatgttgatttggtatatgttaactacttattaacatctatacaaataggctgcattatccattgaagtgattgctgtttcctgtgattataattttaagcaattttcttctttttttttattttttattttggtgcaattacaaaccagtaagcctagctgatcctgctgcccttggcttcatcatttctccatggtctctgctgttgctgccatctggtagtgtgtcatttacagatgaaaatatttccaatcaggatcttcgagcattcactgcaccagaggttcttcaaaatcagtcactaacttctctctcagatgttgaaaaggtaactgttaaatttttttgtttgtttttttatttgggtggggataggtcaaataaagacaatgggctaccatgtttcaaccctctgaaaaatctattgagttttaaatgaccgtgtattccaagaagttcagttattttatttaagaatccaaaatagttttataaagatttatggatctgagaaatatatgaaaaaaattaaccattagaagcacatgtttacaaatacttattaaatacctgctttgtataaaacaccgtgcctgaggaagatatagaaataactggaaagttgaccctgattaacatgtacagaacaatctgtaacagcaatcctcatcctttttggcaccagggactggtttcatggaagacagtttttccaaggatggggtggtgggggaatggttttagcaagaaactgttccactcagatcatcaggcattagattctcataagaagcatgcagcctcagtccctcacatgtgcagttcataataggattcgcattcctatgagaatctaatgccaacattgatctgacaggaggcagagctcaggtggtaacgttcacttgcctactgctcacttcctgctgtgcagcctgcttcctaataggccatgggactggtatggggctggaggtgggggttggggaccccgatctctaatatatggcaggatgaaataaatgctatggagagtgatagtattttgagaatgtacaagatgagcaattaatttttagtgtagaatgatatcacagagaagaggtagctatttgtgttaggctatgaagaatgaatagacttcagataaataaaaataggtagaaagggcattctactcagagtaattggtatgggtaatgacaagaggtaagaaattgtccactgtgattggggaatggttggttagactggctaggctagaatattactacctagagggatgtggttaaaggaaggaagaaaggctccaggtcagaaggaggatgatttttgaatgccagaacttgaggctttcttcttaggcagtggggatctatcatatttttaggagcatgactgatgtaatttgtgattttggaggttaaatttgacaaaagtagataactatgggagaaggaagattttgtgagtctctaattggggagttgttgttgttttgttttgttttgagacggagtctcgtttctttgcccaggctggagtgcagtagcataatctcggcttactgcaacctctgcctcctgggttcaagcaattctcctgcctcagactcccaagtagctggattacgggcacatgccagcacacctcgctaatttttgtatttttagtagagatggggtttcaccatgctggctaggctggtcttgaactcctgacctcaagtgatccgcctgcctcggcctcccaaagtgctgggattacaagtgtgagccgccgtgcctggccagggagttttaatactctgtggaaaagaactgaaaatggcataatgatttatttgatggcataatgaagaagtgaaggtttaaaatagaagtatccagtatgactatagtgatataactgacttcagaataagacctaattttattgtcaaagttatgaaaaaatttaggcatatatattgtgttttatagcagacattaggtaattgtgttatatagcaggctgtgggtaatttagcactgtggggtactccagagaattcagaattggctatgaacattctttcccatatgtcattccacataagtgtaaaaattaacctagtaatttcctaatagcaaaattgttaaatcaaaaatacatacatgttaaacttcaatatacattgtctaattgccatctaaaggaattctaatttctttaaactgacaatcatatttttcttttcagagattgaatgtgtatgagtgtgtgtgtggtgactaagctaaaggaaggcatcttgatttgagccatcaattatgtatctgaaaaaagactgacaagaattggtagagtgaattcagatttaagattatctacctttgatattccatgagctacttaagaattttgagaggtacaagcaaccattgaaaggagatagtagttataaggtaggggtaatgcttaaggcattagactaaaaaatttcccattacataagatgaagtatttgaaaagaattttttgtatgttacggagtagatatggtcttggtcattgttatgtatcatgaaggtattcaagtgtaccagtaatgttttattaagctggatagtatacatatatagttattcatttttattatttaaacaggatgcagtcattctgtacattgtacgattcatttaataatatttttaaaaagggattcgaacattggaaataggtatagtatgtgtgcataggtattatgaattctttctgtaagcatttaaaacccacaataaaatttaaaaagtgcttagtagaaatttgggatgcacaagtgcttttctgattttctgagaggtttcccaatttgccttgtgatgtctagatccccacacaagttaaccctatgtttaggaataactgttagaccacatatttgggaaaatgactaaagccactctattattttgccaagtgtttagaagcaatgttggggatgaaatgggtgtgggattgttgccattatcatgttaaagttgatttcttagtctgtctaattggaacttctagcttacctcatgcctcaaaatcttaagtgtaactctaaatacaaagaaaatcaagtttcttgatcctattcataacatgaagcaaaggtcagaagagtagccatatattctagcacagtattctggttttaaaatggcaagggcattttgaaaatgaggaaagtagctgcacttaattactttcatgagttaagaatatgctattaactagcactcaataaatgcttgctgttgatgacatataaattttttataatgctcagtgaccagcactcttgatacatgacaatgttctcttcattcagagggacttacacttaaaagtctttcataaactgtacatgtttgtatgaaaaaactcccttactatcaactatgtaaacaggcattttcatttatttaccttaaaactttacttttcaagataacatccctttaaatgagtagacaggtttatacaggctacactaagctttttatcctctggcttttctcttttattgggtaattttctacttcctgcttgcttggcagaaggtgtacttatttgacaattcctttgaaatcggtttgatgggatggaatttgaatcaagttcctgttgtgctttctgttcaaaaatattgatgtgcaccagagatttgtactatgtctctgataaattaatcttgattattgccactaatttgtagtctaaatatcaagaattattgctctctgtgctttttgaaaatcaaggatcatctttagaaagacaataatagtaaatctatttacccaagcttagcagaagcctcaaccgaacttgaccaaaaaacaacgaaatgcccttaatcacactataccgtacatactttgtattaaatcttgttaatccattctctgtcccgttttcattcattcataaatttgacaaatgtttgttatatgccaggaccctgtgccactgaagaagaaattctaggattgtctagtgacacagtccaatatgtaatcatataattaaattgaaaatgttaaatgttgggcttgtagggatactatctcacatccattacaatggctactatcaaaagaacaggatataacaactgttggcgaggatgcagagaaattggaacccttgtgtgttgttggtgagaatgtaaaattgtacagtcacaatggaaagcagtataaaggtttcttaaaaaattaaaaatagaattaccatatggtccagcaactccacttctgagtatatatatccaaaataattcacagcaggaactcaaagagatatttgcacacccatgttcatagcagtgttattcacaatagccaaaagctggaagcagcccaaatgttcattggcagatgaatggataaaaaaaactgtggaatatacatacaatgaatatcatacaggcttaagtaaaaggcaggcttgtcacatgctacaatatggatgaacctggaagacattatgttaagtgaaataagccaattacaaaggacaaatactatgtgattccactcatatgaagtatctaaagtagtcaaaatcatagaaacaaaaagtagaaaggtgattgccaaggactgggcagagagggtagagggaagaattagtgtttaatgagtatagagttttagttttgcaaggtgaaaaagttccagagattgttgcacaacagtgtaaatatgcttaacactactgaaatatatacttaatggccgggcacggtggctcacgcctgtaatcccagcactttggaaggccgaagcgggcagatcacgaggtcaggagatcgagaccatcctggctaacacggtaaaaccctgtctctactaaaaatacaaaaaattaaccaggcatggtggcgggcaccagtagtcccagctacttgcgaggctgaggcaggagaatggcgtgaacctgggaggcagagcttgcagtgagcggagatcgcgccactgcactccaacctgggcaacagagcaagactctgtctcaaaaaacaacaacaacaaaatatatacttaaaaatagatggtaaatttagtctttttttttttttttgagacggagtctagctctgtcaccaggctggagtgcagtggcacgatctcagctcactgcaacctccacctcccgggttcaagtagttctcctgcctcagcctcccaagtagctaggactacaggcgcatgccaccacacccagctaagttttgtatttttagtagagacagggtctcaccatgttggccaggatggtctcgatcgcttgacctcgtgatccatctgcctcggcctcccacagtgctgggattacaggcatgagccactgtgcccagccggtaaatttaatcttgtgtgggtttttttttttttttaaccacaatgaaagatgatgccaagtcctagagttttaataggtgcaaaagcattatagaaagttaggtctttaaatatcacttcaccatactatgttccactagctaaaaaactaatttctggtaatgttattggagtgttaatggcttaatgttttgctctagtcagataacacatttccatcttattagtttttaagtgtatatcatcttaacttgaaggaataactcttaagatggaaatttagccccatgagagagtacttagggcaccaaaatggatcctaaaataattctatttcagcagatccctggggccatttgcagttggtgggtctcccctagagcactagaacatgttttggtttgcaataaatgatactggtgttcctagtcctacagtaagtaacctagagttaaataagttgccagatatattgttaagctattatatcttataaactaaccatcacactcagtatgtaaagtgtgatgaaatataaaaggtaatgtgttgtggggaaagggttaattttaaaattagaaaataacaacctgctgttttgagctttaaaaataattttggaggtgacttttaggaaataccgaaagaaaagagttatggctaaataaatttgtgcaattgctttatatatcagatcttaacctaagttccatcataccctcagaggtcaaaggaataagcccaagaggccattaaaagtttaaaaattgcatgcataccaaaaaaaatgtgtcttcgtatattcttctggatagagggatcatagcttttattcttccttctttctaaagggctaaaaagtgattgactatttgctgacagatcccaaatgtatatatctctagcaccatgctcttgacttttatgtaaagctacttattagatatcttcactggaatgtgccacaggcatctgagactcaatagatctgaaattaaactcaatgtttcttcttataccctgaaacttttctcccttccattgtgtttcctgtaaatgaagggaccatcatttccccaatttccaaggaaaaatctaaggtgtcattcttaatttttcattcacctctggccccatttcctaaatcttacggttaatttcttttgagtctacctctttagtatatctcatatatgtctacatatattagctttcactgcttccacctcagttcagtccatcacaaatgaccagtgctgcaaacacttctaataatctcccaactccagtcttgcccatggctagttcattctgtaaagtacagtctgcatttttgaaaacccatatataatcttgttctattcctgtttaaaattattcagattctccatgtcccctgaatgaactcttgactcctgaggatggccttcaagttcgtactgtattggccttgtctgagccgtctttatttcaagctctgtgcttcaggcattctgaatttactttagtgtctgagatatgccacatactttctttcttctcaacctttgtgcattctcttctttcagctttgaaaactcttttcacccagactcatgctatttcaactgatctcctcactgtctggctaacttttactgtagatgtgaagctttctcttatgctctattgttctctctgtgtacttctcacatgtcacattatcttatcttgtatacagcagtgaagatttgatatggaagggaccctgtttgtcctcctcattattgtatcccctatgctctctactagtggtcctcaaagtctggtccctccaatcagcagcatcaccatcacctgggaaacttttagaaaagcaagttcttaggccctaccccagacctattgaatcagataccctggaggtgtgacgcagccacctatgttttatcaggcccttcaggtgattctgatgcataacatagtttgagaacagttcctctatgccatatttggcaatgagtaaaaataattttttaacccagaggtatctatgatttgttgccacacagtgccagggttgtgttgctaaaaggagctatgtagcacatgtaaagcagctcatatttcttcacagagatccagagatggctgaatgagaggtatctgcacatcagactgcagtgtctcacccagcctgtctcttgtggtcagtgagacaaatctttgaaggcttttcgtctcctctttagagaatggatcgagaggtagaaagtattctgttagccttcccaatgatgataattttattatcccattttatatttcaacaaatatttatcatatgtgggctctggattgaattctggctttgtcacctaagggatatatgaactcaggcaatttgcttaacctctccatgtcttaggtgccttatctatatggtgttaataatagtacttaccttgtagggtcattagaaagtgaaataaggtaatacttgtaaagtgcttgggacagtacccagcatgtagtaagcatccaagaaatagtaactatcactattatatgtcaaatgctgtgctaggtctagggatagagtggtaaacgggacaaaatccctctgtgcatggagtttatattccagtatgttataactgtatagacagaaatgtatttctgtcctacaggacttatattaatgagcttccttgactctcatctttccatgtcacattttcctttctatctatctctatctatctatctatctatctatctatctatctatctatctatctatctatctctatctctatctctgtctccatctctggttcctcccttttcacatatgtacttaattgcctgaatttctcaagtctgctaagtttagcccttctaattctttcctcttcagccctattgctggcactatggtgaagttctcatttctcttctctcggacttttgtcatatctcctaactcttattcctgcttcctgactgttccctctgccactgtcagattaatacccctgatcatgagggtcttttcccctcaraaaccttcattgagttgctccttttttacccaatgaagtacagattccttaaccaaacatgaaaatctctccagagtctggtcccaactaccttatgactcctcttttttagatgcacaggctgtagccagtgattattagacagatcttgtgcttctgggcttcacttctttgcatggcaatgcctttctccctgttttcaggtttccacatcctgtgtaccatccattctttcagggagcatctactgaggacttataatatgtccaacactataaaaggtcaaggagatacaaagatgaataaggagtggaccttactctcaaaggaccaggaggctgagagacaaagaaaagatgatgattttgatgatggtgatgatgatgatgatgtgcagggaatatgcacaatgataatagatctatacagaatattaagagcagagagagggacacatagtctgtgttccaagtctcagcttaatacccctctgctttaagtttcttctaactcctctgtagtcaaaataaccttttcttgtctccttgagtttccttagcacaaatttactactttttttaatacataggtgcatacatatatatttatatctctctcctgttagacttctaattctggaaaaggatatacagattaaattagtagttttcaaccagaggcagttttctctcctacggaacatttgacaatatctggagacaattttggttgtcataactgagagggtatgagtagatagtactattggcatctaatgggtagaagccacggatcctgctaaatatcctgcaatttacagggcagctccccactgcaaagaatcatccaatcccgaatgtcagtagtgctgagggtaagaaactgaagccaaagttagaatcttgcctctgtcagttaaatagctgtgtgatcttgggcaagttaccttccctctgtaagattgaatgagctaatgtatataatgtaggccgggcgtggtggctcacacctgtaattccagcactttgggagaccaaggcaggcagatcacctgaggtcaggagttcaagaccagcctggccaacatggcgaaaccccgtctctactaaaaatagaaacattagctgggcatggtggcaggtgcctgtaatcccagctactcaagaggctgaggcagggagaattgcttgaacccaggaggcgaaggttgcagtgagctgagattgcaccactgcactccagcctgggcgacagagtgagtctgtctcaaaaaaaagaaaaaaaaaggaaagaaaaaaggaagaaattgttctacaatgtatataatgtaagtttggcacacagtaagcattatgtacatgctagctatttatattctaatacatataataatatctattagcttatgatagtagtgttatagataccaggatgaaatatttgtatcttatcacactccctagtttagtgactttcagaaaaaatgttgactaaatgggtagttgtctagctcttctatacatgcatgtcatctagaatcagctcttccatcttttcattgaatcctgtatatatgaatcatcactatcaaaggcacctacctctataggactgtgtcctggcctgctatactactatactaaggaagggaaatagagcatctctgtgctgtccgtaaggtacggatggaccaacaaaggtcataaaaccacaaattccctgggaggctaaataaataagcaatacaagtgagaagcagatcaaaacttttttttttttttaacttgtactgcctgattcttttttcgccttggacttgttgatatctttaataaaagatttaataatcctggattgtggattcctcttttttctcattacgtaaaacacaaaggaaaatatgtagatcaaatacttgcctgtttttgaataatccttcctgtgcgtgaccttcctcctttctacacaatatatatatgcagtctgtaacccatctattgctgctatttattaaccagatgaactaagcactgtcagtgatgtcagtgctgctatattaatttagttacatctttgtatcagtgatctttatccctgtgtcttttcaggctgcaccarcagtacaaacgcttttaatttatgaataaagtgtatggaagcatcatgcacttaccctgtactgactgtttggaataaatgtaaaagcatttttctttgtattctgtaagaaatatttttctaatattaggtaccaggttgtattaccatgttattttaacaaagatctgacatacctggagttgtctaacagctcaacaatgtatttttaattatgatttaaaatattactaaaagtgtggaacccatataaagtactgtcctaataaagtagcaattgtcattttgcatattttatttctctatagagatatttcatacttatatgtattagtcaaggttctgcagagaaacagaaccaatagggtgtgtgcgtgtgtgtgtgtgtgtgtgtgtatttgtatgtatagagaggtttattataaagggttggctcgtgcaattatgaaggctcacaagctccaagatcctcaggatgagtttgcaaactggagattcaggagagccaatgatgtagttcaagtctgagtccgaaggtcagagaaacagtagaattgctggtgtagttctagttcaaagactggcaggcttaagacccaagaaggtttcagtttgagtccaaaggaggaaaacactgatgttccagttctaaggcagttaagtagaaagaattctcttactcagaggagagttgacctttctgttcttttcaggccttcaactgactggaaagggcccacccatgatagggagggcagtctgctttactcagtctactgatgtaaatgttaatctcacccaaaaacactttcacagaaacacccagaatgagatttgaccaaatatctgggcatcctttggtccaatcaagttgacacatacaactaactattatatgatatatataggtgatcagcaaatgtacaattttataacctagttttaagaatgttttattatagtcatgtataaaaattattaacatatagtaactcacttggcatattgagaagtaagtataataaagaatcttaaagcatgggccatatctcaaagaatcataaaccaaaattaatataattgagcatgcaattagtcctttatgctaaaactatgaaaaatgtttttcatatatgaggttctttgaaaaggtatttacacttaagactatttggaaagaagcttaaagagaaatatgatacaaatagtctgcactaggctgtcttgaacttcttgcacatttaatttaattcaacagacatgtattgaatatctgctatgtaaagttctgtgttacttgctaagagggatactaagatatgttaaaaaaaaaaaaaagctgtttccctcaaggaggacaaacaaggactcatctaactatacaacaaggtaatagttaactacgycatcaaagtgtggtgcagaaatataactgtatcatatatgagataatgctttaacctgtttggaagtatttatacagcatatataagggggaacatcatcactggcctatcagtaatggccagagacaatatttttggtggaaagaacagctcaygaaaagctgagaaagaaaaggatgtattttgccaacagaaaattatytagatgtgcctagtgtttaggttgtgataagggaaggagcgatgacagaagaaaacttaaaaatctgcttgcaaaatggaaatagaggaaggtcacagtgagccctaaatgtcattattttaaaatttgaatgtttaaaaattgagagccatgaacatatttgaaaagtggaacaacttttctaatctgtaatttaaaaataatttaggaagcaatgtaagggatatattaaagtgttgtgagactgtaagaagggtacccacttttattacatatatctgactaatttytaaagaggatttgatacagtttatagaattgaaaaataaaggtgaaaaaataggagccgagtaaataaagacaagaaaataagatgaagctgtagtaaggatgctgcaaaacgaaacaacaacaacaaaagcacatggcaagaattcagtattgatagaagtggcccagaagatgagctctgaatctcgacagaaggaaataggaaagatgattacttataactgagatcttgctttttgtgtcacagaaaaaaatagaagcaatcaggactttctctaatatatctctagcagcctccccgtgtgaattcccatatgctctgccatcttactacagatgaactgtccatgctcttctataaatccaactcctccatttgtgctttagcttcaatctccttatctactcaacaatgttcctctagcaatctccattctctcctgcatttccagttttccctgttgaatcatttctgtcagcataaaaatatgttgagtttttttaatctttaagaaacaaacaaagcaaacaacctaaagagaagtcctttgattcagcttccttctccttgtactacgctacccattcattgtgagaaaatgcaaatcaaaactgcagtgaggaaaaacaaaaaacaaaaaactgcagtgaggccaagtgaggtggttctcgcctataatcccagcacaccgggaagccaaggcgggaggatctcttgaggtcaggagttcgagaacagccttgacaatatagtgagatcccatctctacaaaaattttaaaagttagccaggagtggttttacatgcctttagtcccagctatttgagaagctgagacaggaggatcacttgagtgatccaggagtttgaagcaacagtgagctatgattgcaccacctcactgcagcctgggcaacagagagagatcctatcaaaaaacaaacaaaacaaaaacggcagtgatgcagtgagatttattggtcaatttttagattggcaaaacgccaagtctttgtaatacctctatggaaaaggtttgtgaaaaactcttacatgtacaaaaacatgtggaaaaactcttacatgtacttctggtagaaatacaaaatggtacaactgttatgcaagggaatctgacaatatatataaaaactgcagatgatttactttctcatccattatctcagaaaatccatttaagagaaatacttacaaggctgtttgctgaaacatcatttgtagtagcaaaggtttgaaaaaaattttaattctctattaataacagattggttaaataaacagtgctttaaccactaatggaattctatataccatttaaaaaaataagatctctaagcattgatatggaaatacctattgataagttaaaaatgcaaggtgcctgccaggcgcagtgggtcacgcctataatcccagcactttgggaggctaaggcggacagattacctgaggtcaggaattcaagacgagcctggccaacatggcaaaaccccatctctacttaaaatagaaaaattagtcaggcatggtggcaggcacctctaaccccagctactggggaggctgagccaggagaattgccgggggatggaggttgcagtgagccgagattgtgccactgcactccagcctgggcgacagagccagactctgcctcaaaaaaaaaaagcaaggtgcctagtaatwtttaaggtttctgaccttttatgaaaggaggaaataagaatatatattcgtatttgcttgaatttgcatcaggaactttaaaagctaacaaaactgattatgcataaaggatgggctggggaattaggaaaacatctgttgtaataatttccagtcttgctatctcttttaagctctcatatacttttatggaaaatataaaatgatgattttctcaaattgtgtattatattttctttggaacaaaataatctgtttttatagcacttgcttaattttctattgtattttatcataaaattatttcttaaaaattctattcctagatccacatttattctcttggaatgacactgtattggggggctgattatgaagtgcctcagagccaagtaagttaagtttttacagttgttatactttttacatatgttcaattttacaccttatatcatagctcttccacacgtttatacgtgttctacagcatgctgtcaggtgtaccaacattcctatggagtttgtttacattaataatgtcatactttcaggatgaactttcagtaaagtactaaagacactatttttaaggtattcctagaattgtagcaatcactacccaggtttcaacaactcagtctgtgagatggacctggcctcttcaaaaattatagcaagataaatgagcgtgtactttattttatctaatgtagtgactgttaagagggattgaaaatctcttgtctttgatgattcattctactgaatgtaatagcttttttgatgcaaaaactctaggaatagtagccctatgtctcagagtgttgtattagagaatgtcatagctttttctcttggcacttcaaatcgtacatcatacttcacgaccccygtaacagcagacacaggtattaaagtaacacttgctgaggtcttgggccctgtttgccattgggctgcttctagtcattattttctaaaataattctgattcttaatgaccaatataaacatagtagtaaatagtaattgaaaatttaaaaatagctatatttcatcaaggcaagatataacatatagaattaggttttattttaggcatttataagtcaaaaccaaaaataactaggtgtggttttttcttattaaataaaaggaagtaacaagcattttagccttttattctaaaatacaaacatcttaagatccataaaagataaataatattcttcactttgtttggttttattttatatcatgaaaaataatgtatattttctttttctcttcagtttcaattctgtaaatataaatgagaaagttaaaatattactggaaatattggtgtcatatattatgcaacctaacttgtaaaatgtgatcacagtctataacactttatgttcttttctgataactggaaataaagtcaatatcaaatataaatagagagtcaatatcaataaatataaattagaggggaaatataaacttgtattttaggatcagaaatcaggatattttggaaatatttaatattaatttaaaagtatttattaagtacctaccttgtgtcagatactgttagacactaggactatagtgacgcttgcctatggagttttttggaaggaacagacagctaaacggccaactgcaacataatgcaataaatgctatgttagggaaaatagaggatgctatggaaaacagagttgggacttctggttaggcttggagggtcaggacagatttcttaaaggacattgcatctaagctaacacctaaaggatgatatattaataatacccaaatggataagaagtggaagagtcataggaaaggcatttgtttagaccaaagtggatataccagtttaaactcccgtcagcttggatgtgagttttaattgctccactccttaccaattcttgtattgttagtatttttatttttcactattttattgggtgtgtagtggcttcttcttgtagtggttttaatttatatttcttagtgaataatgacattggccaccctttcatatgctctttggccattcagatataatattctacaaaatacgttaactaataaaaaaaaaaccctcacattctggcttgtctgtttgaccaacataatgataatttatatttaaatggtcttgaagcattgcaatattttaaatcttctttaagttatcatgggagtatctaattatatttatacacattgaatgtattacattttatataatattaggaaacagtttattcccccaaatggtgtgtatgtttgtgtgtgcgtgtgtacatgtagtaactgtttatcaaaacatttgaataagccaagaatttcactactttactttatatttaaaaatgcccagagtttttctgtacttcctttctagggaagtataagttaactatcttctgctaatatatttttaaaaaaggtaaaacacagtaaaatgcttatgctgataaaaaggaatttatttcctccaagtatgtgaagtgtgttttagtgtggttcctgtgattcctagaatgatttgtctcattagaaaaaatatttgctcacatttactcactggcttttcctttatttatattcagcctattaagcttggagatcatctcaacagcatactgcttggaatgtgtgaggatgttatttacgctcgagtttctgttcggactgtgctggatgcttgcagtgcccacattaggaatagcaattgtgcaccctcattttcctacgtgaaacacttggtaaaactggttctgggaaatctttctggggtaagctacagttacaatagtaaatatagtcatattttaaaatttagtagatatcacaaaattttctttaaggatactatataggtagcattttctcaatgaagactagaaatggaaaattgaatttcttcttctaatataaattgtttatttgaaacaatacttaaaatttagaagctcattgcaataagtctagattttgtgagaattattcccaaaaatatcatagaatgatagcatgtttgagctgaaagtgtctcctcttgttttctttcttagatcttttcccaaggagcttttagcaaatgcttctattgtgaacacctagaaaaaatgtattaacatgaaaatgggttttagaaatatttaaatgtactttctgttgctttatacctgtttcgtgaccactcatttgtctggatcttctaggtatttcccaaaccttctccactttcccttcttctcggaacactgctacctagtgtatccagggaatccatgcttgtatccctgccagatttccccaagacctggactcttctagtttttctcttgttttggatatgaagaatcccaagaataaccaatgctatatattacctgaaagtcccacctctgttctgcatttctaaggctgtattttatcttgtttgccctatctgatctggatctatactttatctgctcttatccttagggttgtagtcctggagtgttggtccctcttccttgcacaggttacaaatttaccactgccacacagtgttcttgttgacttcctcagaattcctcatcggtaggggtttagttcccatcttaaccaggatgtcagatggctgccaggaatgtattcaaattctgcacagtttttcagttgataacaaacaggcccacagatcttctagacaaatggtttgtaaactctccctcaagaaacctttgcggttctatagtgaagggaaatgtaggaagtagaggccgaataaatggagttcttggttgcccattttccctctttaactagagcagctccagttttatttgatctgtttatatttctgcgtgtgatttttttgaacaaaggtaaagctattaaaaaatctttgaaaaccatctgtccagaccaaagtttctcatattgttttcaatatttttgttttaaaaattcctctatgaccaaataagcttgagaagaaactatttaaaggaaattaaatgtattttcactggagaacttcttagaacctttaatrtactagactatattactaaccttcaagaagaataggcatgtaaataaagcatttcccaaactttcttggtcttggaggtctttttttcagacattctcataagactaatattctttaaaacttcactttatggataaggaaactgatacccaaacaactatgggatttgagtttcctattagacagtccagggacttttttattacaccacactttctctaagacttttgtgctgcttgctaattttactcctatagtaaaattgtgagagatatttttttctgtctttgaatgaagaattttttttctgtcaccatagaaattatattacctatctaataattgcccatattacatataaaatcttcatccctttaaggtttagcatttagttctctttattatagtggatctttattgttcatttatgtatgaaacctgtgctagggattatagaagatacaaatttgaataaaatatttgatctaggagctcttatctaaaatgccataaccatttgcttaattataaaatgaaagaaggctataaaatgatacatagtaaaaattttaacagctatgagagtttaaaggaaaaggatacaaattatgactgcattgaaaaatagcactttgaagctgagcatggtgatgcatgcctttagtcccagctactcaggaggctgagatgggaggactacttgagcctgggaggtcgaggctgtagtgaggcatgattgcaccactgcagtccaacctaggcaacagagtaaggccctacctcaaaaaaaaaaaaaaaagttaaaattaaaaatagcacttcgaactgtatcctataggctagataatctcggcagagggaagtgaacctggataaaggctgtgaaatgggaaagcaggaatgtttggggaacagtatgacatggggtgtattgtggggttatttaatgggagagaaaaatagaaggatcagttggaatcagcatgtagagagcctctcttcacaaagacaaatttttactaagtataataatgctccccttacctttctattgctcttcctcatctcctagacatcactgggtagaagtaactccaacagctactgttttttaagtgtttgtttactttgtgccagacactatgctaaggggttgatgtgcattatcacattattcatcataacaacctcaatttaatagagatacttttatcctcattttagagggcataaaactaaggctaagaaagattaaataacttgcacatagtcacagatacggtaaatgatggagacataattggaactggggtgtttttgaccccagtatattccttaaagcttttgttgcctccagtagctgacagaatgagttagtctttcactggtgtgaaattcattctgagtgaccatcattcttacttaacattaattagcgtgagtaaaagtcagcaagccagcttacttgtctaggtttttccactgatttaatgttataatatttggaccacaattttacttatctgcaaaataggaataataataatatgtgtcaatcatccatattattaaactgttgtaaaagtagttatttccacattaatgagctgctttgyggtccttagaagtttctttgctatttctccctttatttataatatgaggataatattgtctaccatatgaggttgtttgaggattaaatagcacaaagtgtgtgcctagcatatagtaactgttcaataaacaacagttattaatagtaactaacttcaatgcaggaattttcaaagatgtgggatgttagtaatactgtcttttcagtcactgacagtacagtgtaatctggactaacatcatttatgcaacttaactgataacatgatttcagaaatacttccatttacaagtcttcttataggtagaaaacataatgcttgagccttgaatataccaccttagatgggtttttaatccatacttcagcaaaattcactaatggagcaatattaaaacatttctgtggtatgtgcgagtttgtgtgtgtgtaaacaaatatgtatgcatgcttttggtgctagatttaagtaatttctcttcaccattctctcttcttccatttatattgacatttctcctctatttggccacctgaataaaacagtggtctgtccagttttttatcccttatagtgtggagtttgacctaatttgacatactttatttcaagcagataccctttgctaaagctattaaactttaagattacattttgttttaaagggaacttaaaagagcattgatttaaatttgttatccctcagagcgtccatttaaagacttagcatttctcggccaggcatagtggatcacgcctgtaatcccagcactttgggaggccaaggcaggcagatcacttgatgtcaggagttcaagaccagcctggccaacatggtgaaaccctgtctctacttaaaatacaaaaattagctggtgtggtggtatgcaccagtagtcccagctactctggaggctaaggcatgagaatcgcttgaacctgggaggcagaggttgcagtgaaccgaggtcctccaacctgggtgacagagtgagactccgttatatttaaaaaaaaaaaaaaaaaaaaagacttagcatttcacaaatgtaatttctgaagggcaagatctataaaattatttctgaaagtaatttaaattcctcaattcatagttataatcaagagaaagctttattataccaaaattaatgtggtttttaaattataaactaacttaagagtagttagtggttggggaaaaaagaagacttcaagtttactgttttcaaatagaactcattttaacaagtttaatctgatggtattttctagttagtaggttactcttcagtcactgcttcttcccttttaattttctgaaatgaattggccagcactggtctacataaatcttatccaagaatacaaattaccctacaaatacaataggacatagagtctcattatttaatgttacatcctccaaaaactgtgtaactagtgtcattctgtaaacagttaccatgaaaacaaaagggagatccttttgtcaaacttgattttttattacctgtgtacagacagatcagctttcctgtaacagtgaacaaaagcctgatcgaagccaggctattcgagatcgattgcgaggaaaaggattaccaacaggtaagagtatattaataggaaatgtctaggctttaaccttatcccattgttttctttacaaaattatacttacctggctttgaaatctggtaattgagactatgattagaacgtaaacgtacaaactggaggtagggaatgggcaggaacactagctacattaaaaataatttcattaaacttatacagaaaacattattaatatacttaggattcccagagtaacttatttccctttccagtattggtatatcaataataataatatttatttactttatcgtggtatttcatattaaaaatactttttaaagcatgactaaataaacacatgtatatgtttatgaacataaacactactgaaacaaaagtttcagaaaacgtttttcttactgcactctgatattttttatcatatttctttttttttttaaatgctagtaataactcactaaatagattttatcatggagttatcaaatactaccttaggtcatgtgatacttagtaaataaaaactaatgatgagtagtgattttgctatttgtcaatagcattatataattctgtatcctatgataagtattaaatttatttttttgaaagaaatgaatggaaatttcaggccaggcgtggtggctcacgcctgtaatcccagtgctttgggaggctgaggtgggcggatcacctgaggtcaggagttcgagaccagcctggccaacatagtgaaatcccatctctctaaaaatacaaaaattagccgggcatggtggcaggcacctgtaatcccagctactcgggaggctgagacaggagaatcttgaaccggggaggcagaggttgcagttagccgagatcacaccactgtgctccagcctgggcaacaaagagtgaacttctgtctcaaaaaaaaaaaaaaaaaaaaaaaargaatggaaatttcaaacacttgaaataaaagtaaatataattttatgtgacaatttatttttcattgctactttcaggcatggcttatttataaaataaacttttgattttgttgattatctttgttctcttcttatcaagcagttttgagaatcatgataatctaaacattaacagaaatacttttttagatcttgtcctagatcttggggctaggtagaagtaaatgtacagattgcttaaatatattctaacaaaatatattctaattgatatagcttaataaaatagattaaaaagttaagattttaatttaatcagagcatcagagaaacctgtcttacttaaaacctatgagcaactctaattgtgaaaaataaatgtagaccttgactatctggaccaaatgttttacagagtcagaactctcatatctgagaggaaggaatgtgtaagttaaagaaaagcagtaaaattgtttctaagggagtgattttgtaatggtacagttaagtatctgttttggtgcttccattttaattattgtgaataaagactatctgaaaagatattttagctttcatttcattggtatagtaatttatttctggttagatcagagtttttttctaatgcatatatgattagtttatatatgggccaaaaaaataacagtgtggtaacaattttgaaagtatttttcatcctttcttgcaaatatttccttcctatacttatgtccccatactgtacttttgtcactttctttttgtaggtaaaaatatgtttatttttatactattctaggatttgagatagtatatagtgtaaactttagcactaataatagcagcaatttgttaattgatcaaatttgcagtcagtctcctattttagaatcgaataataacaaacttatagatgaatatcaatagcaagctgaaataatcttttgggagacatagtgaacattttaataagtagaacattagatttaaaagacatttttgtttttcttacttatctttttctattttctccctctctttctttgctctctccacctccctctttcctttcctctctccctccctcctttcttatttctctttgttattctttctctaacctctttcagcagttccctactatcatttcctactaccattaagtggccatgttatgtagttgaagtttatttgcttatgtgttacttcttgatttagtaactgtaatgttgtattattaatttttgcagacagtgtatttttctaagaataaaaaatattcacatatgatttatttatgtatatatgacttccatcctatctccctttccagtgtgggtctgtagaaagaaaaaggtgagccttgcaatatttatcaaattgtaaggattatcaaatgctaacataatttagattttattactttcaatggttcagaggcttaatgtttcagaaattaattgttacatattattttaaagatagcaattaagagattatactgagtctatacctacttgataacatatttttaataggttatttgtcatttacatatatacgtatatttgtttcataaaggacattcataaaagttaagctttctggacatatagatgctggggatagggaaaacctatattaagttcattagtttttataggtgttcagtgtatatttgttgactgaacgagaaaaggttttatggaaatactggattttgaagtgtaatatatttgtagtatacttctttaatagctccataaagaaatatgtgagactatggtttatttatttagcctatgttaaacattaagttgtatgcaaaagaaaaataaaacatcttgcctcatattattggaccattttcttattataacaataaaaacatcagaaattttaatccagattttaatgccttttatttgtgattttgtttttataatactaagaaagatttagtattattgtctaatagttccttagaattcttattattaatatgctgttctaatacagataaggaagcgttgactgtcatgactttacaaaattaacagagaaatcaaatccttaagtagattgtttgttgattttatcctctaatagtcatattggagaataaaatctcccttgtatctaaactcaagagaatttgtgagtaattacaattagtcactcaggattaaccaaattttgtttgtgtttctattttttttagtagagttaaaggtcctaatactgaaataatagtcttatttggatcaagtataaggggagagtattctttagaccttcttaaccatcagtgctttgcacagtagtattgcacaagtgctcttttcatttaccttttacaaattcataaaacctcattttaaggacagaaccaatataaatatactaattatagccattaccaggcagaagcattcagcagctaatagtcaactgcatagactaattttaaaagtttaagattgaaaaaaaaattatctcttgaagaagtaattcttctaagacacctaggacacttggcagtgccagttcttaactgtcagtggtcaattgcagcaaagcaaccttgtgatacattattaataaaacattttcttcagtgtgcaccaacctaaaatctgtatgtggtgatagcattagtttattaggctcctgactacaggagtagtctttaataaagaaaatgttaagatggacagggagatacagaattagatggaaagatgtatgcaaatttggggataatgccttatacctagtgatttaattgttcagctcaaatgtaataaagatttttatctataagtaaatgaccttaaaaggtctcttcttatatcttacctccaagatctgtcacagaagctaaagcctaaactagtgggctctctgaccctactttgttacctaatactgccagtgctgattaaatagcttcactgagcagaaagaaatcaaacatttcctgccaagcttaaggtggaaacttacactattattcagatcaacatggtggtgctttagaacttacgcatattagtaatatcatgtttctttcttttgaaacgcacttggacacatttgtgaggatacatggggacttggggagcctcttttaatattgaaatgccatttcgaagtttacttctaagagatgtgaatttttgagtctgggtgaattgaaaggtaaatgatgatatccagtgtaggataatgttaatcacatataacaaaaatagttaaaacacaatgtaatttacaaggaagttttttctaaaatttaactaaaataaatgggatgtgttctattacaaagactttttatattcttgaaatcttacccaaggaatacaaatatgaaatcttttatttgtaaataaagtatatttattgtttgccatttaacttttagcaagctatgcattctccagaaggaaaatgcttagggccattgcagtgatctagtcaagcaataatgttaattggaaatagggtgatggcagtggaattagaatacatgaaataataagatgtctttgagaatttaaatagccatcatttactgttggatttgatatggggattaaataaggtaaaagatttaaggatggtgcccatatttctgttttgaacaatcagttgagtaattgggccacttattgtaataggaaagactgggggagaatggacagttctggatgtacgaagcaaaagatcagttttgagcatgttgcatttgagggtcttctgaaatataagtagaagtttcattacatatgattggaactcccagaagaggtcggtgctaagcatatcaattgggagttgtcaaggtatagatgatattactgccttgttaatggaagaagttatataaatacaaagtgagtagatgaaattctaaaactgacacctaaggaaatccaacatttggatatctcataaaggaagaaaaaccaaagactaagaatgagcagtctgacaggtaggaggaaagcaggtatgtaaagagaggaaagattgagtaaaggatggtcatcataaccagcttttactgagaagtaaaatatgtataccaaaatgtccatctgatttggcaagcagagatcattggtcataactaatgagagttgctaatgtatagagtagttggaggctgattaaagtgggtacaataatgaatgggaagtaagaaatgggagatagcagtagctagggggaaatgtggttaacagaggaagagtttggtttggtttgactatgggagatactagcttatgttcacatactaatgggaatattcaacagaaaggaagaatattgaaaatatgaggagatagcaacagagaattaacgaaagaagtaaagtctttgataaagtaaaattatgaggggggaatccagaatacatattggggattggccttcaactggcaggaaatttcatcgtttaagatggcaaagaaaagagtagacatagcctggcacagtggctcacacctgtaatcccagcactttgggaggctgaggtgggcagatcacgaggtcaggagatcaagaccatcctggctaacatggtgaaaccccttctctactaaaaatacaaaaacaaaattagcgtggtggtgggcgcctgtggtcccaactactcgggaggctgaggcgggagaatggcgtgaacctgggaggcggagcttgcagtgagccaagatggcgccactgcactcgagcctgggagacggagcgagactctatcccccctccaaaaaaaaaaagtagacataggtagtatagaattactcatggaaagatgagaaagctctcctccaacagctccggttttcctggagttatgacaacaccatcagccaaaagaatagggagttaagttagaaaatgtggagaatgaggaaaagtgaaacagtcattgtggaaagtaagcacactgttaacatgtggtgttgcgtgtacaaagtgattgactatgaatttatggtgttgccaaatacccacttgtttgatgtttttccaagttttaactgcttgtttggtagtcaaggtagcaggataaggcagatggttaagttcatctatgtgtggtttatgatccttgaatcctttccattctttttttaaatctattgtgttctatcaattttcaagaatatctctgttctctattcaataaaattttaaattaatgagttccaaatgtggtttgtttaagaatataacatccctaaaatactgtaacacagacatatgtttatcagttttcaaattatcttaggttagaagctggagtctgtgacaatctgtgtctggatgtggtatggtatatttcttggtgttctttatctgatgtgcccaaaatatagatgttatccttatttacacttgagtagattcatgggaagatgaggcacaataaaagcacaatgttttaatcttatccttaagcaattatttgctgccattctgaaatgaattccctttttaaagattttttaaggtaaaatttgtgttcagggaattaaagcttatagttgttacactaaagaggcaattgatgtctttaaataaattaacaagcaatttattattattaaggttttagycattattttatattgtatagcagatagatatcacagcgatcacagaaggtagcacatgaaatcttcagtgtttatgggctattgagttagtgactataaaatatttacccgtatttcttttttcagtagtggccatatatatgcttttttgttgaatctatggattcacaaaattaatttctggatggacatttttggtgtgtgtcacatttatagactactgccttttaaaaaaaagtaaaatgactactgatttttaactatatcaaggactaaagaataagagttggtactttattacaattggcaaataatggtaaattatgttctagaggaaaaaacttttttagtgcatgagggtctgccatggaaacagtaagtttctttcataacttaaacacagtcaaaattatttggatttcaaacacaaagttttctgaaaacatgtctaattataataaaatcttgatacttaagaattcgaaatgctacaatcctatttccatccagaatatagcaagaattctttgtttcttccttaaatgtatgtatttaaaagatcgaaatatactagggctttatagtgatatgacatacatttgagttatacctttagaagttaaagtagttcactatacattccattactgccccaaatcatttcttggatagtgaatattcttccaaactggatagttgtctgcttttttaaaaccaaataattcacatttgatgaatataaaataataccactcaaaaatgtcagttcagtatattgcttttattagataagagacgatgaactatgaaaagttatgcaaacatagtatctctttcctcttccactatgaccatcatcaccatcccatttcacctctgatcttccatttggagcatttaggaaattgccaccactttcattgtcaatagtggattacatttccatttattttctaaaaattgtgtgcatacatgatagawtcttatcattccaggaagaagctctacttctgatgtactagacatacaaaagcctccactctctcatcagacctttcttaacaaagggcttagtaaatctatgggatttctgtccatcaaagatacacaagatgagaattatttcaaggacattttatcagataattctggacgtgaagattctgaaaatacattctccccttaccagttcaaaactagtggcccagaaaaaaaacccatccctrgcattgatgtgctttctaagaagaagatctgggcttcatccatggacttgctttgtacagctgacagagacttctcttcaggagagactgccacatatcgtcgttgtcaccctgaggcagtaacagtgcggacttcaactactcctagaaaaaaggaggcaagatactcagatggaagtatagccttggatatctttggccctcagaaaatggatccaatatatcacactcgagaattgcccacctcctcagcaatatcaagtgctttggaccgaatcygagagagacaaaagaaacttcaggttctgagggaagccatgaatgtagaaggttagtaattctgtgcatgtttgagaaagaattgaagtattttaaatatttttttgaaataaagaagggttattaaattattccacaagtcttattttcactgccaaatttttgtaccctggttagtctcttacttctctgtcaatttctgttctcccttccatcaaaaccctaattgaaatactctgcttccacaaagtcatccctaataaaaatgcccagtcacgttatagtctctcgatatttgggatagtatatttttagattgtaagcttctcaaaggcaggaggcatattttctacttctttttgcttaaattctccaccataccgtctaccatgcactatctcatgggaggcttcagtaaataactggtttgtggaaataaaaagcagttcatcaaaatcagcaatgccggagaagcagaatagcatggttatggtgcattgcttctcaaaccaccagcttcaaattacaaattttgggggcacaactgtagaagattataatttactttgtctggaataaagttttgaatccataccttttgaatcatmgtacattttaggtttacagagtcagcctaggtttgaattagttcctccattagtaactatgtggtctttacttgggcttcatctctccaagtctaaattactccatctataaaatgggcttctcaaagtaggttaattaggtaatgaatgtaaagtgattaatattacattattagtgtgagtaatataaaaataactttataaatggtaatttcttattctagagaaaaactgtttcaaaaatacttgatttcacacacaaaactcaatatgttgattggagtaaaattatgtccaagacatatggatagaggctattttcagtataaatagatgtgacatatagaggctatttttagtatgaatagaagcaagagaaaagaagagataatttttaatctaattctgtacattttttaagattcaagttttatactgcccttgcttcctagacaaatcctaggacatagctgattaaagacgactttaagatctttctagttcaaagaaaagaatgacataattaaggatcatatttatttttaagatcgttattctagtgtaatattttttattaatatatttcctttaaagtattctaaagatctgttgtcctgttacttaagtttcaggcatagctctggagctgaacaacataatttatgagttttgctgtactttgagtaaaagaagctttgcattgttttttcaatttcaggaattgaaaattagtaaagaatttgaaattatggaggaaattattgaatagttaattgatatgggttccgatataacatgaatttttcaaaaacattagccaactttatgagatggttgtatataaccttgatcgaatactttcaaagataggaagtaaaaatttagaaatttatattatacacaacttcacaacttttggaattgtgatagcagagagattaggcactttctatggtttaaaagaaaagtctccttttttatgttgtacaacagctagtatatgaacattaatttagtctgaccttctgtcaagcatgccctcatggaaacaattatataaagaaatcttgtccattgtgaaaaaaaaaaaaccttcaatgattcaaatagataaaaccattatagttttgaaatagaaataatgaagatatgtaccaatctatatgagtatttaaaaggctgaatggtatcttttttttattgtgaatgttaaaaatgaaattataggccaggcatggtgggtcacacctgtaatcctagcacttttggaggtcaaggtgggagaattgcttgaagtcagaagttcaagaccagtctgggcaatatagcaagacctcatatctacaaaaaaaattttttaattatccaagtgtggtggtgcacacctgtagttccagctactcaggaggctgaggtgggaggatcacttgagctgagaagtttgaagctgcagtgatctgtcatcaagccactgcactctagactgtgcaacaaagcgagactctgtctctaatgatagtaataataaaattggccaggcgtggtggctcatgcctgtaatcctggcactatggcaggctgagacgagcagatcacctgaggtcgggagttcgagaccagcctcaccaacatggagaaaccccgtctttactgaaaaaaaaatacaaaaattagccaggcatggtggtgcatgcctgtaatcccagctacttgggaggctgaggctgaggcaggagaatcaagtgaacccaggaggtggaggttgcagtgaaccgagatcgcgccattgcaccccagcctaggcaacaagagcgaaactccgtctcaaataataatcattataatttctaatgtttttatgtgtgatctaagtttcaaaacattacttgtcttgatatttggtaaattagtagtaatgtgaattagcaaagcttgagattttttttttatacttgaaccttggtttgagagttaaacaggaaaaacatcaaacattaatggaaacgtatttaatctgttaaattataccataatagtctatttaatatatttcgtttgtttttcattaccaataacaaaatatattagactattgtagcatatgattctattatcttctcagttaatgtgtatgcacatgtgtataagtgttaaggaaactcagaccatcttatttctacatatgcttttatatctgcaaagatgatacataattcttgtagagccttatttgttcaaaaggtaattacgtatttgatacatcatttccagatttagaaatttcgtatttgttataggatgcacaaacaaaagaaaagctttttaaaaaaaaatctgctttcaattgttcgatataggacaatcttgaaatctttttaactagggttttcaaaagcatttgctctcatgaagaacctacccattattcccccagaggatattttacaacccagttaaacaaacacctaaaaatgttggattattatggaaatacactaccttaaacctccattattrtatagtaacttgaaagcagcaataaattatgtttgctttagactacaggcattaatcaaaaggaatgttagaagtttagaattcaaaagcactaattcttactagttatttagttgagtaacttgctggtcttatgctgtgctttttctaaaggtgaggtaatttatgttgcaaacaaggctgggcgcggtggctgatgcctgtaatcccagcactttgggaggccagggcgggcagatcacgaggtcaggagatcaagaccatcctggctaacacggtgaaaccccatctctactaaaaatacaaaaattagcctggtgtggtggtacatgcctgtagtcccagctattcaggaggctgaggcaggagaatcacttgaacctatgaggcagaggttgcagtgagccaagatcgtgccattgcactgcagcctgggtgacagagcaagactccgtctcaaaaaaaaaaaaaaagacatgcgcaaacaaacgtgcagcttgttaatatgaagattttagctactatacaaagaaaaaagaatagaaaatcatgtaaatcccatttttctcatttaattctagtgagagacaggcttcacagatcccttttatgtgtgataaatcaagcagaactgtaaatatcaatgtatacattttattgtacacatttctttcttaaactatttgtgttttaaaagttttaaaaagaaatgttttgtacaatttttgtgatctttaaatttggcagctgctaatgggtttcagtaattatagaattagaagaggtcttagagcacatgttatcgaaacatattcttgggcttgtaaagatttaataacatacctaagatcacataatgagttaaagatagagttttattattttggagattgtagattttcatcatggattttcagaatatcagtctaaggatttcccactacatgtgacttaaaaaaaaaaaaggatgtattctcacattccttgagctgatataataattggaagaaacaaaattgctaaattttaatttgttctttgggtgttctaggagggttattgagttaataaacagttttctcctccaacctctgataatatagctttttccttaacccaggccccattctcttgaaaggatcctttacctaaataatctcctcagcatttccccagctaacaacatcaactagctaactagcataagggacacaagaccttcaaatcatggaatttggaagtggaaggaatctggataccatttaaaccaaacatctcattttcagaggtccagagaagtagactagtttgccaaaggagatacataattcataattcataacagagccatattttgaatcccagtctctagagcccaattataagattcttccactctgctgtcctgatttaaagaagagaccagatacatgtcagatacatggttgaaaagatgttgttactgcctgggacattggacattcaactaactgccttccaagtcccttaagtctctccttaaaaaaattatataatttttaatacagtgaaacaagatagtattaggaaaggctaaaatgaggcacttttggttttttctgtattaaaccataaggtgcaggggttaaggtggaactccattatgttatctattgtggtagatagtattttggtggggttctactatggtcgaatctttaaggcagctaatcctatgactgaccagataggccataaattatcaaaaagcagtgattggcattgagtggtctgatttctttgggaacaaaatgagataggaacaaaaaagatctcaagaaagaaattgtagttgaaattgaaaaattataaatagaagattattactgcgattattaagttaacttttcagatagttctctacatacgtaaagcagtagggaaggggcaggaagaaacataacttaggtttctcttgtagaaactagttttaaaatttgatgttgcccttttttgcttcattcttttaattctacttttttttcacctcagcacaggactatctaattctcctcttttttctcagtattttattttctacctcttcaactccatcccaagatctgagtagttgtctgttttctaataggagtatctgacaaatgtctctttctgtctttcttgtaatgtgattaccatacacgccctatccattgctctgtgggttggcagtagattcctgattatgagagattgacttggaaccagtactgtgagtacagagtgagcagtactcccacaccctgggtggggatcattaatagcatttggcttccaacagttgcaactcctctgcattctgcacaatactagaaaggaaagtatgaagaacagatacaactaatttctacaaaagtggctatagttaagtgttatttgtttaatgggctgttaatcaacctagttcacatcaaaatgaaatattgttttcttccttctagtagtgtgatctctggtccyagcctagttttgctatcctgtgactgccctgtgaacacagcttagactctatgttgtgcaactagaatatgtaaacactcaagtatgggaacccattctcatttgaggaaccttaatgtttcatttgagaagattgaatttaaaagtttacattcttacagttacgcttaagaaaagcaaagggatgaatttataagtgtgtgagttcatgttcaagtattatgtgtggtacttttagtatcttaataattttatggagatatatatattttttcaaaacatcttttttaaattctaaaactagtatttctttacttccctttgaatagcaagaaaaaaatgattgagttattatttaagttactccgtgagctaaaataaataattttaatattaartttctatttgatttatatcagttccacaaaagtaaatgagaataagcagggattttctgtaatattggtcaaataccacatgtatttcaggcattaatgacttaattactagattaagaaatcttaagtattagattataaatgagatgcaaatatattttgtttctctgaattataatgtagatagaatcaacatcttagaaaggaaagaagtgtctactgtgtttccatggctggattttaaagagatttgtaatttagaccagtattgtccaacagaatttcttcaatggaggaaatagtctatatctgcacagtccaactcagtagctactagctacatgtgactatggagcacttgcaatgtaggtagtgcaactgaggaactgaatattttatttaaacttacatagttacatgtggctagtagtcaccatattggacagtgcagctttagactattcccatatgatattaggtcagtataaaataccaacactcagttgaggaaagagtggctttagaaccatttgggagatggtgagcaataaatcgttatttagtttaagtaagaatacaactgagaatgtatatttacttctcttctttcggtttatccaagtggaaaaataaaattacatttttaaatactagggaaaattaaaggtcaaaccaatacagactttccagtgtctgtactcatgataacgtgagatcagagttcacagaaataatatgttcctttattggaaatgagagacctaatttaaatctactcatagcatggttcacatagacccagtttggctttgacatagccactctctaaggacggattgatatgtcttaagaaagatcgaaaatggatcttactaacaataggtatcatcacattttttaagacccagcaattttaaacttaagtgtttccttatttcatcccagtccccttgtctctccatttgtctctctgccgtgcaagtttgaatacctttattctctgctatcagcyatttaccaatgttccatcacctgaacaggataaaattctagctccttggatcatcatacttaaggttccccatgattatatctctcctctcatcttttagcatttcccatatcacacctcatactatcattctctccctttctccctgtctccctccctccctttttctttctctcctccccactcccttctttcttactctcttacacacttttcctccctccttgcctccccagctctgaatttgtgtgtatgtagagaaaaagaaatacatacacacacacatacacacacacacacacaaacacacacttgtgtggatggatgcgtggatagatagatgattgattgatagatctacctgcctacttacctatctacctatttataggccattttatatttccttgcctttattcacacagcaatctgccttaagattcaaagctttcggacactgatgtttcaggaatctttctctcacctccccagtttaggatgatgatgggctgtttttcattgaaattattgcttttcaggagcttgtctttcctcgtacagacctcaaaaatttggccttatctaattcatagctgtatccttagcatctgccactatacctgacatataataggtactcagtaagtgtttgttaatataaatggagtattacaatgtggctattaaagaattttaatatatgcagtggtgctatttcagataatgggttacaacaatattctctggcaagttatagtgaggacaaatcacacctcctcttcctccgttttgtccaactcataagagtaaactcacatacttttcacatataacctgaacaaccaacagagaatgtaattcatttcctattgaactctgtactctttgaaagttttgaaaaagacagtgaagtcgtaacaacagtgaatccttgaagattctgaaagagtgatacagtgagcctagccgatgtcacagcccagctatgtggctactatatcacacaagacccccatagaaggaggtggaaactgttcattctttttgatatccctactctgcatatattttagatctatagagtgactaacagtttgtttacagagcacttcttcatatatccttctttacttacatacattcactcttgtatgagctttgttcacccaggttaaaaattttattcattatgtctagctctcaagggattttagaacatattctattgattgcaatgtggtgtaatatggaatacagtagactaataaacacaaaaggtacagtcgctaatctcccaaaattattctcccataaaggaagcatagaaaagaacacttaatatatgaatacataatattattactgtgtttctctgctttgtttgaaaattgaaatattttgttaggacccatatcyttaaaaatgtgagattttaaaaatgttttatacttctgcactacaaaagcagtcattttatttctcttcgaaacttgtgtctgtaatttgggtcatgtattaaaggtaaagaaatgtcaaggtaaaagtggttatttaattcttgttgcaattggctgagtctcactttctgcatattacttgtctgagcttgaatatgtgtcacttgtaaatggtgtttctagattacaatttgtgttggcttagattcatcttaatgtgaaaattgtagactttaatgtttcatttgaaatagctttatataaggccagaatattatgcaaatcttcataatccaagtctgatctcctaaacatttaaagtatagtgtacatggtcacatgccacaactttatatggtaaaagtgctaattgtgttaagtggtggtagaaattgagactttcagttgtcaagaacttatggcaaaacacacttgcctattgaaaaatggcttttcattgttgctgtataaatggcatcaatataatagagtcactgtgaattttgttcagaggataagattacagataaaagctaataaaatatttgttaagtttttatacctcattctgacaaaaaatagtatactcttaattatggtaaaatagtactagagatgaaaggacatcttctaatgattatagaatctgtataactagacttctgtccaaatcttaattctttgttttttggtttttttttgagagagggtctcgctctgtctcctaggctaggtgcagtggcatcgtcttagcttactgcaacctctgcctcctgggctcaagcaattctctcgcctcagcctctcaagtatctaggactacaagcatgtgccaccacacctggttaattattgcctttttttttttttttttttggagagatggggtttcaccatgttgctttgagtcttaaggcagattgctgtctgaataaaggcaaggaaatataaaatggcctataaataggtaggtaggtaagcaggctggtctcaaactcctgggctcgatcaatccacctgcctcagcctcccaaagtgctgggattacagacgtaacccaacatgatggcccaaatcttaattctttaagccattcttcattagtccttattgttttcattctttcatgactattctacaaaatggttttggagagaatatattgatataagttttatgtgtttatgtacatttatttacacacaccctatatggtacttcttttttggtgacatcacatttggtgatgtactaaggctgattttactctcccattcrctcttttcttctcattaatatttctaacactgtgattttttgctgaaacttcattttctgtaactgaaaactaaagtactcataggaagtcaaaaagaaggaaattgtctagtaaaataaggaataattatgattctaaatggaccctagtacactaatttttacattgtaggcttcacttagatatttactagctgagaaaagaaatttgcaaaccaacaaattagatattgagaactaattttcagccccacaaaaggcaaataaattcagtctgacacctgtaatggtgaaagcttaaaattttaccattacagttataacattgcaatgaaggtggctacacatgcatttaatgtgtattggttatcctaataggtccattgcacatgattcaagaattttggcattcagaaaactttgtaatattctgtaagtatgtagaagcatctttttggtttaaaaaaatagtctgatacattctagttaaaataccagccaggttttgttggtactgggaaatgggtacatgaagattcattatactctttatttttgtgtctgtttgaagtttccataataaacagttttttgaaaatcacccgattaataccacattcctgggatctgtatcaaatctaaagtgctggaattatacactcaaaaatagaaaacatgtttgtgtgtctgaatcctctaaaaagaaaaatarttagtaatgttagcatacctcattgacaattagatattacctctcttcaacagaccagaacagaggaagaaaaccacttctatctggttagtgcctactagatacctttatgtgcaggtcatctcagagaaccaagaaatgtttctgctcagatgacttgtaaacatggaaaatgtgcctctccatatataccactgcaagattctcttggtaaagaacatgtaattttataacaacacctgaaaacgttaaatttattattcataaattttccaagacacacttcagaacacaagaagctcacaaaaaagattcttactacttcagttaacatagatacacccacccctaccccagtatttgaagaaaaagaaaaaagtctttctacccctggtaggcaaagcaagttatcccatttgtgttttggagtaccagtgctctattactataaagcagtaaagtatcataaggtaataacctcctccccgaaggtgtattactgaaaacatttacagaccaatagttcatgaagagaaaatgatttattatgtttttaagagtggttagtcaaagttgcatttgtttgttttacagaaggaacccagagattgaaaaaagtttattagtagtgtcagaatgaactgaagaaaaaagaaaataaaacatagggtagtagtaagggtgaggaaatatggatatgtgaaacaatataagaacaattataaagtaccaccaaagaatggaaattcagattaaaatttatttatgatcttacagccactttgcaaaaatagctgtgaaacagtaaattcatttattacttaatatggggtgtgaaattgtaacaaggcataacatccaagtgactaaaagttctttactcattttattgaacaggtttattgtgacttctacttttctctgtaaggtattaaaaccatactgcctgtttagatttggttcttatccatggccttattggtcttattgtcctgtatgttgcaattccgggtttgcaatttggttaagtttttttggaaaagtcccttaaaaatttagcatgaggattctgtaacaataaaacaaatgtactttggtgttccttgaaaatggcagttcctcttaagtaaaaatataacttgcatataatgtactgtattcattcaatttaaattagtattaaataaaattattgttttccatctctacagtccattcaaattacattcataatgagccagaggattattttaarttgtttattttatcataagactttcctgtggtaggatgcaatcatttagaaaaaaaaaagtactggtaaataccttgatttttcaattctaaaactcaatggtagtattattgatatttctgttcaccatacacaaagccagacaaagtcaagtatgcaatattattcctagttctccaagtaaacattatcctagaaacagtgcagaactttctgtccatggagtctgtggccagtcatctatacttcttctcgcatttatttaaagctttgtctcaatgtgactcttatcctttcttggggcgtgaactctcaatttccagttcatcatccctattctggttccacaaacctggtttctatggtaccatttaactatttcacttattattctttttctgttaagaatctctattaaacaccttccaacataaggaataattcatcatgtgaatgaagactgtcctcaggtttgcagactagcaaaaaagaattcctcacccaccttgattctctactgccgtgcacttcgtgtcactccccagttttagatacttcccagggtctcctttcttcagtgtcaaaaaaaaaaaaaaaagacacaagaaaattctaattggttccactaaaatttaggtattctagcctaccctacatcttcatggctacatgaaagctttcatgtactttttgctgacttttatcaacattgttcatgtcagaatttctttaatcttctcaagccttagccaaacaggctcccaagaggtgattgactttttatttccaggcaacattatgatatgaatatcttgggattgcctctgtattttcaccttttcccttgtctgttagttacctcttttaagaaggtacgatttttcctccttgccagtctactcgtcccacatgtgttcttttttccatctcctgtttccttcaaaacattttttttaatcagtttttcccactaccatttgcaacttcagtctctcccactcaacgggcttattatccaccacctgaaatcaagcacagacattcttctgtgggggggaaaatctatttttttaacctctttttgcttcccaaatcctcaaaattcttgaaagaatactggatactcattctctcaaattcttaccatctagtccttctttaaccctctctgatttggcctctgacctgttcatgcaatgaaaatagttgtcttaaaggtcaccaatgacctttatataccacttatatacatttattcactcagaaaatattcattttgtgcttgctatgtaccaggtacttgctagactaggtactagaagtacatctaaaaaagacaacattctttttctcagagaacttataatttagttgaggaaacaaacaagtagagaactacaaagtagtgtaagagttgcaattaagcatgaggcaacgtgaaagtaagaggagcaatgtctaactcagcctttatgtggtcatagaagcttttagatagaggcttcctttaaaggttaaggaaaaaaaagatattcaggtaaagaagaaggggaagagcggtgtttctaacagaaggtatccttcagaaaggaagctaaaagttaatatgcttttgattatctgcaaatttagtaacacaggtacagaattcgtttagggaagtggatggagataaggcttttacctgaattgagtttttaaatttatatttaaattgttgtgtttgtgtrtatgtgtgtgtgtatatacgtgtgtgtgtatatatgtgtatatataggagatggaaaaaatatatgtgtgagtatgtgttcccactcctcaaaactttgattatatatatgtatgtgtgtcttttatatattgtgtgtatgtgtacatatatatactttttgcccaattctcacaaatgaatctgtgacttcaaaatataaagagacactgctataaatgtagttgggagccaggcgtggtggcacatgcttctagtcccagctacttgggaggctgagacgagaagatagcttgaacccaggagtccagcactgcggtaagctatgactgcaccactgcactccagcctaggcaacagaatgagaccctgtctctaaaaaataaaataaatctagttgaggaccagcttataaaaggctttgaataccaagctaagaagtttttttaaactgtatgttgaagactctagtttcaaggattttaagaaatataatagctcagattttcatttctgggaagttaactttctataatgtgaattatgtaaaggagcaaaactgcagaaaggggatttaggagacaggtagtagttcaggagtgacatgaatagtgctcagtgatagaaacaatgcagctgaagaagaggggatggttcagaaatacttagaaggtaggatttagattctagtccacacttgcccctgggctcggccctcttgtacagtgcacactctgcacaaacctacacagtacccccttccaaatgcttatcttattctggtggaactaagcattctgtgtcaatattggggtacttgtcttccacatttcaaattctttgagattgttgtgtctttagattgtctattccttatagaatctaacagagaattacacatagtaaacattgaaaaactgtgataatgatgcttacatagtgtgtgctctgaaagcttcgtgtatgttaattcatttaattctcacaaccttatgcgatgtgcactattattataccccctytttggctgaattaaaagaagagtcatggggagattaaattactttcctaaggtcacacactagaaagtggtggaactgattcaaactgaggcagtctggctccagagtccgtgctcataaccagtatactaaacccattattggaacgcattatttgaatacactccagcrattggtaaatttaaagcaatgtataaaatgttttagtcccacaggattaaaattaatattttgatttatgtggaatagctaatgagtttgctttctratctttttgttttaatccttttagaaccagttcgaagatacaaaacttatcatggtgatgtctttagtacctccagtgaaagtccatctattatttcctctgaatcagatttcagacaaggtaggaggcatctgaaacaagcaaactgtttttaagaaaccacgattattattattttcartagtgttcaaatattaatataaattgccagaaagaataatactgtataaaattgaaaaatttaaaaaagctgctggttactcagtagtagtattatagaaactaaatagcagtttcttcaaataacgatgtagtccttttcattacagagataataattcattgtctttaaaagtaacatgatttacctcaaaagagtttaataacattatgtcattaattttgttctgtggattagatttgtacaactctatgtctgctaagtgtttgagttttaaatgaaattactctcatgtttctatcacctgtgccattatttctttttcattcataattagtgagaagaagtgaagcctcaaagaggtttgaatccagcagtggtctcccaggggtagatgaaaccttaagtcaaggccagtcacagagaccgaggtatgtcatgaaaaagtagtgatgatacatttccagtgaccagtgtttgttttttatttgaattaaatggaattttttttttttttttttgagayggagtcttgctctgttgcctaagctggagtgcagtggcgcaatctcggctcactgcaacctccttctcccaggttcacgcaattcttttgcctcagtctcccgagtagctgggattacaggtatgcaccaatgtgcctggctaatttttgaatttttagtagagayggggtttcaccatattggccaggctggtctcgaactcctgacctcaagtgatccacccgcctcagcctcccaaagtcctgggattacaggtgtgaatcaagtagaatttgtttttttactatcctttttcctttattttttgcattttccttttctcttcctttcccctagctctctttgtttttataaaagttctcagaaattcatcaattatatgaaagacaaagtattggaatcttttaaaatcatgattggctctaattatttatagttgtgcttgatttttaaaattatcaatatgaatataaaataacaggaaggtcaaggcatgggattaaaaatctgtgagaagataggaaaccttgatttctaagatacctttcttgaaaggttggaatagtctcagccagcaagctttcagtgagtatttatttgttgaatgaatagtgagtaggttactactaagtaacctattatgtaaaaggttaattattcactgtatctttcctggcttaaaagaggttatgtggtacttttttttaaagcctgatttaggctatttagagttcatttttatactgacatacttagtgaatttcttataaggtgttagtattatgtttgtgctcagcttaggatggtggtattatagctgtgtgttgatttatgttgtttaaactgaaaggtgtcaagtcaatagtgatgtgtgtctttgtcgtgtatgcccaggtcccttacatgaacaaaagatgtagttaatgctaagcattaatttcaaatttgtaatatattagagaacaagaggttgcttgagaatttacttctaaaatgtgggaatcctttctaattctgtatttcagtttgtttaattcagatgctaccaaatagaaaagaatcatttagaaataaacagaaacttgccccttagctaattaattctgccagacactgtttcacacctgtaaactattaatagatcaggtaaccctagccatgtgattaaaacagactattcacagtttagagtrtacgtaattaaatactttacactaaaattattctttagttaatggtccactttttttttttttgagacagagtctcgctttgctgcccagactgtaatgcagtggcgctatctcagctcactgcaacctctgyctcccaggttcaagcagttctcctgcctcagcctcccgagtagctgggattgcaggcacctgccaccatgcccggctaagttttgtatattcagtagaggtggggtttcaccattttggccaggctggtcttgaactcctgacgtcaagttatccacccacctcagcctcccaaagtgctgggattacaggtgggagccactgcacctggcckaaaggtccacttttaattaaagttgtttcttttgttttttgtactttttaaaatagtctataatttttttctttgaggaaaactccagtaagtattcatttacctaaagcaatctatatttgcataatagcattttatattactgtgtccttgtgatgaccccattttgatacttttgaacaaagaggtaggagacaaagatctatgctttacgttacagttttctttttattttttaacatttattttcggtttgggggtacatgtgaaggtttgttatataaacacgtgacaggggtttgtatacatactattttgtcaagcaggtattaagcccagtacacaacagttatcttttttgttcctctccttcctcccactctccccactcaagtagaccccagtatcagttgtttccttctttgtgttcagaagttcttatcatttagctcccacttacaagtgagaacatgtggtatttggttttctgttcctgcattagtttgctaaggataatagcctccacctctatccatgttcccacaaaagacatgatctcattcttttttatggctgtatagtattccattgtgtatatgtaccacattttctttatacaatctgtcattctgaacatttaggttgattccattctttgctattgtaaatagtgctgccgtgaacattcgtgtgtatgtgtctttacggtagagtgatttatattcctatgggtatatacccagtaatgggattgctgggtctaatggtagttctgcttttagctctttgaggaatctccatatcgttttccacaatgattgaactaatttgctctcccaacagtgtgtaagtgttcccttttctctgcaacctcgtcagcatctgtaatttttttactttttaataatagccattctgactgttgtgagatggtatctcattgtggttctgatttgcatttctgtaatgatcagtgatatgaagcttttttcaatgcttgtaggctgcatgtatatcttcttttaagggtgtctttcatgtgctttgcccactttttaatagagttgtttgtttttcttttgtaaatttaagttccctgtagatgctgggtattagacctttgtcagatgcatagtttgcaaatattttatcccattttgtaggttgtctgtttactctgtttttctaatgaagcaaaagcatgtggggatgaacaacaaaagtaagccaatattgaattgcactaagctcagtgttgaattgagggagaatgtgttttagaagtgacttttctctatgcatctaatttggaacytatgagtagttactattatgcccactttagccaattgaaaactcttgcttttaatataaacaactgaaatagagataacacctgaagaagcactgggatatgtgttaacaattgatttacagcccatttggtttggatttttaaattttaaaacatattcaagcgaaattaaatcattttgggagccttatgttaattttcttgataaggaacctcaaaaatgtcaaggttatgagagaatcctaattttgattgtttccagattttattcaaggaaacattaaggccgccatatttgtcaaatctatgtttaaggggtaaactgtcttttttttcatacttcatggggagaaaaagcccatgtggtattcatagcatctgagttagatataggtttaggtgaaagaaaaatatttcaggaagtagattgttagttgtatgtatgtattatctaatgttaagttgctaaactctatttcttttaactagttccatcttttttctgcccacttaaatacatattagcttaaaatactgtccaaattcctattcacttgcagaacacactctgataatatccctaacatgctggtacgtaatcaggagtcttgttttcttctttaggtcacacatttgtaaaatctatgaatagtgctgtatttgtacatattgcatgcttcttgacaaaagtttctattccctttagctagaataaaatggcaaaacagatccagagagtgctattgatttgtaccatagtgggatggggggagattaacaggaaattatgagtcagatgcagcagaatgagtaatttttttatactgagctatcaaaagcgtctttcagtgaccaaaaagggcattcaaagtagtttccaaagagaatttctaagcctttttatgtactagcttttgaagtaagtttatacgtagtacattcccactgcttctgtgcctctctgcttgttgaggtaacctttgtttctgactccaaacagagttgtttttgtttttgatttttgtctcaaactttgcagtttttatagaagttttggttagatatcatatttggagagataacaatgataattattttgctaccttttagtagctctgctgtaaaataattttagctaaaagactgtaatattttatgaaaataacaggtttgagtttaaatgtgcagattcaaggtcttattattatctttgaccctccccttaagtgagagagggccataaaattacattcagttattgactttacaggtaatcattgagcacctgccatgtactaggtgctttcagatactggagatagagttgtgaacaacacagaaagtcccttgagggaaatgagaagtagccaataaaccatgaaaaagcaagtaaataatatactgccatataatgatggtgccttgaagaaaaataaggctacttaaggggatagggagaacggggagtaatgtccaaattctgttttatataggtagtatgatcagtttcattactagaacaagaggctcctaacacccaagagacttcaagggttttaggagctctttgtcaggaactggggacaaagatcatatatgtatttccttcccttcccctctccctctcccccgctccctccccctctccctccccctccccttcccccttcccccttcccctcttttctcctttcctctcctctcttctgtcacccaggatggagtgcagtaataccatcccagctcactgcagcctcaacccccttacccccaggctcaatcaattctacacctcagcctcctgagtagccaggactacaggtgtgtgccaccatggccagctaatttgttgtatttttttgtagagacagggtttcaccatgttgcccaggctggtctcgaactcctggactcaagcgatccaaccgccttcacctcccaaagtgctgggattgcaggcatgagccaccatgcccagcctatatatttcttcataccatactgtgtaatgtaaagattcttctgagatgggaaaataaaatttgtttaaactcttgcaaccttacttaaaatgaaatttgcttgattagccttaaaacaattgttttcctcccaatcctcacctgtctcctcttttctatatagcagacaatatgaaacaccctttgaaggcaacttaattaatcaagagatcatgctaaaacggcaagaggaagaactgatgcagctacaagccaaaatggcccttagacagtctcggttgagcctatatccaggagacacaatcaaagcgtccatgcttgacatcaccagggatccgttaagagaaattgccctagaaacagccatgactcaaagaaaactgagggtaagttgattctcaggttactacacatctaaacctgctctcacagggaactcttgggcaaagtacttttaaaaattgctacaggtatccatctaaagttacctgtagatgaaactgaaatcccatattcatttccactgggattaaatatctttttggttgattttaaaataaacatttagctattttcattattttatctaaaaaatarcttagatgaatttagagtgtcctaactatatactttaaaagtatattcataatccttaaagttaactagctatcttcattattgtgggggattattttttcatattaagaaatttattattccatatattgagaagatcagacatggaaagttcaaggttaattccaaagttcaagaatgttatcaagtgcatttcatcttgctgctctgtgattctcagaattttagtaataattcactttctggttaaaagaggactccattagctccaaacatcatatcctcacatttacagtatccaaagacaggaaggaccaagtctgtatcttgtatcttgtgggtggatatttttatgtatctgttcttctagttgatgtatttttctttcaacctatgacaatatatttttataaacataaaatcaaaatgaacagttcttttctcatgtaaaatatcttaaatgttttacaacttctacattattgttagtgttataaaatactttattatgtgactttactgtgtactgtaatttctttagtcagttccaattactggacattttaaatgtttctaattagctgttgaaagtaatgctctaaagcagggctccacaggccagcattggtccatggcctggtcacagcaggaggtgagcaaggagctagcattgccacctgagctccacctcctgtcagatcagcagcagcactagattctcayaggagcatgaaccctgttgtgaactgcgttgcatgttccttatgagaatctaatgcctgatgatctgaggtggaacagtttcatcccaaaaccatcccctcctacctgtctgtggaaaaattttcttccacggaacctgtccctggtgccaaaaagatcggggacygctgctttaattaacatccctgcagctaactcattgcagataactttctccaagtaaaatagtcaattcaaaggcagacaccgtttaagacatttgatacgtattgtcaaattaccctcccaaaagtttgtgccagtttttgcttcctatgatcrtgcctgtttcttcatattcttatgtattctggatattatcattcttttttactatcatcagcttgaaaggtgaagcaatatttcatttgtaacattagtttaaaataattcttaaaaagcaaaataaataatagtaaacctggtaaaatctagaatgatttttttctttttagttctgcactaagaaattgtattaccctatactgttttcattttctgttctttgcttcagagaattatcttaaaagcacatttgtatgctctgaagwtaatagaattcaaatttccttcacagtattctaaggagaaaaagctgttggttggtgaaaattgcattgaactacaaattggaagacatgtattctattccttatgatgctgttatatgactttatgtaaattttaaaacctctttattcctcattgtgctaatttttaaaatgtggaattggattgtagtttrtaaaacactatccaatttttaaagtttttagattccaataaaatataactgaacatatttcaggtaaaaggaagaaactcaatagggcttcatcaattcattattaccaatatctacatcaaaactaagtaataggcaggatgtcatacaatatagtgtggacttccaatataataattcagtgaacagcacaaactgcacgtacatatacacccctttttcctaaaccacagttttagagagctaagctagactttggttcattcacaattcataaattatagatcgtacctttatagcatgccactgtgatatgtcatctcgctaaaaacctgtttccttttttaggcagtcaatttctagctatttcaaaccaaacatttctttgccagagatattttgtgtcagtgattagataatttgaactactggtcattaaaagactacctagtattttttctgaaaagagctggaggttatatttttgaggctgaaaagggtaatggggtttggaggtacagtttgaattaatattctttcccacagcataaatgtttaggatttttttttcttttggtgcagacacatcttaacttcttcataccctgtttccatagttgatctttattatattctgtgtttcccatggcagaccactttcattcttttttttttattattatactttaagttctagggtacatgtgcacaacatgcaggtttgttatgtaggtagacatgtgccatgttggtttgctgcacccatcaactcatcatttacattaggtgtttctcctaatgctatccctcccccagccccccaccccccaacagaacttggtgtgtgatgtttcccgccccgtgtccatgtgttctcattgttcatttcccacctatgagtgagaacatgtggtgtttggttttctgtccttgtgatagtttgcttagaatgatggtttccagcttcatccatgtctgtgcaaaggacatgaactcatcctgttttatggctgcatagtattccatggtgtatatgtgccacattttctttattcagtctatcatcgatggacatttgggttggtttcatgtcttcgctattgtgaacagtgctgcaataaacatacatgtgcatgtgtctttatggtagcgtgatttataatcctttgggtatatacccagtaataggatcgctgggtcaaatggtgtttctagttctagattcttgagtaatcgccacactgtcttccacaaaggttgaactactttacgctcccaccaacagtgtaaaagcgttcctatttctccacatcctctccagcatctgttgtttcctgactttttaatgattgcttttctaactggcatgagatggtatctcattgtggttttgatttgcatttctctgatgaccagtgatgatgagcattttttcatgtgtctgttggctgcataaatgtcttcttttgagaagtgtctgttcatatcctttgcctgtttttcagtggggttgtttgtttgtttcttgtaaatttgttgaagttctttgtagattctggatattagccttttgtcagatgggtagattgcaaaaattttctcccattctgtaggttgcctgttcacgctgatggtagtttcttttgccatacagacactctttagtttaattagatactgtttgtctattttggctttcgttgccattgcttttggtgtgttagtcatgaagtccttacccatccccatgtcctgaatggtattgcctaggttttcttctaggatttttatggctttaggtctaacatttaagtccttaatccattgtgaattaatttttgtataaggtggaaggaagggatccagtttcagttttctacatatggctagccagttttcccagcaccatgtattaaatagggaatcctttctacatttcttgtttttgtcaggtttgtcaaagatcagttggttgtagatgtgtggtgttatttctgaggcctctgttctgttccattggtctatatctctgttttggtaccagtaccatgctgttttggttactgtagacttgtagtatagtttgaagtcaggtagcatgatgcctccagctttgctctttttgcttaggattgtcttggctatgtgggctcttttttggttccatatgaactttaaagtagttttttcttattctgggaagaaagtcattggtagtctgatggggatggtattgaatctataaattactttgggcagtatggccattttcatgatattgattcctcctatccgtgagcatggaattttcttccatttgtgtgtgtcttttatttcgttgaacagtggtttgtagttctgcttgaagaggtcctttatatcccttgtaagttgaattcctaggtattttattttctttgtagtaattgtgaatgggaattcactcatgatttggctgtttgtctgttattggtgtagagaaatgtttgtgatttttacacattgattttgtatcctgacactttgctgaagttgcttatcagcttaaggagattcggggctgagacgatggggttttctaaatatacaattatgtcatctgcaaacagggacaatttgacttcctcttttcctaattgaataccctttatttctttctcttgcctgattgccctaaccagaacttccaacactatgttgaataggagtggtgagagagggcatccttgtcttgtgctggatttcaaagggaatgcttccagtttttgtccatttagtatgatattggctgtgggtttgtcgtaaatagcatttattattttgaagtaagttccaccaatacctagtttattgagagtttttagcatgaagggctgtttaattgtgttaaaggccttttctgcatctattgagataatcatgtggtttttgtagttgtttctgtttatgtgttgaattacatttattgatttgcctatgttgaaccagccttgcatgccagggatgaagcccacttgatcctggtggataagctttttggtgtgctgctggatttggtttgctagtattttattgaggattttcacattgatgttcatcagggatattggtctaaaattctctgtttttgttgtgtctctgccacactttggtatcaggacaatgctggcctcataaaatgagttagggaggattccctctttttctattcattggaatagtttcagaaggaatggtaccagctcctctttgtacctctggtagaattcggctgtcagtctctctggtcttggactttttttggttggtaggctattaattattgcctcaatttcagagcctgttattggtctaatcagagatttgacttcttcatggtttagtcttgggagggtgtatgtgtccaggaattcatccatttcttctagattttctagtttatttgcatagaggtgtttatagtattctctgatggtagtttgtatttctgtgggatcgatgttgatatcccctttatcgttttttattgwgtctatttgattcttctctcttttcttctttattagtcttgctagcagtacatcaattttgttgatcttttcaaaaaaccagctcctaaattcattgatttttttgaagggttttttctgtctctatctccttcagttctgctctgatcttagttatttcttgccttttgctagcttttgaatttgtttgctcttgcttctctagttcttttaattgtgatgttagggtgttgattttatatctttcctgctttctcttgtgggcatttagtgctataaatttccctctacacactgctttgaatgtgtcccagagattctggtatgttgtgtcttcgttctcattggtttcaaagaacatctttatttctgccttcattttgttatatacccagtagtcattcaggagaaggttgttcagtttccatgcagttgtgcagttttgagtaagtttcttaatcccgagctctaatttgattgcactgtagtctgagagaccgtttgttgtgatttctgttcttttacatttgctgagtagtgttttacttccaattatgtggtcaattttagaataagtgtgatgtggtgctgagaagaatgtacattctgttgatttggggtggkgagttctggatatgtctattaggtccacttgttgcagagctgagtttaagtcctggatatccttcttaaccttctgtctccttatctgtctaatactgacaatggagtgttaaagtctcccattattattgtgtgggagtctaagtctctttgtaggtctctaaggacttcctttatgaatctgggtgctcctgtattgggtgcatatatatttaggatagttagctcttcttgttgaattgatccctttaccattatgtaatggccttctttgtctcttttgatctttgttggtttacagtttgtttcatcagagactaggattgcaacccctgccttttttttttttttttttttttttttttttttttgctttccatttgcttggtagatcttcctatgtccctttattttgagcctatgtgtttctctgcacgtgagatgggtctcctgaatacagcacactgatgagtcttgactctttatccaatttgccagtttgtgtcttttaattggggcatttagcccatttacatttaaggttaacattgttatgtgtgaatttgatcctgtcattatgatgttatctggttattttgcctattaattgaggcagtttcttcctagcatcgatggtctttacaatttggcatgtttttgcagtggctggtactggttgttcctatccatgtttagtgcttccttcaggaatttttgtaaggcaggcctgatggtgacaaaatctgtcagcatttgcttgtctgtaaaggattttatttccccttcacttatgaagcttagtttggctggatgtgaaattatgggttgaaaattatttctttaagaatgttgaatattggcccccactctcttctggcttgtagggtttctgccgagagatcgctgttagtctgatgggcttccctttgtgggtaacccgacctttctctctggctgcccttaccattttttccttcatttcaaccttggtgaatctgacaattatgtgtcttgggattgttcttctcaaggagtatctttgtggtgttctctttatttcctgaatttgaatgttgacctgcctttctaggttggagaagttctcctggataatatcctgcagagtgttttccaacttgattccattttccctgtcactgtcaggtacaccaatcagatatagatttggtcttttcacatattccgtgtttcttggaggctttgttcgtttctttttactattttttctctaatcttgtcttctcgctttatttcattaatttgatcttcaatcagtgataccctttcttccacttgatcaaatcagctattgaaacttgtgcatgtgtcacaaagttcttgtgccatggttttctgctccatcaggtcatttaaggtcttctctacactgtttattctagttagccattcctctaacctttttgcaaggtttttagcttccttgtgatgggtttgaacatgctcctttagctcagagaagtttattattaccgaccttctgaagcctacttctgtcaacttgccaaagtcattctctgtccagctttgttcgtttgctggtgaggagctgcagtcctttggaggagaagaagcactctggtttttagaattttcagcttttctgctctgtggttttatttacctttggtctttgatgttggtgacctacagatggggtttggtgtagatgtcctttttgttgatgttgatggtattcctttctgtttgttaatttttcttctaatagtcagatccctcagctgcaggtctgttggagtttgctggaggtccactccagaccctgtttgcctgggtatcaccagtggatgctgcagaacagcaaatattgctgcctgatctttcctctggaagttttatcccagaggggcacccaaccgtatgaggtgtctgtcagcctctactgggaggtgtctcccagttaggctacaggggtcatggacccattctcagagctcaaacgccatgctgggagaaccactgctctcttcagagctgtcagacagggacatttaagtctgcagaagtttctgcttccttttgttcagctatgccctggccacagaggtggagtctgtagaggaagcaggccttgctgagctgcggtgggctccacccacttcgaggttcccagccgttttgtttacctactcaagcctcagcaatggcagacatccctcccccgaccaggctgcagcctcggaagttgatctcagattgctgcgctagcagtgagcaaggcttcgtgggtgtgggacctgctgagccaggaacgggagaaaatctggtctgccacttgctaagactgtgagaaaagtgcagtatttgggcgggagtgttccgtttttccaggtacagtttgtctcagcttcccttggctaggaaagggaaatccctctatcccttgggcttcctgggtgaggtgatgccccgtccggcttcagctcatcctccgattgctgcacccactgtccaaccagtccctgtgagatgaaccaggtacctcagttggaaatgcagaaatcacccgtcttctgtgtcgatcacactgggagctgcagactggagctgttcctattcggctatcttccactttcattctttctactctatttctattcttgtttaaaatgtgtcctattggttcattgaatattaataaaccccttatgttgaacttttacttttacataaatggtatctgtcacatgttacacactcaattaaattgaatagaattcctacaccaagcaatcagtgagctgtacaaccaaatgcaaagaagaaaccaacaaaaataaaactctggtaacattcattagttcaagcacacacctacacatacacacagaccacttgcttctggcctcaagattagctctggtttcattctaccttttgcccattaagatatgatctttcagtcttttctcaacccttctcccactcagagtctaacttgttttaagttgtctcctaaactagttctccctcttagccaaaaccccagaatatacaaaaggagaaaagggaaatcatagattgagaagcastaaatacagagtttgcactctactttccccatctcatgggtcctttatttcctgaaatattttcttgctggggacattggcaggggtcagagactatgtgactgatactatccctagttgccactatttaaaacgaaaagtacagtgtcatagggttccaagatagtgattacaggtggatatatayatataggcacaaagtagatgtcttttaactatgaccaatttttttgtttttgtctgtttgcttttaattttttttagaggtagggtcttactttgttggtgaggctggagtgtagtggtgtgattatagctcacagcagcctggaactcatgggcacaagttatcctctggcctcagccctctaagcagctgaactacaggyatgcaccacagtgcccagctaattttttattttttgtagaaacagggtctaactatgttgcccaggttggtctgaaactcctggcctcaagcgatcctcctgccttagcctcccaaggcattgggattagttgtgagccagcacacataccctacgatctgttttaggctgaatgtcgctttctaagacaatgagattctgttcaatcacttcatgcattagcaatattaaaccaaatacttatatgagctttataactctatattacttcttcaagaccttttttttgagtctgagtctatctggatgccaaatagtgaaaaccctgtaaaacagtgtaaaagtgaggcattatgtttgacatcaatagtagaaaacaaagatggggaacaacttgtttcaacttaatgtaaggcatactccatttctgttattggtaaattccagtatacctcttcatgaaagcttcaacgtttgttttagatcacctagttctaatgtggtgattttgtagtttcatatgtaatttattattcttacattatttttcctttcaaggaaaaaactagaataaatagtaaaaaatattgattctgcttatgtgatttgcagaatttctttggccctgagtttgtgaaaatgacaattgaaccatttatatctttggatttgccacggtctattcttgtaagtaataaaaccaatttgtgtcactcttagaaaataatttcagtagtgttaaaaaccagttaaaattcttataatgcttaytttaataaatgccgtttattttttcaattgtagactaagaaagggaagaatgaggataaccgaaggaaagtaaacataatgcttctgaacgggcaaagactggaactgacctgtgataccaaaactatatgtaaagatgtgtttgatatggttgtggcacatattggcttagtagagcatcatttgtttgctttagctaccctcaaaggtaccaagacattttatattcagagtacagtatagaaatttagcaacaagcagacttcctatgtttgttaccatgcctgacctcattttgacaattagtaactaaatgaactagtcagtagaagtgagttaggaactccctttcttctcccagctactttcattgttttaatagttatgtttgttaggcaccttctgtatctgactgggaagatttttttattttttgctatggttatataaaaatatattttaattatattttagggaccgttttatatgttaatggtctacatgtgtactctagaaattagtatcctaatatgagcctgaatgtatagcaagaccttatttctgaatttccacatcagtttatttagtctactatcctaaaatcacagtgactttttaaaatgtcaattgaaggctaaaaattagttatttcacattatcttttaaatattgtatccacttaaacccatgatgttcacaaccacagtggtctaagacacagcttcagtagaaacttctcctatttatcaattagagttgccatagcagtaagaaactttttggaattcatctcctttttaaataaatcattatatttataaattactctttaatatttcagattcctgtttacctcaaaatttaacttggaaagtttaggcaacaaagtactataaatgacaattgacaggttaaaggatcctaaaactctataagctcttaatatcttctgtatcctaaaagaaatatttccctcaatatagcttattgaattattgtgccttaaaaatgaataatttatgctgtagactcatacaataaatagtcaattagtacctactgatgttctatcactttactagtttcacttttagactaatcagtcaatattgtctacatgaagctgattcagttcatccaaatatctatttatactatacctaatttcttacagattctggtaaaatcaaattgtattgaataattcttttatttgtagagagtaaataatagttaactaatgacattaaaaaataaaatgataaatgtcattccttctaggtttcagctggtagctcaataataataagtatactagctaatatttattaaatgtttaccrtgtactgtgtgctttaacaagtgtttttattcattatgtcatttgatccttataacaatgctgtaaagcaagaattcccactagcctgatcttaaagccaagaaaactgatgtctagagaggtaaaataatatattcagtgtcatacggatagtaaatgttgtgaccaggtgttgaatctaggactgtatgtctttagagccgccattcttaaaagagtgggccatattgcctcccatctaaatggagtgtctcagagctccctgccacatttttaacagtcttgtatttatattctcatatgatactcttttatgcaagtctgaccaaaaagtgaagaaatcggaagaaaacastaaagtatttttttattttatctgaatatttttctcattctgtttagataatgaatatttctttgttgatcctgacttaaaattaaccaaagtggccccagagggatggaaagaagaaccaaagaaaaagaccaaagccactgttaattttactttgtttttcagaattaaattttttatggatgatgttagtctaatacagtgagtacacaagagtttctcttttgctctttttggacactggtcttttgaccctttagcttactgatactgaattacttgattccaatcaatgataatgtctgctttatcataaaagtaatatttctttcaacacagtttrtytaatccttatgccttaaaagcttaataataagcttagtaataaactcatggaaattaaccttacatgcctataataaaaaccaccccagtattcaaaatcaaaggccaagatgtctgtgtgtgtttgttttttcagacatactctgacgtgtcatcagtattaccttcagcttcgaaaagatattttggaggaaaggatgcactgtgatgatgagacttccttattgctggcatccttggctctccaggctgagtatggagattatcaaccagaggtaggatttgtgtttttttccaggaccatttttgtttggtgttgttacctttaacatagttaatgactaaacctgattcaggtgtttgatgtttagatctgaagatttttgaggcttctttggttcctcagaatgaccaagcactccatgtatatcaattatataaaatcatgaagtgtgggatttttttttcctgtttaaagttatcctgttttggagtttaggaatatctaccacttactccttctcctgagttctaacctatagagactatacacaggagttattagtcaaatataaattaaaaggatctcctgccttccacatgatgggctggcagcctggcagagcttactgtgtggagaactcacagtatacttaaagcctgatgtttctaaataaaattgatctaagaggaagcaaggggctagaagctgtgctgctggagcagcatccttcacaacgttcatcctaaactagagtgatatgaggcccttgaatgtcacacttctcaagcttgctgatcagttcagtcattttatctcactgaataraaaagaaagactgatgcatttcttctaaaactcattcctcagagagagaggtagaaatagaagtacttcatctcttagccaaagcaagaactttaagatagaaggaaaagggtttactccaataaaaggcaaacaattgcttatgaaaacattcttttatctaggttcatggtgtgtcttactttagaatggagcactatttgcccgccagagtgatggagaaacttgatttatcctatatcaaagaagagttacccaaattgcataatacctatgtgggagcttctgaaaaagagacagagttagaatttttaaaggtaagcatccaagattacaaatgataagctttgtatcttttccaagtaagcaagaagtgttagaggacacatatctaagagttcaagtgccartaactgatactgtgcataatctcatctcattgctggctaaaattatggtattttaattctcattttgtaaaagagggaaatgaggctcaaagaggaaatgtaatgttcccagagatatggggcagatatgatttgaacccatgtctatctggctgttaatcctatgcttttatcttattccatactcaaaatcaaaatacattatacaraagaaacaaatgaatttggtgaatggcttgatatgagaggcaagttcatactgattctagaattgtttgttttgctttttctcaaaaggcttaaaattcaattacatcctttaaaaatggtcttcccactaaatgccaattaatgtagataggggtagagagtcacaaaaattgacttattagtttacagttctattagttctacagtctrttagacctataaccagctttctatatgaccttagataaatagtacatttacgatcaagaaaaatagtattatgtaaacttccaatgcaaatagcaaatataagatagtgttctgttgaaaagacaaattttcagaacattcttctgttttagcttcctaggatgtaacagtatgccttccattcactgctgcatatagaaagaaatcaagtttaccagccctgtgaaaatttatgaagggattttattcacagacttacattacctttaatctagtgttcatggaaagaaagaaaggcaaggtggttttttctgtttgagtccaaatttaaagatattaaattatggacttatacttttcttagttattacatttttatacttgtagaaagtaagatgttacattataattttattaataaaggtagaaggcagattggcacagtgaaaagaatttgcatgaggatttgcagacagacagtcttgcatttgaattcttatttcaactagctgagtgaccttgaacaatgtgtttaacttctctaagtctcagttttctccttgtaaatagcatgcctaaggaatattaggttgccctactccttctaataatatattctgttacttcatttcactttaactttagcatctttcttctaacttaagaagttttatcttgttaacacaaccttctaaggctacacttttgctatatattatgttgtttttgaaatatctttcgtaaatctgctttattgcagtataatttacatacaataaaatttaccatttttaagtgtttggtgagtttttaaaatatatgtgcagttgagctgggcatagttagggatgcatgcctgtaatcccagctggttgggaggctgatgtaggatcacttgagcctgggagtttgaggctgcagtaagctttgatcttgtcactgggttccagcctaagtaacagaacaagaccccatctcaaataaaataaaataaaatwtaaaataaaataaaataaaagtaaaaaattagtataataaaatataaaaatatgtatacagttcagcaatcacctccacagtcttgagaacaagggttagcaaactgtggcctgcctgttttgtaaatagttttattggaactagtccatactcatttctttatatatcatctatgtctgcattcatactataacagcaaagtccagtcataacaataaagatcatatgacccacaaagcctgaaatatttactatctggccctttacagaaaagtttaccaactcctgatacagcacatttcgaatacataaagctccctcttgtctctttatagtcagtcccctccccctacctgtaatccttagcaactactgatctgctattaccatagtgtttttttttttctaaaatgtcatgtaaaaaataatataatatacagtcttttatgtctggcttctttcacttagaataatacttttttttgtttctgagacagagtctcactctgttgccaggtaggagtgcagtggcatgatctcggctcactgcaacctctgcctcccgggttcaaacattctcctgcctcagcctctcaagtagctgggactacaggcacatgccaccacgccyggctaattttttatatttttagcagagacatggtttcaccatgttagccaggatggtctcgatctcttgaccttgtgatccgcccaccttggcctcccaaagtgctgggatacaggtgtgagctactgtgcctggcctagaataatacttttaagattcatccayggtgtggtatatatcagtagtttcttttctttttttyttctgagtagtttttctttgtgcagatacataatttgcttattcttttcattagttgatagatataaagctgttataaacattccagttcacayttttctgtgaacacagtttttatttctcctgagtaaatatctagcagtaggattgctgggacctatggcaagtgcatgtttaactttgtaagaaacttccaaactgttttccaaaatcattgtacarttttacagtcctaccaacagtgtgtgaatttcagttgctccacatccttgacaacacttggtagtttcagtctttttcactttaacatttgaaataggtgaatagtggtatattattatggttttaatttgtacttccctcattactatttatgttgaccaatcttttcatgtgtttatttgccatttatatatcatctttattgatgtgtcaaataaaactttttacccccttttgtaactggttatatgtttccttactgttaagaagtacatgttctttaaatattctggatacaagtcttttatcagatatgtgggttttacatatatttatttactcctagtctgtggcttgccttacattttcttaacattgactcttttttttaagagtctcactctgttgcccaggctggaattcagtggtgcgatcttggctcactgcagcctccacctcccaggctcaagtgatgcttcttcctcagcctcctgagtagctgggattatagatgtgcaccaccatacctggctaatttttgtatttttcatagggacaggattttgtcatgatggccaggctggtctcaaactcctagcctgaagtaatctgcctgccttggcctcccaaagtgctgagattacaggcataagccactgtgccagccaacattaactcttgatgagcaagttttcaatgttaatgaagtttccaattttttttattttctagtttatggtttttgtgttccatctaagaaatttttgcccaacccagggtcacagacaccttctaagttttatgcttttagtgcctgtatttaggtctgtggtccatttttggttaaatttcatgtgtagggtgaagtaagggttgaaattcatttttttagcatgtggatatacagttgtcccagtaacctttgtttaaaagattatcctttccacattaaactacattgatatagtgtgttagtcctttgtcacactgctgataaagacatataccygagactgggcaatttacaaaagaaacaggtttaatggacttatagttccatgtggctggggaggcctcacaatcacggtggaaggtctcacatggcagcagacaagagaagagagcttgtacagggaaactcccctccttaaaaccatcagatctygtgagacttactcactatcatgagaacagcatgggaaagacctgtccccatgattcacttacctcccactgggtccctccywcaacatgtggaaattcaagatgagatttgggtgaggacacagccaaaccatattccacttctggcccctcccaaatctcatgtcctcacatttcaaaaccaatcatgccttcccaacagttctccaaagtcttaattcatttcagcattaacccaaaagtccacagtccaaagtctcatctgagataaggcaagtcccttctgcctatgagcctgcaaaatcaaaagcaagttagttacttcctaggtacaatgggggttacaggcattgggtaaatacagccattccaaatgggagaaattagccaaaacaaaggggctatacaggtcccacgcaagtctgaaatccagcagggcaggcaaaccttaaagctgcaaaatgatctcctttgactgcatgtctcacatccrggtcaagctgatgcaagaggtgggctcccaaggtcttgggcagctctgcccctgtgtctttgtagggtatagacccctcctggctggtttcatgggctggtgttgagtatctgtggcttttccaggtgcatggtgcaagctgtcgttggatctaccattctggggtctggaggacagtggccctcttctcacagctccactaagtggtgctccagttggcactctgtgtgcaggytccaaccccacatttcccttccctactgccctatcacaggttctccattagggccctgcccctgcagcaaacttctccctgggatccaggcatttccatacatcctctgaaatctaggcgaaggttcccagacctcagttcttgacttctctgcactcacaggctcaacaccatgtggaagctgccaaggcttggggcttccagcctctgaaacaacagcctgagctgtaccttggccccttttagtcatagctggagtggctgggacacagggcaccaagtccctagactctacacagcagagggaccctgggcccggcccacaaaaccattttttcctcctaaacctccaggcctgcaatgggaggggctgctgcaaaggtctctgacatgccctggaaaccttttccccattgtcttggtgattaacatttggctccttgttacttatgtaaatttctgcagccagcttgaattttgcctcagaaaatggaattttctttctatcacattgtcaggctgcacattttccaaactgttatgccctgtttcccttttaaaactgarcgcctttaacagcacccaagtcacatattgaatgctttgctgcttagaaatttcttccacwagataccctaaatcatctctctcaagttgaaagttccacaaatctctagggaaagggcaaaatgctgccaatctctttgcaaaaaaaaaagaaaaagaaaaagaaaataacaagagtcacctctgctccagttcccaacaagttcccaacaagttcctcatctccatctgagaccacctcagcctggaccttattgttcatatcactatcagcatttttgtcaaagccattcaactagtctttagaaagttccaaactttcccacattttcctgtcttcttctgagccctccaaactgtttcagcctctgcctgttacccagttccaaagtcacttccacatcttcaggtatcttttcagccatgcccactctactggtaccaatctactgtattagtccattttcacactgctgataaagacatacctgagacagggcaatttgcaaaagagagagctttaatggacttacagttccatgtgactgaggaggcctcacaatcatggcagaaggtgaaaggcatgtctcacatggaggcagacaagagaagagagcttgtacagagaaactccccttttaaaaccatcagatcttatgagacttattcactgtcacaagaacaacacaggaaagacctgcccccatgattcagttacctctcagtgggtctctcccataacatgtgggaattcaagatgagatttgtggggggacacggccaaaccatatcatacagcttcaatatctttatgtcaccatttaccaaagtgtattgctatggtatggtattattccaacaggtctgccaaagactgacagaatatggagttcattttcaccgagtgcaccctgagaagaagtcacaaacaggaatattgcttggagtctgttctaaaggtgtccttgtgtttgaagttcacaatggagtgcgcacattggtccttcgctttccatggagggaaaccaagaaaatatctttttctgtatgtccatttaacctcttttcattatattttcaaatgatattaccaacttccaatgtaacatattaacagactttccttagactctgccattcagtggggataatacatcttaatactatttaactcttcctttgtagttgtggaaattattattgagattttatttatgtctggttttttcaacaggtgacttttaagattattacacattcctggctggttatatgctcaattaactttagttaaattacaaccaagttgaattctctgaataagtcagaatttattctagggttgtaacttctcacatggagaaatcctcctaatgtttttaagaaagatagttatcttaaccctagtgaaccttgtctggcccaatagtaaaccccctcgtagcaactgttatttgaatctcagaggtacagagacttactggattttatgaactagtcccaggactttccgcaattttagatttttagtgtacagctctctataaagttagaaaatgatttttagaaaataatatgtttatggaagatagttagtgataaaggcatattttgattttggacctagttgggacacctgaacattaaagttccattggcagacttcagagatgaataaaaaatattaatatgttcaggtgtttgttttcctagtgctattcaggaactactgatacctttagttcatctttaggctaaagtatagtctcagcaaaacagtatttataaagttaccaaggtcctgatggatctggataatcttcaaccctgagaccattcctagacctaatggttagttgattggcttcctctgaaaccaagagatatcactaagatttccagattatatgttctccagaccacccacatcttctcaagattgtcaggaccaagaaattacctgggtttaacttaccttcccccagtggaaatgctggcagagcccatgtctgaaggaaaccttagattgattaattataaatccagttttggacygttttgaaaaggtgacaagtcaaataatcacacagcagtcaactctatgtaatttgccaagctaccacactaacccacatatatagaacgagctgtgattagttcatttttaaagatttgtgggaatagagaatagtttgcattcccatggaaattattcctatatttaatagcattcatttttcctgaagttctttctctaacacaaaactattttttttaactctccttttttcttctactaacctctggggaagtggaaaagttactatttggtcttctcatatctcacaactgagttctctcaagcacatttcttatccagtccatccattaacacttggagagaatcaaatattctttgtatgtgtttcaagactatacatctttcttagatattaaatcatctatactatcacttttcataattaatatgaacctctaacctatctctggcattttttgtgtgtgatatttgctgcctttgggtgttttattataggtagtggttctgtagttcttttgactgatcaactaagaagattctttctttcatgtttatgcttgaatcagtgagagagttttacaactatggagttcagtgtctttgcaaattccttgacagtggttaagtggcatgtttgttaggggaaaaaaaaaatgttctccaagtatttgaagagttaccaggtatactactgataatgaagatactagtttgttgctactgtatctttagctcctctctaatacttactaatttctgtttctaacaaagaaaacaggtttaatcctggagctttcattggcaacaatatctagctagaatttaacaatgttgttatatttctaaaatttctttgaatttatataartaagaaaagtccattgaaaaatttataaataaccaaggctagaaattgtaaagatgacaggattgaagtctgggtaatactctgttattacaacttttgaaagcctactaaatttggcttttccatgactatttccgtatttgaagtaaagacaaggaacatgaagtagaataatctgcacagtagccaagagctagagtacagtctaactggacttaagtggttctccagagacattagtcttagatccccgacatgttgaacactggtctcttaaggcatgggtcaccagcaagccttaccatataggtcacaaattggagtatgctctcttccacaaaagacattcagttttcaagaaatttcagagtgataaaactgatttgatgattctcctactttctctatatttggcacaaatcaccatctctaaatatcaatgtgttttatctctcaacccagcagttatgttaccagtacctttccatctcacattttctttaattttccacaacttctattcagccttyatgccacccagactctacttgactgaatcctggctcttatcattatatattaataaaaaaattaytgttaaactttcattttcttgtatccaatagagtagaacacatatttattatttccttttcaaacagttttggtgtttgtaaacattaccataaattcaaaatatcaataatcttatcaaaggaatctgtttcccttgttaatgactgatatatacaatctagatttaggctacaatttctgaaagtggcaaacgatgttaatttatttcttgcatttgtttataataatacagtcatgtgccatgtaacgatttttcagtcaacaactgaccacgagcaatggtggtcccataagattataatgttgtatctttaccacaccttttctgtgtttagatgtatactacacaaacaattgcctacagtatttagtacagtagtatgctgtacaggtttgaaacctaggagcaataggctacatcatatagcctaggtgtgtagtagtaagctagcccatctaagtttgtttaagtacacttcaggatgtttgcacaatgacaaaatcgcctcatgatgtatttcttggaacatgtctttattgttaagtgatgcatgactatataggattatattcatattagatgtaagtcaatatccagtgcctaacaagaaatataaataatatctctacttactataattatgaatacccttggttaatattgtagaaaaagaaaatcacattgcaaaatacatcagatggaataaaacatggcttccagacagacaacagtaagatatgccagtacctgctgcacctctgctcttaccagcataagttccagctacagatgagagcaagacagagcaaccaagatgcccaagatattggtaaggagaagcagactatttcagatgactcctgggaatatgaataatttttgccaccaagttttaaaagaactgccatgattaggatgaaaacttacaatgtatatacatgttaaatagctaaatcaagtctataaaggtgttacaagtgaagccaatatttcaatttcatgttcaccctgagagaatactcctagggagtacctgttgaagtgtccattttgtgcttagcaatgataggctagttgatgtaaacattataaacatttgggccatgttctctaccctcagtaagcttatccaatatttggaarggtaagaccaacatgcttgaaacagcaatacacaatagaagttcaggatttcagccaggcacagtggctcacgcctgtaatcctagcactttgggaggctgaggcgggtggatcacgaggtcaggagtttgagaacagcctggcaaacatggtgaaaccctgtctctactaaaaatacaaaaaatcagccaggcgtgttgccgggcacctgtaatcccagctacttgggaggctgaggcaggagaatcacttgaacctgggaggcggaggttgcagtgagctgaggtcgcaccattgcactccaaccygggcgacagtgcgagactctgtctcaaaaaaaaaaaattcaggatttgaagaacagattatattgaacagactttatgacctatactgttagaagagggaaatcagagactagagtactggacaggtggcacttgaattggatataaaggataaaaataatgcaagtagtttggagataaatggaagggctttagagatgagggaaaaaacacaggaaacaaggcagaggatgggggaagtatgcacccagaacaggacagtgaagaracacactgtatagtcttctgggtggcagatttacyacctattagttttacttgggtgcatccctgttctgagattgagatgaataatcatagtacccaatgtaaatggtcaggagaatggtttattttcttttgaaaaggagccagcagaagaaactcatctgactctggaaaaaatatctcaatcagaactgaaatatttaaatttcagagagataaaactgatttggtgatttctgcaattagagattaaaattatacaaaatctaattctacatagtaaattcttataggtataagtgaaacagtcagaagtatgtgatttaaaaatttaatggaatagcactgatgaccttgtgcagcagggtcctatgaattctttacccaaactgtttcacattcaaaaaatgttttccccataagggcagactggggcgatggcaacctatgactagatgtttctcaacctttcagaatcatgataggggtggaggttgtatgctgatttaaaatgaagattccaggaacctacrtaaaactcagagagctacagtctttgggaatttgttccctaaaatctgtactttaacaggctttcctcagtaatgtttttttttgttttgttttttcttttatttgatacggagtttcgctcttgtcaaaatcttgtttgggtgcaatcttggctcactgcaacattcgccttctggtttcaagcgattttcctgcctcagcctccagactaggggattacaggcacccgccaccacgcccagctaatttttgtatttttagtagagacggggtttcactatgttggccaggctggtctcaaactcctgaccttcgtgatctgccygcctcggcctcccaactcagtaatgatttttacacatgctaaaatacaataaccactgctataatatcattattctctttctgctttgctctgctagaaagtttatatgctcatatattttcaaagtatagtgaaatatcagacctattagagccatcagcattcttactttgactaatattctattcagtacaatccataacaactgaagattacttcrttatagttgttgtatagtgaacagaatcagaagacaaaagtttgaagttagtctgtcatcctcaacatttcttatactgaagaacaatatggtatagcagttaagagcatgagctcaggagccaaattgccagtggcaaattaggctctgtcacttacaagccctaaaactttgggcaagctacttaaactctttgccttagttactttatctatagaatgattgccataagataatacctatatcagaaagttgtgaaaaggaaatgaattcatacrtgtagaatcctttaaaactacctggcacaaagtattcagtaaatatttactgaagtattcattatcattgtcatcaccatcrtcaacaatgttttacctctagaagatagtactactactatactatatgctgctatactatgtaatagcrgtaatagtagcagcagcagcagcggcagcagcagcagcagcagyagcagcagcagcagtagtagtagtagatgaatgaatgaccttaggaaagtaagtgactttttagaatctcagtttcttcatccatggagtggggctgggaataatgttgtatatatagatataacaggtttacccccaggatcacaacagctatgtatccttgccctcaaaagtgaaagcactttaagatggtgtgatctatatttttccccttggcttataagtaactgtctgcctgtttatttgtactacaagtgaaaacaactggtgttatctgtgggcggttaatgggctaacaaatgtatgctgcttctttagagtcatagaatattgatgctagaaagaaccttacaggtcattaagttcaaaattttactaatggcaaaacaggttcagagaagatagtgttttgccctcatgtcatatatagaggtctcttaattcctaatccagggtactttctgtttgatgagtttcccaagaactgatttgcatggatttaagattaatcaattattgagcatttactatttataagtgcacactactatgggataagagaataaatgaagtccctctcataaaaagagaatatgattaagctggagatataaggaagcacaaaatggtaccagggactgaacaatagcagaaacagattaggaagtatggattgcagacagtgtggagctagcgagcctttgtgttcaaatttgaaacattagtattaggatacaggctcattctaatctatgttggagttctttccaggtaaaaggcagtaggaaagaccagataaatggttggtttatgatcccatcccatatccaagagtaggctacaaatggatttgaatagcatactccctaatatgttcacaaaactgactaaactgagcctgctatccttattcctgccaaagtttggtccacattttctttaaggatggagaaayctattgggtgtaaaggcatttccttctgaagactttattttgcttctttgattacaggctactcgtaaagtaaatgaaaatagaatagcattatttgctctaataaaaactatattttgaggtaaagatgattatggaaattttttwtttkaatgtagtatcgctctgttgctcaggctggagtgcagtggcgcgatctcagctcactgcaagctctacctcccgggttcacgccattctcctgcctcagcctcccaagtagctgggactacaggcgcctgccaccacgcccagctaattttttgtatttttagtagagatggggtttcaccgtgttagccaggatgatctcgatctcctgacctcatgatccgcccacctcagcctcccaaagtgctgggattacaggcgtgagccactgcgcccagcctgattatgggaatttttaacaaaggtgtatttttaaaagtctttgttttttaaggtcttgttataacttggtgcccacttccacttcagagagagatcattgaattttcctagtgacaatraggcatgtttctttaaacttcattctgatgcatgaatattaaaaacctttaatgttttcctacctctttatgcctgagagaaaatatcaattattaatcttcctaggaagtagaagataaatgaaacaatccaagaatctaagtcagtaatcatttgatattttctttcttccttctcycctccctccctcctcctctgtctcctcttcctcctcctcctcctttttcttcatcttcatcatcatcatcatcatcatcatcatyacctggcacccttgagggagacattttctttataaaaggaagttttcccagttgttgtatgtagcagtcaaacttagttctgtgtagaatgcaacaacatagaattgctgctttccagagggcatcaaagggagtgccttgtgatgtgggtcactaactgcatgaaaaactaaatcatttgaaatcctttgctcctattcttcatttacatatgctgcattgcttttgttattagcctcaaatattaaaatatcactgtgacattggttcctacaaaatagaatagccaaacacttgttatamagtatctgtaaatttagcctctataagagaactttggatgtgtatttgggagtgaaagaaattgaagcataaagagatgcccagctccctgatcatgttaatttacagatactgaaacagacagattagtactgtttgattctcccattcctctgttgcctcagataaatccttaagtcagcccagtgagaaggtgggtttggcatagtagtgaaataacaaaaggaataatttgccataaatgctttttctttgtaacagcattattgagatacaattcaataccatacattcatccatttaaagtatgcaattcaccatcaccgcaatctgccttaagctttaaaaactgtctgggcaaaacccctctgcatagctttttcaggtgtgtattcaccatctcagcccatctaggtttcgtctctccctctccctatccttgggtgctgatattttagcagagacagtactaggtttgaaaatttctgtgttaaatgtcattctcatttctaactgaaacctataaggaatttggtgtcagcaagcctgagccccaaacattgttgagtccaagaaaatcattagatgaagcaggaaatgttgagtaggctgcaactaagagaaagctaaagagatgaaaatatgttatgaaaaccagatcttcaaccctcctttttaaaaccctgattgccacactttgaaagctacctacttatgctggcaatcaaaatgattaaaaactgcatgctgcttatttattaacataattattctcataaaagtactgtggcgttaccatcatgtaaagcaatcctatttccttgtagagagagcttcgtttaggagcctgaatctccaagcagagtctgttagaggatttaatatgggacgagcaatcagcactggcagtctggccagcagcaccctcaacaaacttgctgttcgacctttatcrgttcaagctgagattctgaagaggctatcctgctcagagctgtcgctttaccagccattgcaaaacagttcaaaagagaagaatgacaaagcttcatgggaggaaaagcctagagagatgagtaaatcataccatgatctcagtcaggcctctctctatccacatcggaaaaatgtcattgttaacatggaacccccaccacaaaccgttgcagagttggtgggaaaaccttctcaccagatgtcaagatctgatgcagaatctttggcaggagtgacaaaacttaataagtaagaacatattaactaacccaattacatatttgtaaattctacatttcatacgtttctttttgttwtgacattttattattttcaccatatttttttacattaacacttccctcctaccttccttttccctcttcagttcaaagtctgttgcgagtttaaatagaagtcctgaaaggaggaaacatgaatcagactcctcatccattgaagaccctgggcaagcatatgttctaggtcagcaaaaacaagcttaccttctttgtcccatacctcatgctcagagggaagtgaacaagatcatcttaattatcaaattattttgggttccatgtcctaattgccaaaactgaatataaattttaggctacttaaaatgcaccaaatcaaattaccacttgatttaacaagtgattgcttcatggtacagactattagcttctctttttttccccctcagacagggtcttactctgtcacccagtctggagtgcagagatcatggctcactgcagctgcaaactcctgggcccaagtgatccccccacctcagcctcctgaatagctgtgactacaggaacgcagtaccacatctggctttttatatttttttgtagagacagggtttcactatgttgcccaggttggtcttgaactcctggactcaaggggtctgcccaccttggcctcccaaagtgctgagattacaggcttgagccatcacgcccagtctgttagcttctcttggtcacagttgccatgacagtcttactaagactgtcatgtgccattactttggattaccttttttggcttttcctttcaagccgatgtgaatgaactctggtaatgctatagttttggagaagcatttacttagaatgctttcagcttagcaggaacaaaattgtctctaaaaccttagataattttatgaaatgtgctatggttgataggtagaagtttttaagttgatttcagtttcttcaaattctcccagatagcagggcatattatttaagtgaaattgtatgtatgtgtgtgtgtgtgtgtgtgtkcatgcacatgtgcatatatatctatatatatgcaccttttaagatgcttaccttttatacatgctaccttttaagataaatagttcaggtttcctgttgccttgtgcaacttaaaagggaaaygcactggagtcgatctttgaaaagaatggatgtttaagcacagagatctgaactactactcaaaatatgaaacagcgtgggaaacaaaagggaaatgaggactgtttcccttctgttgtcttacgaaatactactaaactctcttcttaggctcaaggtttgttaatttatctctaattacccaaagtttaaaagctttttttattctataattggattcaggrtatgtcgagtaaatgaagacaaaagacaattctgcattataatacataaatatttatggaagcaacattactttattaatgtaggctttcgcaactttcagagactatactatcaatttaatttcagtcagttaaaaaaacttagataaaaggcaagatttcattctataggtaactctgtgttgaaaataggctaagagattgatttgatcttttaggaaatacttttcaaagtgttcacatataacggggcctcawacattctaaactattttcattaagaaggctttggtctacatgaaaattsattacatatccgaaggaaaatagtaaatactctatagaaaacataaaacactcttaaaggaaatttttctgcattttgtatttattcattcttactgaataatgaatattcttttaacacttgaacaaatgaaaaactcattccagtttcatcatttcatatttgatatatcaaagtattgtcagaaacaatatatttgtgtttaaatttatgctgcaaaataagttattatgcttagctactatttaaaatagtgaaaatgcccattggaggatgttttctcagtgtaaatacaaaatgttgctgccttattgttctattgatttttatgagcttatcagaagaaatcacttcgatatctagcatctgaccatcttatgaaatgtctaatatttaatttatgccacaggaatgactatgcatagttctggaaactcttcatcccaagtacccttaaaagaaaatggtaggtttacaaaatgtttttcccctcatttccatcatttcttgtaccttactgagatagtcttggacctaacaatgaagagtcttgagttccatgcctaggatttgatcttacattgaagttaaaggagagttgtatttttcagcatcataatgatgtaatgggacctctgatttaggctaatgttgatgaaatgacaaattagagataaggacactaattgggaagctaagataatagttcaggtgggagataatttctattaaaaagagttttaactgaggcagttattttaaagggatgctggagctgaattttagagggaaaggaggattcattcagacggaacaataaagataagcattccagatcaagggcatagcatggtcagagacatggaatcatgagaaaagaaatttagggaactgcaggagtctcagtatggtggcatgtgggggccagggtaaagtttgagaactaagtagggaccagtttttaatcttatgctaaatattatgaggatattttgaagactttaaatgctgagattatagtttagaaggaatctaagaaacaaaatcgtaggcagaagaccagaaatgtccagtgacttgaacatcactggctttaaaatttttagaatttagattgcaaagtattttcatatacattatcttatttgatctttctaacaactttcatgagtagaaaataatgttttattactatccatacactactttcctccaaaaatgtttcagtcttggactcttaaagttgaaataattaaaagcctgatgagaaagaagccattatgttaattaaaattattaatacagctaaacttgatgaagttgtaaatttagtttcaatattcctgtagccagggtaaaacagaaggcataagactgaactatatagaattgctgggtatttttaggtcaaaactgtcaaacaccagagtgctattttgtatgattctcattctctaataaaaatacacatactaattctttaagacagaaaaaattttcttggaattaaaattgcttttaaaagtaaaactacacacaatgtcttaaatactcatagcaaatcaagatgaggtttctttccttctcattttatttttgaatgtatcctcgaaaaatatgagggcctatcattaaagaaaaaattattgaacttatacttggacgtaaattgctaatcctgttatatagctttctagtgatcaaactccttacatggactgaatttagaatgcctatatacctgaaataccttagttattaacatgtccatatggtagtaattattgactaacagttatttagtgcttactatgtgtcaagcactgttctaagcactttttattatttctcatttaatgcccacaacaaccctatgaggtaggtgttaatgttattttttttcacacgtaagaaaccaaagcatagagagttaagttgtacagaaggtcacaaagttagcaggtggtagagccgtgatttgaacaaaggcaatctgtttctagagtctacactctaatctactctttagacctcctcataatgtgatcatgcctaagtattatttctccctgctaaacttttgaaagaagctggataataatctattcaagtatgataattttaaatgtgttttagcttagattatgatgaaaaagaatatgaatgtacattggatagccaatgagcatgaatttacattggttagtttctctatttaaaccttcagaaggcttaaagtctcacctgccctggacagtagggccaatccaccttcatatagaggtatgcctcagttagcttgcaaacaaggctatattttcttcaaaacgctctttgaatctggccaagtagcctgaattagtactctgttgagaatcaagttttcacataatacagcatggcaaacatgtttttgcaaatagtgtaactaaggatcaaaaagtaaaattacttgcccatgcctcaaatatgggacctcttactctaatttcaatgttcttcctgctggtcaagattattagatgaaaattataaatggacatcagttaatattaaattattcatcacttagaacaaggatgaatgtattatattcgctcttaccttttatggcctccagagattcttaaagaatgtgaaatttgaaagaaaagataaaaaagtcatgattcttctaatctcacactttgaaaaggtgatatggaaaggattctaatcccttgataaattgtgatttcaaaaacaaaagttgctcaacttaaaaaaaaaaacactggttattttcctttgtaagagtaaaaacaaaaatatgtaaaaacttttccaagaattatgtaaaattgattttaatgtttcttgttttactgtaattattatacagcaattgaaaagtaacttttagctaagtttgtcatgttgcttcctgaagtgtccaaaccacgaactatagatggtcaccgacttatcatggtttgactttacagtggtgcaaaagaaataagcactcagtaaaaattgtactttgagtacccttacaaccctyctgtttttcactttcagtacagtattcagtaaattacatgagatagtaaccaccttattgtaaaataggctttgttttagatgattttgtccaactataagttaacataagtgttctgagcatatttaagttaggctaggctaaagctgggatgtttagtaggttagatgtattaaatgcatttttgacttagggtattttcaacttttgatgggtttgttgggatgtttaaaactcaccacagttaagtgcctttttattcttagttgggatgagaaccagagcaactcaaccattagtctcctcaagccattttctctttcttctttcattttattccgtctttactgcttggggttttgattttctgggaactgtatgcctaatggacttattaagtacctaccatagaataatggatttccttagtttccaagtatcccaattcctgaacggtgggtkattaaatctgaaacttgaaggaggaaatggaaatttaaagcaatgatcatcatttaatcactttacaaagcactttgctttaatctgttctctctyaccacctcatcaatgtggtctcttaaaggctatactgatttcagttcctaatgtgacctcacccccttatttgttttatttaattttatgggttttgttctgtgttgttttgtatttgttctagctaaaaaatagaactaattgcctattttttgataaaaggatcttggatacttaaactcattaaactaggcattaaataatggatgggcttttgcttaggatcacctaatatgtaaagtacttcacaccattgtccaatgatagtttttgtaatttaattaataaaatcattagaaataccgaattaccactactcttattgctaataactaagttttggtcaaaaagaaacaacagaataggaatatatactctacagagatctagcaaacttgcatcaaaacagtattgagatacaaggctaattcactcctgagaggaaattattgttgttattgtcttttgaaattaaaggaatttatttatacaatatgaagtatcacatttacatcatttaagcatcaatacaagttttgtgacaaaattactatttgttttgtgacatattaatgcaattttaagtccatgggtggttatatgttgcacatacagaaataaagtctgttttcatactgatttggttgttacaaaaatgcatatgaaggtctaaggaaattctggcttacagtttagtgaaaccaaaacctctaattttcagaaagcttcaatatagttgagaagtatgtagagttgaatttgaaaattcactttacaaaaatatccttaggaatatgttgaacgaactgaccaccaccaacaccttcacacacagaccaatttgaactgtcattgtaattgatgttaagaagtgtgtgtttgtgtaaatrcttgaattgcgaagtagatgaattaacttgataaacatgtcaattaagtgtcatatttattggtttcagaagttaattgtgaatgattagcctactttaaaaaacctagtggaaataagaaagagtaaattctagttctgattatgacatttattcaatttatttaactaggatttatcaagkactgacttcaggcattttaatgggcactgatactagttattatgttgagcaggtcactaactgttactcctcatctgcaaaacaatggttaaaaatctctytacttacttgtgagattgtttcacaaataaaatttgaaatgaatgaagatcctttgagagtacatgtgctagacaaggaattattaatggaactattaatagatccagtttctgaccaggtaccgtggctcacacctgaaattccagctcttttggaggcctagataggaggatcacttgaggccaggagttcaagaccagtctgggcaacatagactccatctctacaaaaataaaaaattagctgggcatgttggcacgtgcctgtcgtactagctattcaggaagctggggtgggaggatctgcttgagcccaggagtcaaggctacagtgagctgtgattatgccactacacttatcctgagtagcaaagcaagactctgtctcaaaaaaaaaaaaaaaatccagtttcctcttgctattttactcaagaacttactaagaatattttaccagttataaattaaaatgccaaccattaattagaaggaattttttaatatattaagcactgtcaaattcagggagttgattatggtgtaacaaacagaaaacctaaattgaaaagttcggctctttcctgtactagctgactaaacttgtgcaaatcatttaacctattgaggtttatttaatcatttgtaactgaaatatacttatttcaaaagaatagcttatgaagaataaatgtaatacgtagtcattttataaattataaatcactataaaaatataaaatgttaacagtatcagtaaacttaaaatatatgtttaagtgactgagcaattaacacactttgttaacatttaaattgttaaaacaagctgacagtcttaatgcctgagcatgttatatttatttttaaattataaattcccaatagatgtgctacacaaaagatggagcatagtatcttcaccagaaagggagatcaccttagtgaacctgaaaaaagatgcaaagtatggcttgggtaagtcaccgtgagattcttgaaggtctatgattgttggggattcagaggaaaagtctatagcatagcattggcattgcagtgccagctcacttctggtctcaagatactgactggctgcccacctacaagcccatcamcctacccgcccagtcaccaaatgcctaataagaaatgcctacaagaaatacttccacaaaatttaatatgtgttacctactaatcatttgatatcaatagtccccacatttctgtgtttcaggcaggctaatcattagtctttgaaagcagcaatatgaaaatctttttaaaatgtgttattttacaggatttcaaattattggtggggagaagatgggaagactggacctaggcatatttatcagttcagttgcccctggaggaccagctgacttggatggatgcttgaagccaggtactttacattttggtagttttctaagtattttctgacaggcatgaatttaggaacttaggccraactaaaataattgagaaagagatgatatttctaagattcagaataaatgtatctttgttgttgaaaatactggattgtctatttgtacaggagaccgtttgatatctgtgaatagtgtgagtctggagggagtcagccaccatgctgcaattgaaattttgcaaaatgcacctgaagatgtgacacttgttatctctcagccaaaagaaaagatatccaaaggtaatgtgaatgtctcttacttatgtattctgtttcacttttctgtctcattcctttttagtgatattcgcacaaaaatggattcattgtgtacaaaattgatgcaacttaagtaaactgtgattacttaatgtgttccatctttcttttgtcaaatcagagatagagtcatttatcattgtgtagttaatattacataatagttatatataaagtcctgtcctgaaccagatgatgaaaaggaaaggaccaccaccaaaaaccagaaattttaaaacaaaaccatatcattttgtctcattatcccagtcttcagtggctgagagacaaagcacttgatgaagatcagatgacctgcgtttgagctttgcctgtgccttttattagctatatgacttaagccttcttgagccatagttttcttttgtttttacttaaagagtagacagtgatctttgccctgctttgtctgccttgcacagagttatttgttacgaggatcaagtggtaggacagtatttgtggaagaagcacaataggcccctgtggcgtagaacagtgcagtgggaaacagggagggttgcagaatccagggtcagattctgtttctaccacctaaaactgtacacattgagcaaaatcacatgaaccttctaagcctcactgtgctcgtatatcaaatggtgactataaacatgcttatcttatagattatgaaaattaaatgagataatacatgtaaagaatgagcacattgcctggtacatatgaagcatttaaatgtgaattttagctgtcattaatattgtttttcaaaaacattgaagtgctagatacaagtaagttaccttcatgccaaagatattgggaaatacataaaagaattagtaaaaaaaattagctgaaaaacaattttagacatagctttggattcttatgataaaatagaagatgaaaaacatgaacatgttatatgttgtgataaaatcttattaaattttatatagatgagtcattttgagtatgatttcttcttactggatattatatatattttgtatgtctgtatatgtacacatataaataatatgttacacacttgtttactgtgagcaaacacaatcgatagaagggaaatagaaaacaccaccactgcccacaggaactttatataatctaattataatctagtcacattaggcaaaggaagacaactacagttggaaatgttgtaacatacttctaagtttaaagcagccaagactagaaattttacattgggtcccattattcaccattttttaaccatttctgaatcataggaatgcagaataaatttattgccccctgaataaagctctaagggatttccatcttactcatgttttcagtagatgttttgtagaaaatttattcatttgtccaacaaatatttattcagtgcctgtgatgtgcaagacaaaaaactctgccctaatggaagttactctttatcaggggaggcaagtattcttgtctgactagacagatttttaattgtaactatggtaagtgttaacaagaggcccaaggtgccaagagggaatataacagaggaactttacctattgtgaggatcagaggagccttttcttctcagcagagttttgtgtggtttttttttctgtccatgctaaataaaaattaaaagcataatgttaaaagtatacacctgtgaaattgtttcttcagaaagtaggtgaatcttatcatggtatgtaactattctgtagtgtcactttgaaaagaggtaaaacccaaaagaacttagaaaattaccaatgtgtattctagctacccctgttaattgttaagcaccaaagaggaaggcttttagttttgtttttgtttgctaatttttaaagttacagaatacatactagtttattaaaaataaatccaatttatgcaaaacctatgaaataagaagttgaagtccccttaccccatttcctagggaaactttttggcatacatgtagccttctgtgtagaatagatatatatgtgatgtgtgtgtgtgtgtaaatatatatatatatatatatatatatatatwtataaacacaacacatacacacactattttttaaaaatctgttttatactctaaataccattctgtaactgcttactcaacatattctgttgctatccrtgtacatgcatatctttttaatgcaacattatatttatgttatagacatatcaaaacttacttaacttttcttctattgttatgtatccaggttagctataattctattataaatgttactccaacaaatacaccttttaatacaccattgaaaatgtatgtatttctagaggttagatgcctggaactagattaaagagtatgtacattaaaattttgacaagtgccaccaaattggacttcaaaaagttttaccaatttatagactaaccaagtagatatagcagtgcttttctcctcataccatcagtggtgcttaaaattatcagtcattctcatttttgtcagccaaataagtagagaactgcattaaactgcaggtccctgagcaatagtgagaatgtcttttcatatatttactatttgtattttactctgaatttccagtctacatatcccttgttccgtgggagttttgaaaacctcttttttgttgaattttagcaactctttgtatattagggatactaattctttgtttattgtttgttgtcacaaatattttctctccagttgctcattactcttaatttttcccttgttgtcaattactacataaaacttttaatttcatataaattctcatctttaattcctttacacgtgtctttggtggtttgtgtcttcagaaagctttttcaagtggcgttttgtttgtttgttctttgagacagtcttgccctgtcacccaggctgaagtgcagtagcacaatcactgctcactgcaggctccgcctcccaggttcaagtgattcttctgcctcagcctcccgagcagctgggactccaggtgcacaccatcacgcccagctaatttttgtatttttggtacagacagggtttcaccatgttgggcaggctggtctcgaactcctggcctcaagtgatctgcctgcctcaacctcccaaagtgccgggattacaggattacaggcatgagccactgcgcttggcctaaagtggcttttgataagaactatatataagcaatttggagttgccttccatgataatcacttggagtccaaaaagtgcaatctagtaggtcaatataaagtaagtgtgcaaataactatttaataaggacaaagaatgtgggacactaagaaagtataaattatctgtggaatcagtagagtctccacagagaagcctggtttgaaatggatcttggagaatggaaatggggagttaaggtgaaaggggtatgcatttcaatagaggttgtcacaagaatgaccaaaggagaaagcaaagaaagtctaccaaacacatgacctaatggtgttttgtgtgtcatccttataaaatccttccaacaatcttcaagaaacattgtgtatgtgtgtaagcacgtgtatcactaacttgttactctcattgatggattttgacttttagtgccttctactcctgtgcatctcaccaatgagatgaaaaactacatgaagaaatcttcctacatgcaagacagtgctatagattcttcttccaaggatcaccactggtcacgtggtaccctgaggcacatctcggagaactcctttgggccrtctgggggcctgcgggaaggaagcctgagttctcaagattccaggactgagagtgccagcttgtctcaaagccaggtcaatggtttctttgccagccatttaggtgaccaaacctggcaggaatcacagcatggcagcccttccccatctgtaatatccaaagccaccgagaaagagactttcactgatagtaaccaaagcaaaactaaaaagccaggcatttctgatgtaactgattactcagaccgtggagattcagacatggatgaagccacttactccagcagtcaggatcatcaaacaccaaaacaggcatagtttaattttaatattttggttttctcatttaacaaagcaaaatagcagcaaataagttacagagcacaataatctacaagatgctttcattattctggaaaaaagaaatagtttatatcttctaattgctactgcatttgatgctaactttcagagaaatcaacagctttggataataactttaaatggctatgactttgcaaacttgctatctaataacccaaagaaggaatatgcagattatgattgttttcttaccagttgtttgtctctggcatatttaatgtttgtattaataagagaattttaatatctgaaaattgtttctaaatagttcgtataatgggcatttgaattcactatttatagtctaaattcttctgaagttctgaatgaatgatgataacgacattgaaaatagctcattctggctgggcacagtgacccacatctataatcccaacactttgggaagcagaggtgggaggattgcttgaggccaggagttcaagatcagcctgggcaacatagggagaccctatctctacaaaacatttcttaaaaaattatccaggcaaggtggcatgtatctgtagtcctagctccttgggaggctgggtgggaggatcgcttaagcccagaagcccaggcgatcgagccagaccctaacagaaagaagggaaggaaaggaggaagggagggagagagataaggaagggaagaaagagagtagcttattcctagaaatgatacaaatttaaactcaaattcacaagcagttttagaaaaaaatctaacgccttttgtttactgaaaaatcaacattccttataagagttatactcttataaatagggcttagctgttgttcccatgtttatattattggatttataaatataagtaatgtaaacatgaaatcccattttagaggcttgggttaaaagctactgcttgatatatattgattattaaaggaaataaaactaatttgtaaatttaggaatataaaaagcattggaccaggattatataaaagccaggtttgaactgggttctatataggtttccatctgccatatctagcagtttgacctgaagcaagctctttaatctctggatatcagtttcctcaaccataaaatatgaatacattggactagatgatctctaagatctcttccaacctttatgttctttgactatactctatcctttaatatcttgctttttcataatttttccaaaaacacatatttgtctttcagtaataattcattttgattctagccagctttgtcctgggctaggtttaaaaaaaaagaaattaaaaaaagaaaaattataattcattttgactctaacaagaaatctttgtttgtttttctttrttaaggaatcttcctcttcagtgaatacatccaacaagatgaattttaaaactttbtcttcatcacctcctaagcctggagatatctttgaggttgaactggctaaaaatgataacagcttggggataagtgtcacggtactgtttgacaaggttttcaaatgttttctcttctttaatttccagcagcctattgtatgtcaactttttaattgaattattttgcatcaaaagggacacatcaaatacctccaaaattctaaaactgaatcatatctaaaaactattttaaaaattgtgttagtcactttttcctgtgattttaaaaaaattagacaaacactacctttttctccatagatttaatacttgctttatctgaatataaaacttgcaaattgtaaaattaatgtaatgctttgtagatatttgacagtttctacgtgagcatagattatatatctctaacctacattattagtaattaaagactgtatatttctgtatactctccataatatgtaataccttgtaaacatgttagtatcttaaaattagaagttcccaaggaatatatgtatctttaaggtagtcagaatgtgagcataggctatttgataaaattatttttgaattatactgatgaatataatatccctcattagtatactaatgaatatactgtacatcagcacatgctgatgggatgtcactgctttggctaatgaatcctttctaggcctgagatttgaaagagagtgcaaaatttttcatgttataaaatattattttgtctttttctctttagggaggtgtgaatacgagtgtcagacatggtggcatttatgtgaaagctgttattccccagggagcagcagagtctgatggtagaattcacaaaggtatagtgtttatattatgtgggaattatatgtatgaatattacaacaaatagataagaaattataaagttgataactgaccttcaaattcatgatatgaaataagaacatactcaattataaaactgtagcattaagaaactctttgatgccatttcaaaaactcttctttccagcttattttctagtatcagaagatatctatacatcaacattgtgtgagaagttaaaaaaattaaaaaggaaagaaaatatctagacagtgctttcattcatattttacatgtactatgaagcaaattgctgtaaaaacactgtcatctacacttgttttttttgttgttgtttttttttttcgagacagagtctcactctgtcacccaggctggagtgcagtggtgcgatctcagttcactgcaacctccgcctcctgggttcaaatgattcttgtgcctcagcctcccaagtagctgggactacaggcgcccaccaccatgccgggctaatttttgtatttttagtagagacaggttttcaccatgttggccaggctggtctcgaactcctgacctcaggtgatccccccactttggcctcccaaagtgttgggattacaggcgtgagcctctgagcccagcctgatatctacacttttagtaaggactaactaggaactttcctccaatctctatatatttatagttcaacttatcttctctcttgatttaaatttatttttataaagatactgttctaaaatatacttaacattagacataagattggggaataaattaaataacatattaaagaaactctgtaacacaatttcttccagaatttgcctgagtccctcctcaaacaaatgaatacgaaataagaccataagatttaaaagaacatgtaggatttttatttatgatttgaactgcctaatttttaggtgatcgcgtcctagctgtcaatggagttagtctagaaggagccacccataagcaagctgtggaaacactgagaaatacaggacaggtaacagatcattataccaaccttttacagtaccttagaagagcaaaacaatgtgtgaataacatcagttctcattgagatctctaaatttgtcagctaatcaagaaaccaagcctgatatatataaccatctgggttgttgatttttccttccaaattgaaatgcaagtattacaagacattttttactgaggaagctgactttctatgtcacatttaacgcttacattaccaaagagatctgatgggggagggatggaaattgcattttaaatttgttgtataaacatctcatttctagtggttttcactcttattctttagcctyaacacaaaatttattttgttgaagtacattttgagttagggagtttaaccaaattatctataatggtctttggaggtttttgttgttgttttgagacagggtgttgctgtgaggcccaggctggagtgcagtggcgcaatcacggctcactgcaaccttgacttcccaggctcaggtgatccccctgcctcagtctcccaagtagctgggactacaggcttgtgccaccatgcctggctagtttattttttatttcttgtagagattgggggcggggggtctccctatgttgcccatgctggtctcgaactcctagacaagaagtgatcttcttgccccagcctaccaaagtgctgggactacagtgggactacaggcgtgagccaccacacctggcttttttttttttttttaattgagatggaatttcgctcttgtcacccaggctggagtgcaatggcatgacctcggctcattgcaacctccgcctcccagagtcaagcaattctcctgcctcggcctgtcragtagctgggattacaggtgcccaccacgacacctggctaatttttatatttttagtagagatggggtttcaccatgttggccaggctggtctccaacttctgacctcaggtgatctgcccaccttggcctcccaaagtgttaggattaccagcatgagccactccacctggccattatcatacatttctaacatgtattatatttataatagattctttttaatcatttatctttctatacagaaatgtaataaaaacttgattttggaactttcaaccccttgcttttgttcctctattttttttttctcccccttcatttggtggaccaaatttggtagttactttaaatgattttataccattaactatacaaagtcctgaaaatgtatctattttcttagcattcttcttaattaatgaaatgctattttacttatccaggtggttcatctgttattagaaaagggacaatctccaacatctaaagaacatgtcccggtaaccccacagtgtaccctttcagatcagaatgcccaaggtcaaggcccagaaaaagtgaagaaaacaactcaggtcaaagactacagctttgtcactgaaggtcaggccttgggagactacaatctcacctttaaattattcctcgcctattcaaaatttgatttttacatgttggattacagttaatgccctagttttgttcattattcttgtcaagtacaaataataatctgacatcrcaccatactgaataaagacagaaacatatttgcagctcatagggtctgaaagactttggataataaagtcatgcatgattatggtcttttaaaaatgctttaaattgttgtaaaattcaaaatagaatttggtaagtgaaaaaataaagaaaaacaaatgctgagatgccttcaaacccatgkgaaaccttgacccttagatttttgtatttctatttaatttaattttaagaactgtgaatcaaactctgggcagatattcacatagtagtgcccagaaagtggtctttgttacaaactatgctagcctttggacagatcactaattggtagtaagaaaattaagaatgacagtggctttccagtaccctttaagattctgtcttcttaagaggtttatatttcctttactttataaatgatggtgatggtgtacagtcattgttttattttacacaaacgttagcaactctgaatcagtccccaaaataatgagaaaaaataacacagactatattattttttcctgaatatgaaaataaaattaatgtactcattttatcatactgctctttattctttatttcttccatctttttttttttttttttttgaaacagagtctcgttctgttgcccaggctggagtacagtggcgcaatcttggctcactgcaacctccgcccctgggttcaagctattctcctgcctcagcttcctgagtagctgagattataggcacacactgccacatgcggctaatttttgtatttttagtacagacggggtttcaccatgttggccaaactggtcttgaactcctgacctcaggtgatccgccctcctcagcctcccaaaatgctgggattacaggtgtgagccaccacacccagccccatcattctttctttaaatagattttttttttaaacacccaagccaaccatgagcaaagactttaaatgtattttttaattattttctggttattgttcttttaatttatttagctgataagaaatttattgaaatattgcaatttatctgagttaaattacacctccccagaacattacaatttcaatttatttccacataacctcctctaacatttattttgttcttcttttcatctttctcacrctgtatacctgagtttctcccatacctgtccttctgtggagtttcccctttttttgtctgttatcgtactctgttttgttttgtttttgtagagattggatctcactgtattgcccaggctggtctcaaactcctgggttcaagcaaccctcctacttcggcctcccaaagtactggggtttataggcatgagccactgtgcctgaccatagtgtcttttaaaacacacaagtttgatgcataattccattttcagaatcctactttcagaactctccttcctaatcaaacagcttagttcatgcagttagttgataagatttcttaatgatggaaatagactgtaagatacagcttcagtataccattggagtgcagtaagtacatacagagctataaatacgggaaaatgggcttttaaaatgtgtctagaagtatatatgtttgtatgttcctatgtaaacacagcatgttaataatatctaaattttttttatatctttttctccagaaaatacatttgaggtaaaattatttaaaaatagctcaggtctaggattcagtttttctcgagaagataatcttatrccggagcaaattaatgccagcatagtaagggttaaaaagctctttcctggacagccagcagcagaaagtggaaaaattgatgtaggagatgttatcttgaaagtgaatggagcctctttgaaaggactatctcagcaggtgagcccctagcatgtggagtatagcatttttaatgatgagatggattggcctttcagaatggtttcataatgctggtttaactgtaccttcatttgtcattcatggtacccccaggaagtcatatctgctctcaggggaactgctccagaagtattcttgcttctctgcagacctccacctggtgtgctaccggaaattgatactgcgcttttggtgagacttatgaaaagtaatttacagttttatagaatatcaacttagcaactaactaattcagctgtggtggtttcatcatgaattgttctcctgggtttcatacctagctacttgttttaggtaggcatgttatcttgtatgtgacaacttctttgaatgtattccatatttatataataatacaaagtaatttattcaatttatttaactaggatttatcaagtactgacttcaggcattttaatgggcactgawactagttattatgttgagcaggtcacaaactgttattcctcatctgcaaaacaatggttaaaaatctctttaataggaaaataacatttctgtaagatgcattataaatagcattttaaaggactacattgatttgaggcaccagataggaaaaagtgaatgaaactctcttgatgagcgtataagttggtatcagtttttagaaaacaatttggaaatacttaattaggctattaaaaatggcctatattctgacagtatagaaaattacaaagtaatagaaactcaggtaaaaatttacatacaaagaagttcttctagatttctattaataatgaaaaggtagaaacaactctgtccaataaaaggagaaggcagaaataaaggtatagccatccattggaccattatacaggtattaaaattgttttaaagcatatttaaggacttaagaaaatatttatggtagaaccctaatttttgagagtatgagacaaaatatataatactactgtagtkctaacttaaggtataaattgtacaatattaactgttattttatatattattttctctattgaacataaattacttttatcatcagaaaattcaatgcatactttagtagaaagttgttcaatggtttattttcaaataaatgcttctaaaattcatagaatggtcacaaatctctttaaatgtgtccattacagaccccacttcagtctccagcacaagtacttccaaacagcagtaaagactcttctcagccatcatgtgtgragcaaagcaccagctcagatgaaaatgaaatgtcagacaaaagcaaaaaacagtgcaagtccccatccagaagagacagttacagtgacagcagtgggagtggagaagatgacttagtgacagctccagsaaacatatcaaattcgacctggagttcagctttgcatcagactctaagcaacatggtatcacaggcacagagtcatcatgaagcacccaagagtcaagaagataccatttgtaccatgttttactatcctcagaaaattcccaataaaccagagtttgaggacaggtatcatcaatataatgtgaaccgctcaaagcaactggttgttgttagtagcagtagcagcaacatgcatttctcttaagaatgaaatgtatgtatctgtgaccttcacagtggttaggcagaggatgactctattggatgtctagctattgtgactgatagttttagttagcaaaccaataagctctctagtcagtcagcctgagtctttcttccctcttgagcatatttactagtaactgagaaagttatttgtatttcactgttaatcatactacttaaacagaaacagaatagacttatttaggcagtaacacagtgggagactarggaccagaaatatagaggggagataagggcagagagtttgcaaaaggtaagacaaagaagatggggaaaagaagaaatgattgaaaacatagaagcatacaaagagaaggactacatcaatacattgcataattattcatacattttactctttggttatgtctttgtatctatccacatccaactttatttattcaagtttttttcctttgtattttatccaaaataaccacaggagtcagacttttattcttctttcttcttttccttattatgttgaaacacacattaagcttctgataacattagcttcagctttgaattaacaactagaaatcaaaagaattttatttaacctatcttgctgactttatgcrgcttaaagagcttcatcaaaatagaacctaggccggcgcgatggctcacgtctgtaatcccagcattttgggaggccaaggcaggtagattgcctgagctcaggagttcgagaccagcctgggcaacatggcaaaatcccatctctactaaaaatacaaaaattagttgggcatggtggcacacacttgtaatcccagctacttgggtggctgcggcaggagaatcacttgatcctgggaggcagaggctgcagtgagccgagatttcaccactgcactccagcctgggcaacagagtgagaccgtgtctcaacaacaacaacaaaaaaaacctagacagagaataaattattgttaattttaacatttaacagatatggagtaaattcatagtccagagtcatacaaaaagtaactaggatctcaatcaaaatcagacatgaatatttgttaagtgttttctgtttctggcacaaactaaccatattgacattgaaatgtatttaaaaatagtcttacttctttgtctctgtagtaatccttcccctctaccaccggatatggctcctgggcagagttatcaaccccaatcagaayctgcttcctctagttcgatggataagtatcatatacatcacatttctgaaccaactagacaagaaaactggacacctttgaaaaatgacttggaaaatcaccttgaagactttgaactggtaagttgttttctctatatttaaaaaaaaatccatattttttaaaagaaggtgtgttcataaagtttccctttagggaaaaagctatctttaaaatagcttcatatgtgtgtctaataaatggataacatatctggtatgtttctgtgctgagaaattaggaaataaggcaaaaagacctgagtataaatcctgactctaccactgacttgctacaatttggcagactcctatggaccaatcacttaattcttctgagtcttggtaactttgactataaaatggagcaagtaacctcacagggttgtggtgaagattaaatgaaataacatatgtaaagcacgtagtatagtatctgctacagagtagacccttagtaaatattatttttgtctgcttctcaaattctgatgagttacctatttgatttttaaccaagtttgaatgtaattttttttttctcctccacactttttttgtgtgctcagatggaatcctttacattgtaataatagtcctagaacttctaaacctacaaataagatttagaaacaaaatttccaagtataatatcctttacattgattgaaagttagcctttttaaatactgcttttattatccaagtaataaatgtttattgtagaaaaattattaaggagagaagaagattaaagccactataatctgattaccccaaaactgttaacattttggagctaaatttccagttacccttttttttttgcctataattgtgcatgtgtgtattggagatgaggggtgtgcagcatctacatcttcagtttcattcttagcaatagagtaaaaataatctttaatttttcttagaaatctttcacccttgtaaacaacctccgtgtctcatttgaaatcttttaaaagtatattttatttatacaacaaaattaataagattgtgataatcaccgaaagacttcatatttttaccaaaaaaaaagctttgttgtggctctttgcatctgtttagaaatatatggctctttgcatttgtttagaaatatatgaattttttttctgaacctttcctccagaaagtattttttgatcatcaaagtataaccactattgtgtccttatttatcctaaaaatataagaaagaaagcaggagtaaattctgtctctgctgtctctagacaaacataatgttgtgcttaaacataacttttacgtgggatgcagtggggggacagtctgtctagaatcagacagactgtctagagtcagacagacttgacttcttcacttggacaagttaagtaaccttttaaggtttgactttctcctctgttaagggaaatratagtcatctttctgtttgtctataktgcagaatagacaacctaaaagtattactgcttttttcccttaggaagtagaactcctcattaccctaattaaatcaraaaaaggaagcctgggttttacagtaaccaaaggcaatcagagaattggttgttatgttcatgatgtcatacaggatccagccaaaagtgatggaaggctaaaacctggggaccggctcataaaggtgagacatttaagaggaatggattatttgtgtaaatgtagacaaagagcaagccagaaaaagaagattgaattattgtaatactgtatttatctattcggtttatgctttctgtttccaccacttaaaagtaaaggccttcatatcgttaacagtttgggaaattattttatatatatatatatatatattttttactatactttaagttctagggtacatgtgcacaacgtgcaggtttgttacatatgtatacatgaaccgtgttggtgtgctgcacccattaacttgtcatttacaaatttgaaagtccctttaatctcagtaaggcataaaacaagctatcttaggtctcaaggacagaaagtttaaattacttagaggatgaatttcctagattagcaaaataatgatgcatttgttagggatttaacattattatttcattgtaatggcttgatcgttgtgcctatgatttccataataaaggggattaccaataaattagagatcactgttgtgaatctcttactagctaatatatattataaattaggaggattattgtattttcttggcaatttagcttctcttttctaaaaattgtgatcttcacatgcccctttcttgtttttgtaggttaatgatacagatgttactaatatgactcatacagatgcagttaatctgctccgggctgcatccaaaacagtcagattagttattggacgagttctagaattacccagaataccaatgttgcctcatttgctaccggacataacrctaacrtgcaacaaagaggagttgggtaatgaaaagtcaaactttgtacaatatgattttcttggttagcttaagagtaagtacttttatgactgagaaaacaaatattttctattatttcaaggtttttccttatgtggaggtcatgacagcctttatcaagtggtatatattagtgatattaatccaaggtccgtcgcagccattgagggtaatctccagctattagatgtcatccattatgtgaacggagtcagcacacaaggaatgaccttggaggaagttaacagagcattagacatgtcacttccttcattggtattgaaagcaacaaggtactctgcaattatttatgagttttgattgtgcgtgtgtgtgcatttcaggtcattgattatacttcattctctgaaaatatattactgaattagtaattcatagactaaattggcaggacttaataaatttaaaacagacttcttgataggcgattttgagaacactaagtgaataatagaatggttaccacatttatcagttagsatgttttcacttgcaagtaatagaaaataaaactcaacttttgtttaacaagaaagggaatttattgggagtttttttgttttgttttgttttcttttcttttttagacagtttcactcttgttgcccaggctggagtgcggtggtgcaatcttggctcactgcaacctccgcctcccagattcaagcagatctcctgcctcagcctcccaggtagctgggattacaggcacccgccaccacgccaggctaatttttgtatttttaatagagacggggtttcaccatgttggccaggctggtctcgaactcctgacctcaggtgatccacccgccttggcctcccaaagtgctgggattacaggcgtgagccaccctacctggcccgaaatttattggtttatattggactttagaagtcccagagatagggtggtcatcaggtgaaatctgatcagggctctaccttaatttatttgctatttttagttatttcctcctccctgttatcagttttcaaaagactacatcattttcatacttcccacctgtataccacatcacatcacctagagcagtcttcaaacagaaatctcaccaatcactactatttaagcaagtactgtgtaccaattgcgttatgcctaaattaaggtcaatctctaagttggaagcaagggataagaatatacagatgctcctcatacagtggggttacatcccagtaaacccatggtaaattgaaaatatcataagtcaaaaccacatttaaaatacccaacctaccaaacatcacagcttattagcctagcctagcctaccataaacagttttacattacttacattacattatcctacagttggacaaaatcatctaacacaaagcttattttataataaagtgttgaatatctcatgtaatttattgaatactgtaatggaaatgaaacacaggatgattgtatgagtattcaaagtatggtttctaccaaatgcatgtcacttttacagtgtcataaagctgcaccatcgtaagttggggaccatcagtatcgattggcttaagccagtcctggctcattcccagagctgggataggattaatcccactggaacttcatgcctgctacccatgaggcatagaactaccgcatctactcaaccttataacagtttcacattataaaacatgctaatagcaacttttctttcacttataatggaaacagattgagaaaatgtattagtttcctattgctattataaaaaattactataagtttagtggcttaaaacaacacaagtttattatattaacgttctgaaggtctgaaatacaaaatgggccttactgtggtaaaatcaaggtgtcagcagggctgcattccttctgtaggtcccaggagaaaatctattttctaccctctagagactccccatacaccttggtttatggctcacttccatcttcaaagctaggaactgcagcaccctctgcttctgttgccacgtctctttctgtgactcagactttcctgcctccctctttcacttattaggacccctgtgattataatgggcccacccagataatccaaaataacctccccacatcaaaatctgaacctaatcatatatacagtttcttttgccatataaatagtaatatcttcagaggttctgaggattagaacagaatcattagaatgtaaacatcttggaaggggattattctgcctaccacaatttacaggaatccaggctttctagattacagacttaagtcatataaaggaaaaattcacatttttgtttgtgaattatttcttttaaagtatgggaacttgttgatcaaatcattgatgataagcttatttattccttctgaacctgtaaattagattgtgtacttttttttccccttgaacatagtctttgacttgattccttcatatatgtctaaaaattggattggcatacaattgttttcatagatctacttgaatgttaattaggaggggagggaagtcttcaaacaacctggaaagtatttttgtgaaaattaacatttttgctaactttaggtccaactgaatattttgcctcaaaattagtagagcactcttcagctcagccttgaagtcattttcttttgtctttctgcttttatcttagctgtcgtcaccaaaaatacagtcatggtagtcacagttattttctcctttgttcttcttctagctctctcttcattgtgtttatctaccctcttttattaaagtccatagggtagcaataatggagtgatgtatacttgtggtaattatctgtatgtccaccttctagagactcctcatactccttggtttatgacttccttccataaagggaactgtaaagggtttaggattttactgtacttgcaagctaataagctagcctgtctttgttacatggatactggcagaagacataaaactcctgaatcagagataaaagactattactaatgcatagcaagcagcatgagcatggcattagtgtcagttccacgtcttccaagtcccgtaaaaatgatgtatgtgacgcacctccccccgcccacccaggcaaagcagtgcctggtatcacatcacacaaaaggaacaaaagcaaaacacacaaaccagcttcaacttacacttggttactcaaaagaacaagagtcaatggtacttgtcctagcgttttggaagaggaaaacaggaacccatcaaaccaaccaatcaaccaaacaaagaataaattccacaatgaaagcacgtattttgtctttttgcattttggtgtataagccatcaatattcagcaaaatgatttctttctttaaaaaaaagtggaggaaagtagaaatttaccaaggttgttggcccggggcgttaaatttacagatttttttaacgagaaaaacacacaaaaaaagctacctcaggtgttttttacctcagcaccttgctcttgtgtttcccttagagattttgtaaaactgatagttggagcatttttttttatttttttaataaaaatgagttggaaaaaaaaaagatatcaactgccagcctggagaaggtgatagtccaagtgtgcaacagctgttctgaattgtcttccgctagccaagaacctatatggccttcttttggacaaaccttgaaaatgtttctttaaaaaaaaaaaaaaaaagatgacaaagaaaaacagagataatattggagatgtcctgaattttaatagggtacatgccattagggctttttgcactaaaggatgaacatgtactggtttatgtggacaagccattataccaccagactgcaatgccagtttcctctacggtgaaaccccgtctctactaaaaatacaaaaaatcttagccgggcgtggtggcgggcgcctgtagtcccagctactcgggaggctaaggcaggagaatggcgtgaacccgggaggtggagcttgcagtgagccgagatagcgccactgcactccagcctgggtgacagagcaagactccgtctccaaaaaaaaaaaaaaaatgatgtatgtgggcctgtggatttgtacacatgcaataggttgtattataggagaggaatgctatgagaagagccttgggaacccaccattttgtagcagtctgtaagaaagcctgttttttgttgggggagagaagttaccacatccttcatggttgcacactgcagatacaaccttaagaaacggcccagataaaaagaggtcaggaccttgcattttggggctagtcagcaagaacatacaggggtactcagaactttaagtatattgcctctcccaatactgtacaccttaggcaactcccctcttctctcaattatcagcaacaataagattgcatactaatcttctatttctgaggtgctatctttttggctgttttgtactttgggtggtaccattcttataatcctttgaatagaaatacttcatctagattttctctttaatttaaaagaaaaacacgtatcaagggctttagatatataaaacttaatgaactgtgatttctaagttatctttaaactattgactaagtgacagtgaaccgagttattagataatgaatattagcagtgttttaaataaaaggggaaatagggtgatatgttaaactgaagcccagagaaaacctacgtaaagaagtgattcttaatcttttttgggtcaagaatatctcccgggccagtcacggtggctcacacctgtaatctcagcactttgggaggcctaggcaggtggattgcttgaactcaggagttcgagaccagcctgggcaacatgaaaaaaccccatctctacaaaaaatacaaaaaaatagctgggcatggtggcacatgcctgtggtcccagctccttgggaggctgaggtgggagcattgcttgaggccaggaggattgcttgggcctgggaggtcaaggctacaatgtccaagacaatttacagttgtctttttttacaacacagaaatgatcttccagtggtccccagctcaaagaggtctgctgtttcagctccaaagtcaaccaaaggcaatggtaaggatatattcattttactgtactctcctacggtaatgggaatgtaaaatggcacatccattttggaaaacaggttgacaatttcttaaaaattataacttacacctaaaatataatccagctttttcactgccagctgttcacttgaagaaagtaagcctatattctacataraaacttggacagaaatgtttctagcacttacttgtagtagccaaaatttgaaacaactcaaatgtccaaaaactgttgaactgaaaaactggttgtaatatatccaaacaatgaaaagctacacagcaataaaaaggaatggactattgatacaagcaaaaaaataattaaaataaactcaaaataaatgttctgaattaaataagccagagcataaragaaatagttcatactgtatgattctattacacagttgtagacaatgcaaattatagtgacagcagctcagtggttatgtgggacaaacaggggaaggaagcatttaggggaacaggagaaagagattacaactattatgtttcatactctgccaatatgattgttttgaaccggtggtgtattattggtatacttttttatttttcttagaaatttaataatatttttcttgcaaggaatattaaaatccattcttggactctttgtaacatcatccacagaattctaaagacttgtctataaaaattccatctcaacttttatctttctaggcagaattatttcagggtcattcccaaatagaggttcttaaatgtatttacctatatttgtttctttctttgttttsttataaagttttccaaactctaccgtatttttctcagtctcttgaaaatataatttaatgaatgaagttatatttaaatatgtgatgttttagctgtaagtgaaatataatctccttttttaatatattgaatttttgtaatgatagctaagaattaaaattaacatttggtttaaaaatacattaaaagttcttttctgttttatccataatttattttcctgtgttgaattgatagtctttttgaaatcagactttaaaaagcttactaccttcttttaaatagtaaagtgaacatagttaagcacctgtgatggatcacccattcagtgcgaaaaattataatcagtgtatcacatgaaccattcagcccaaactgagctttgatgtgaactattttcttttaagaaattagctttttcctcacacctgtaatcccagcactttgcgaggccgaggcgggcagatcacgaggtcaggagatcaagaccatcctggccaacatggtgaaaccccgtctctactaaaaatatgaaaattagctgggcatggtggcacacacctgtaatcccagatacttgggaggctgaggcaggagaatcgcttgaaccagggagtcagaggttgcagtgagccgagatcgcaccactgcactccagcctggcaacagagcatgactctgtcgaaaaaaaaaaaaaagaaaaagaaattagstttttccttgggataaacccaaaaayattagaggtttggaatcaaatattattccatttatttggtttttaatcattttgtaatatgaattatttttgtrtactaataaaaataacaacatcccagaaatgtgagttttctttaattattttgatgtccctcttgtggtttggattggctcatccccttacttcctatattgtcctttcaggttcctacagtgtggggtcttgcagccagcctgccctcactcctaatgattcattctccacggtaagaaaaagcccmccctctttcatgtcatacctccttatctgaggaactgcatgtttgtgttttgaaccaaactgatttcatatttaaatatttgtcttctttagatattcatattaatagtaaggctatattttactgaactaataggccttgctaagtaaatcatacaacatagagcctcacataggtaaccgtacatcatttagcacacactcagcttttaaatacactaaccagttaaatagataactttagtgcggagatttttcttattaatgtgtaaaattcttttgattgtctcttagaccatgggaagagaagaataatataattaagagtggaattgttcctttgggctatttttggcgagtagtaaccttcaagttcaaatctgtgcaatcagtgaggaaaaaacagaagtagcaaaaaaataaataaataaaaartaggtttacttgcttttgaaagacttagaaaatgctttaccaaatgattaaatgagagagctttaatcatttaagattagcacagagaaatctaggggtgactwaacaaaactaatacatagttaaattccatttcatgctctttttaagtctacttttatgcccatttggctaacatccctttttgtggttttcttcctggtatgtaatatacatttctacagtgatcagagctagatcttcatttcatggaattgttttattccacatgcatcccatacaatatgttctgaacttcaatatggaatggctttccatgtaaaatacagcgctgagggattgctcttttattaatccgaaagtcttattatgtcaacatgagctggctttagtgtgggaggagaaaaataatttcatgaccagaattccaaaattctacacctttcatttcattatgttgtctcacacttgtgatttggtctagcaagccatgaaaagataattacagcagaacattttaaggtagtaatgattgagacacaaaagcaaaaattttttgttatttgtatgtgttgaaattgagctacagcaacactcactattctctgtttattcagaatgtcttcaatttcacatagccaaagcaactgaattttcatgtatttctagtaatattcacactgtatagtgctcttctttttaagtaatcagtatgttgttgaaagaaagaagagttgagtttttgtgaaattaacataaaaccctagaaaccaggacttttgctgttcatggctgccagcattttttggttggagttaaaatcttccaggaagtctcccaaacaatactgtgtccttgratgctaatatctatactattaatttctcattgagaatggagtttcataatccagtgatgctttttgatattatattaccactatttattttttaaaattctattgcatctaccatgtgtactttttatcttaatagaatgagtgaaaccttgagagcaaagcacaaccttttatttgtataaaattattttaatttattccaagcatttatttttgcatttttttcaagtgatttttcttttgataggctatgctccatgaagtgctttacagttgaacattgcattcaaaatttacattctattcaataattattctattgttatgaattcattatttttcttaaatttatatgagacttagactagatttgaaaatctttatacctaatagattatcaggtcactaaattggagactatatccatgtaatacactcacaagtacttgaaaagttggtattttctctttccctcaacttctaagctttaatagtcctattaaacttttttaaaattgtatgaaagacaagtcttataaaattgcttcaaaaaagagatgtstacagtcagatattttaagaagtactacataatagagttatcttttggcaactcaaagtttatattagcaaggactgtgaaaattcctggaataaaaattttgagttaatgttgtttcacctagtatttccagatatatttaatgatgggaagccccatgccctatgcacatttaattgcactgatatttcctttcaaacactgatctaaggtggagagatgtaaaatggatcttgtactaagaaagaagaggagagagacaatgtgcagtcccccgatcctggaagttagtaaaatactatctgatgatttgctttggttttatgctttaggttgctggggaagaaataaatgaaatatcgtaccccaaaggaaaatgttctacttatcagataaagggatcaccaaacttgactctgcccaaaggtagttttccaaatcagtcatctaattactctaaatgccctaataattcaggtaattaaaaaaaaataggtatcctyttttctttgctttatrtgttactgtagctttaaagggaaagattattggtcaaataaacaaaagaacaatatayaaatgtcccagtattcattctcgtctctgagactaattttttttaaatgattgaaaagatagctgctgtgttttacagtgtttcttgtattttgtgaagtagcaattcacaggctacctaatagtttagaaaaagtatcttgaggatgttttgtctgatctattatatccttaatcattgtaacataactttgtttctttcataaattaatacattgagagtcatttaagaaaataaacattaaattattaatgccttgtgaaaagccgtatcaccaacattgattttagtttattctttgtaatttgcatttgtgtggtcttccatcatagcagccagggtagttttagaactaaaaatgactggatcacattagtgtaaactacttttccagtcattgctacttttaaaattggttgcttaaaatttgaaagcacctagcaaattctgtttaacaccttgtccctttctcgtgtcaatatttttaaagtaaaaccccatgtaaattattatttttcaagaatcttatatacaagaagatgacatttatgatgattcccaagaagctgaagttatccagtctctgctggatgttgtggatgaggaagcccagaatcttttaaacgaaaataatgcagcaggakactcctgtggtccaggtacgtgaacyagatgaataaattggtatactatggagtacaaaaacgtctctagggagcattttttgagtaaatatgtaatgcattagttcttcytctgttcctcattcatgtgtaatatttcagaaacaaaayagaatttgttatctcctmttttttttattttccrtatttgtaagtgggttaccttattagtgagatctccaaatgtatcatttatatcatggcttttacttctagtagggttagtccaaacattttcccccagccattctcattttaattttagtagataattttaamcagaaattttataccaaaatgtacttgatcatttcttcctaacttttctagttaaaacattgaaactatttatggatattggtttatacactgccttcttttgcaggcaaatgaaaacttttctacttcctcaatagttttataaattcctcttggcctatatattcctctctcaggtacattaaagatgaatgggaagttatcagaagagagaacagaagatacagactgcgatggttcacctttacctgagtattttactgaggtaacaataatacctaaacaacctaggatatgacagcttgttacaattatgggtttaacccagaaggtgaaataatcagagattctttcctgttttactcaaaaattaaatttaggaggaaaayggagattaatttcatgtgttacattaaagtgtcatcctatcctagtgaaagaatcattacacaaattttctcaaattaaaaaaaatagaaaaaaaaacaattagttttcaaaaatgtaatgctaaactttataaattattctttaaaaccttaaaacttaggatcttctgggatattaggctaaggaaaagcatgaaatagtagataaattatatttcaggttcttcaagctcagcatcaccctatgtatacaaatctgaccttgcttaatattctgggataattctcctcattatccttcttagtcttcctacttcatatcttcaaaattattaaaactgtgctggtttgaatgttcttacactagttatcatgcatgcttatacttacacacaatctcatccatacatgactgttcattaaatatttacaaataatgtgtatatatacaaggaagcttacggctgataagtatgtatttctcaagctacaagaataatcatacaaatattagatatctcaaaatgtggcattcgctagtggtttttcttaagatgctctttcatataatcagaatattaataattacagtaaaaataggctctttagagaagattttctgaacattttaagtcatgactttatcacatttttattaatatttaatagtaatattaaaatgccccttaaaatgtatgttgtaatgtcttttaactaagaaaataaaaatctttaattgccatttcagaaatgtgatgtaggccgggcgcgttggctcatggcggtaatcccagcacttttggaaggccgaggagggcagatcacttgaggtcaggagttcaagaccagcctggccaacatggtgaaaccctgtctctgccaaaaatataaaaaattagccagatgtggtggcgcacacctgtattcccagcccctcgggaggctgaggcaggagaatcacttgacccaggagacagaggttgcattgagcggagatcatgccgttgcactccagcctgggcaatggagcgagactcagtctcaaaaaaaaaaaagtcatgtcacatgctttttcttttaaaaaagtaaggaaagcttgttaatatagattctcatttatactgagctatgactgttttatggcagaaaacttctttcaagttatcttttttttattattttcattatgaaaatattacatccttattgtaaaaaagtttccaacagaatcttcaaaactgttaagtcctagccgggcatggtggctcacgcctgtaatcccagcactctgggaggccaaggtaggcrgatcacctgaggttgggagttcaagaccagcctggccaacatggagaaaccccgtctctactaaaaatacaaaattagccgggcaaggtggtacatgcctgtaatcccagctactcgggaggctgaggcaggagaatccyttgaacctggcagacggaggttgcggtgagccgaaatcacgccattgccctccagcctgggcaacaagagcgagattctgtctcaaaaaaaaaaaaaagtccctttttaaaaacatatttatcttattcatctgaggtagctattgttaaaaattttgatttctacctttccactgtgcatatcaaaacataaatatttgtatacatacataattttttaatatacgttttatcacatggttctgaatttggttttcacttaacaatcattaccctctttccatgtgagacgtataaatttgcctcatactttttaaagccttcctatcattttattgtaaggttataccataatttattaaattggccatctgttaatgaattttagatttcttatcaataagaggaaacaaattattaggaactatataattgtcttgccactggagtacagatagatcctgcaaatacatgcattgagaatacattttgggctagataaattagtgcttcctgaataaatgggacttttgctttagaatctgttttaaataatggtaaacaaagcaaagaaartgagggaacaaatttaggaaaggagtaacagggatcttagattaaaacatttaaaaattttatttgtatctaattytaggaacayrtttaaatcactatggcaattatattcataagcagacaaatttaaaatttgcaaatatgactaatctcccctagctgaaaagaagaccaagctrgtattctggaaaagttttctgtttcatcttgtatttctagaatattacctacattttagaactggctagttttaaaaattatttagaacttctgacaataatcttttgtaagttcttgaaatcaccctaaacaaattgtatattatttactgaattggttctaacagtatattctgtaactttgaaagttttatcatgtgscaaaagttaagatgctaaccattggtattacaaaagtataggaatatcttcttayagaagaaagattatacctctgatagctatttatacattcattgtatttcttattcagtattgtaattgtactctttggtacctcttagtgaagtacttcaggtcaatgyctgtgtctcatttaagaatgaaagaatgaatgctaatcgtatacattactataaattattgtctacagtttcaaaaccattcagctattgaactcatctgactaattttgctggggataatagggtaagaagaggtgttagggtttctgtcctaaatttgcttgtccagtctagtagtcagcttgagggaagtacacatgtaaataagtaaataatttttaaaaagctatagaaacatattctgttaaatgtttatatggagttcagtgggacctacaaagaaggggggaaatggtaggggctacacaggagtaggtggataaagttattaaagctttctaaagaattagcatcttaaaggtatttgatagttaagctaggaaagagcattccatacataccgtggagctgctttagcagaggaatgaaggcatagatgagcctggaacattcaggacactaagtcattgcgagtagggtatcacmgggtgtcttgaaagctaaacctaaaaagataggcaaggtattagttcatgaagtgacttacatgccatgccaaggaatttgatctttccacatctcttgccactgaaatggatcaatatgctttctaattctggttattttttaatggctttaatttcttcaaacattgtcttcttatgtagtgtttttaatttcttaagcaaaaacaaggcaaaaacttttagtgactctccatcacctgaggataatcctgcttgactggttggatcttaggactggctttatgggcattcaaccagtgcaatcacacagaaccctgtgcttgtaagagcctcctactcctaatatgctatagtgctgtgctatcaccaacttgaagttcttagtaagtttttaacaagagataccttatttgcatgtgactcttggcactacaaattaggtagttcgtcctagatcaaggagatgtctcctctactctcaagttactggatctggattccttgagcactaggattgtaaaataaccttcaaaggggctgaccacgataaaaaaaaatcttaaatatattcagtgaggcagtaccacagctgcctcctcttccaaaggtccttcagtccatagtgacaagaaactgaaggccaatcttcttaacgcaaccctcccccatacacaagtgaactttacaaaaatagtggtaattggttaatacaggtatcactgtagcttttttttttttttttgagtaacagcaagatttattgtgaagggcraaagaacaaagcttccacacacagtgtggaaggggacccaagcaggttgccccactgtaacttatttctaattgagctttacctcaccattttcatttaataattgtgttattaaaattttcatatttataatagcacttaactcttataaaaggctttgtactttctaaaatcattatacacatactatattcttagaccaggattgtaatggggaataagaaatccaaatgactttagttggaaaaaaattttaatccagactaaaatgagcagcttctcgaaagagatgagtttccttttagttgacagtggattaaaaccttttttcttctactgtagaacttctacatttacatcaactaaattgaaattattatcagggtaatttaattatggtactttttaactctacaaagtctgtaactgaaaggtcatattacaggtgtcatttttattaaatggatgaaataacctatgtcacagacataagtgtgtgtgggcacacagtggtgaacagatcgacatgattcctgccttggtagagcttaatgatggagaggaaaggagaaaaaatcaaacacacaaataratatgtaattacaagttgtgttaaggtctgtgaagtttgtttgttgtttttaagtgccayacacacacacacacaaaaagaataaccaaggaaacctgctttagattgggtggatagaaaacatcttcaggaggagaagacacaatgctgaattttttagtaaggattcacccttagaagggctttgtggtaggaagagatgagtgattttgaagaactgaaagacccatgaatttgaagccactgggtaaaggggagattataaaagtagacaggggccagataattcagggccttcaagggaatttcctatttgttaagaaaatttgtcctgataaagattcaattgtataatttaccgaccatttaagaatacaatttgggggtggtcacttccaaaatgaccgaataggaacagctccagtctgccactcccaacgaaatcgacgcagaagacaggtgatttctgcatttccaactgaggtgcctggttcatctcaatgggactcgttggacagtgggtgcagcctacagagggtgggctgaagcagggtggggcgtcgcctcacacgggaagcacaaggtgtcaggggatttccctttcctagccaagcaaagccatgacagactgtacctggagaaatggtatacccctgaccaaacactgtgcttttcccacagtcccagcaaccagcagaccaggagatactgtcccatgtctggctcagcgggtcccaagcccacggagccttgctcactgccagcgcagcagtctgagatcaacctgtgacactgcagcttgaccagtggggggcatccaccattgctgaggcttgagtagctcacagtgtaaacaaagcggccgggaagcttgaacagggcagagcccaccgcaactcagcaaggcctactgcctctctagattccacctctgggggcagggcagagcagaacaaaaggaagcagacagcttctccagacttaaatgtccctgtctgacaactctgaagagagcaatggttctcccagcatggcgttcgaactctgagaatggacagactgcctcctcaagtgggtccctgatccccgtgtagcctgactgggagacatctcccaggaggggccgacagacacctcaaacaggcgggtgcccctctgggatgaagcttccagaggaagcatcaggcagcaatatttgctgttctgcagcctccgctggtgatacccaggcaaacagggtctggagtggacctccagcaaactccaacagacctgcagctgaggggcctgttagaagggaaactaacaaacagaaaggaatagcatcaacatcaacaaaaaggacatccacaccaaaaccctatctgtaggtcaccaacatctaagaccaaaggtagataaaaccacaaagatggggagaaaccagagcagaaaagcagaaaattccaaaaaccagagtgcctcttctcctccaaaggatcgcagctccttgccagcaagggaacaaaactggacagagaatgagtttgacaagttgacagaaatagacttcagaaggttggtaataacaaactttcccargcaaaaggagcatgttctaacaagtcgcaagaaagctaaaaaccttgaaaaaaaggttagatgaatggctaactagaataaacagtgtagagaagaccttaaatgacctgatgaagctgaaaaccacagcacgagaacttcatgacacatgcacaagcttcaatcgccgattcgatcaagtagaagaaaggatatcagtgattgaagatcaaattaatgaaataaagcaagaagacaagattagagaaaaaagagtgaaaagaaatgaacaaatgctcttagaaatatgggactgtgtgaaaagaccaaatctacatttgattggtgtaccggaaaggacaggcagaatggaaccaagttagaaaacactcytcaggatattatccaggagaacttcactaacctagcaaggcaggccaacattcaaattcagraaatacagagaacaccacaaagatactccttgaaaagagcaaccccaagacacataattgtcagattcaccaagggtgcaatgaaggaaaaaatgttragtkcagccagagagaaaggtcaggttgcccacaaagggaagcccatcrgaataacagcgatctctcagcagaaagcctacaagccagaagagagtggaggccaatattcaacattcttaaaggaaagaatgttcaactcagaatctcatatccagccaaactaagcttcataagtgaaggagaaataaaatcctttgcagacaagcaaatgctaacagattttgtcaccaccaggcctgcctaacaagarctcctgaaggaagcactaaacatggaaaggaacatccagtaccagccactgcaaaaacataccaagtggtaaagactatcgatgctgtgaagaaactgcatcaattaacaggcaaaataacgagctaacatcataatgacaagatcaaattcacacataacaatattaaccrtaagtgtgtatgggctaaatgccccaattaaaagacacagactggcaattggataaagagtcaagacccattggtgtgctgtattcaggagacccatctcgtgcaatgacgtgcataggctcaaaataaagggatgggggaagatctaccaagccaatggaaagcaaaaaaagcaggggttgcaatcctagtctctgataaaacagactttaaaccaacaaagatcaaaaaagacaaggccactatataatggtaaaggtatcaaatcaacaggaagaactaactatcctaaatatatgtgcacccaatacaggagcacccagattcataaagcaartctttagagacctacaaagagacttggactcctacacaataataatgggagactttaacaccccactgtcaatattagacaggtcaacaagacagaaggttaacagggatatccaggacttgaaytcacctctgtaccaagtggacgtaatagatatttacagaactctccaccccaaatcagcagaatatacattcttctcagcaccacatcacacttattctaaaattgaccacataattggaagtaaaacactactcagcaaatgtaaaagaacagaaattataacaaactgtctctcagaccacagtgcaatcaaattagaactcaggattaataaacttactcaaaaccacacaactacatggaaactgaacaacctgctcctgaatgactactgggtatataacaaaatgaaggcagaaataaagatgtcctttgaaaccaatgagaacaaagacacaacataccagaatctctgggacacatttaaagcagtgtgtagagggaaatttatagcactaaatccccacaagagaaagaaggaaagatcttgacagcctaacatcacaattaaaagaactagagaagcaagagcaaacacattcaaaagctagcagaaggcaaaaaataactaagatcagagcagaactgaaggagatagagacacaaaaaaccattcaaaaaatcagtgaatccaggagctagttttttgaaaatatcaacaaaatagactgctagcaaaaagtcaaattgtctctgtttgcagatgacatgattgtatatttagaaaaccccatcgtctcagtccaaaatctccttaagctgataagcaacttcagcaaactctcagggtacaaaatcaatgtgcaaaaatcgcaagcattcatatacaccaacagtagacagagccaaatcatgtgtgaactcccattcacaattaccacaaagaaaataaaatacctaggaatccaacttacgagggatgtgaaggacctcttcaagcagaactacaaaccactgctcaacgaaataaaagaggacacaaacaaatggaagaacattccatgctcatggataggaagaatcaatatcgtgaaaatggccatactgcccaaagtaatttatagattcaatgctatccccatcaagctaccactgactttcttcccagaataggaaaaaactactttaaagttcatatggaacccaaaaagagtccacatagccaagacaatcctaagcaaaaagaacaaagctggaggcatcacactacctgacttcaaactatactacaaggctacagtaaccaaaacagcatggtactggtaccaaaacagatataaagaccaatggarcagaacagaggccttagaaataatactacccatctacagccatctgatctttgacaaccctgacaaaaacaagcaatggggaaaggattccctatttaatmaatagtgctgggaaaactggctggccatatgtagaaagctgaaactggatcccttgcttatgccgtatacaaaaattaactcaagatggattaaagacgtaaatgtaagacctaacaccataaaaaccgtagaagaaaacctaggtgrtactattcaggacataggcatgggcaaagacttcatgactaaaacaacaaaagcaatggcaacaaaagccaaaattgacaaatgggatctaattaaagagcttctgctcagcaaaagaaactcattaagagtgaacaggcaacctaccaaatgggagaaaacttttgcaatctacccatctgacaaaggactaatatcctgaatctacaaataacttaaacaaatttacaagaaaaaagcaattccatcaaaaagtgggcaaaggatatgaacagactcttctcaaaagaagacatttatgcagccaacagacatatgaaaaaatgctcrtcatcactggtcatcagagaaatgcaaatcaaaaccacartgagataccatctcatgccggttagaatggcaatcgttaaaaagtcaggaaacaacagatgctggagaggatgtggagaaataggaacgcttttacactgttggtgggagtgtaaagtagttcaacctttgtgaaagacagtgtggcaattcctcaaggatctagaactagaaataccatttgacccagtgatcacattactgggcatctacccaaaggattataaatcacgctaccataaagacacatgcacacgtatgtttattgcagcactgttcacaatagcaaagacatgaaaccaacccaaatgtccatcgatgatagactgaataaagaaaatgtggcacatatacaccatggaatactatgcagccataaaacaggatgagttcatgtcctttgcacagacatggatgaagctggaaaccatcattctaagcaaactatcacaaggacagaaaaccaaacaccacatgttctcactcataggtgggagttgaacaatgagaacacatggacacagggcggggaatgtcacacaccagggccttttggggtttgggggcctgggggagggatagcattaggagaaatacctaatgtaaatgatgagttgatgggtacagcaaaccaacaaggcacatgtctacctacataacaaacctgcatgttgtgcacatgtaccctagaacttaaagtataatagaaaaaataatacaatttggcatttctttctaattgtagcaaactgctcctgctgcagtatttgaatctctgaaacacaccatactcagttaaagtatgagttgactaatctttaatgataaaggggcaatatattataatctaacatatttgaaactactaagattttcttgaagctttttttagattttaaaattgaagtagaaaagcacataccaaatgtgcatatctaaataatcattaattcacactttcatctttttcatctttgtctctttcctattaatatttttaatataagaaatgaaggccaggctggcttcagtggctcacacctgtaatcccaacactttgggaggctgaggcaggagagtagctcaaggctaggagtttaagaccagcctgggcaacatagtgagatcccatctctacagaaaaaaaaaaatttttaattacctgggcatggtgacatgcacctgtagtccctagctactcaggaggctgaggcaggaggattgcttgagcccaagagtttgaggttacatgagtcatgattgtaccactggactctagcccaggcaacagactccatctctttaaaaaaatgaaaagccaagatgagtgtgaagttacctaagtgggagcagcaaagactgttgggccactgatgcctcagccactgtttggagtgtattaattgaatgtcatatgtgtctttgtaatataaggatgaacaataacagtaaatataggaaataactaacaggaaaaaaatagtatgcgattttttttgttacaatgggctgatttgattcttatatatttttattgtaggccaccaaaatgaatggctgtgaagaatattgtgaagaaaaagtaaaaagtgaaaggtgagaaaataattttcaaagtatccataatgcttctgtctatctataaatgctctgaagatttccatttgttttccagtataaaataagcatagttgagtagattataaaactatggttgaatattaagaatttttaaaattttcgggccaggtgcggtggctcatgcctgtaatcccagtgctttgggaggctggggcgggcagatcacttgaggtcaggagttcaagactagcctggccaacatggtgaaaccctgttttctactaaaaatacaagaacccaggcatggtgtctcatgcctgtaatcccagcactttgggtggctgagatgggcagatcacttgaggccaggagttggagaccagcctggccaacatggtgaaaccctgcctctactaaaaatataaaaattagctgggtgtggtgacacatgcctgtaatcccagctactcaggaggctgaggcaggagaattgctggaacccaggaggtggatgttacagtgagccgagatcgcgccactgtactccagcctgagcaacagagcaagactctgtctcaaaaaaaaaaaagaaagaaaaaaagttttaaattttttgttacaaggaggttctagtgacatgtgaaaatgtgtttattatactattgcttcaagaaagcaatattctcttaactattggaaaaaatgaatgaaagcgtgaccctaaatggaaatgtggcaacaatcatgatagtgactgtcttcacctattgggttatgggtcatttatttttcagtttctctatttttctatacttcaaaattttttaatttttaatgagaaaatgaaaccaaaaaaagtaagaaacccacaaaatatgttttaaaacccataaaaatatttttaaacaatttctaattataaagtaaggtctttttttacaaaaatatatatgagggaaagggtttttatctatgaggggacttcaaaaagttcatgaaaaaatagagttaaaagataaaaatataaaatataaactttattaacataagctccatcaagtttagcacacttttgtaggtgatgataccagccatttagttaatccccaaaaaactgaaggtcctgcaaatttaaccatatcaatgcagtcttttttacattaactgaagaaaaatgcatgccctttacagattttttgagattgagaaacaaaaagtcagaaggagccaaataaggactctaagatggattcctggtaatttcccactgaagctcacaaaattgccttgtttgatgagacgaatgagcaggaacatagtcacacaagaggagaactctccagtgaagctttcccagacatttcatggatgtagagctttttaacccagcaaaattagtgttgtcacccacagtgagttagaacagggggaaacatctgtcataaaagcagcgtaattgctgccctgttgacattttgggagcattagtccatgtcctggtgtatactaatgtcatcagatgaaagtactctgctttgttccccctgaatatcagaaagttaaaaacgtattcaggcttttacgtaatcctttttcacttcaccttagcactaaacaccgttctcctacctagtttctctttcctagccatccaccttaccaaagagggcatctgttatgcactcccaaaatattgagaacttgtactgggtttcattacattaagtgagtgcccaggtacaggagtgtccttctggcctcctgttgtagcaaaaggctatacccatcaatagagacttctttaaataaattaagatacattcatattttgcagtagtgggcagmtgctgaaaagaaggagaaagagctatatgccggtacaattgtaatcactcatccatgttgaaggatagaaataaaaccaccaccttctccatcctcaaatggactccttcagtttaaagttcaaarwcgggatctgtccaaggataaattttaaaactgtattaaaccattctacatctcagttgtttacatctaccaataaattttaagaattgtggctttggttttcttagacattctattttaaaatactataataattgtagagaaaatcattcagggccatgtttaatttgagtacaaaaatgaagaaaatgtttcaaatatgttttgttttcatagcttaattcagaagccacaagaaaagaagactgatgatgatgaaataacatggggaaatgatgagttgccaatagagagaacaaaccatgaagattctgataaaggcaagaattttaatgacagttttttcctcaaaaataatgaattggaaaaatgtttttaagtgattttcagactatatggatatgctgttttaccatatgtatacattatttgctttttttttttttttctttttttgagacagaggctgggagtccagtggggygatctcggctcactacaaccaccacctccccagttcactacaaccaccacctccgcagttcaagcaattctcctgcctcagcctcgagtagctgggattacaggcgggtgccaccatgcccagctaatttttgtatttttagtagagacagggtttcaccatgttggccaggctggtctggaactcctgacctcagatgatccacctacctcagcttcccaaagtgctgggattacaggcatgarccaccgcacccagccacagtatttgcttttaaacataaagttaaatcatgtagacaaaaatcaatattcattatattaccagatatttgcacagttatattctaaaattctcagtggcttggagtaaaacatgcaaataaatgtatacatactttaagtggaaatatgaagtcataattttgccattctggaaggagaagtcaaggggcacttttttttttttttttttttttttgagacagagtctcgctctgtcgtccaggctggagaatacagtggcacaatcttggctcactgcaacctccatctcctgaattcaagcaattattctgcctcagcctcccaagtagctgggattacaagtgtgcgccaccatgcctggctattttttctgtttttagtagagatggggtttcaccatgttggccaggctggtttctaactcctgagctcaggcaatccacccacctcggcctcccaaagtgctgggattacaggcgtgagccacaccgcacctggccagaattattattatcctagaatcccaacctcatcttttatgatcgggaatcaattggtctgtttcactattactgccttttcattttattactgagccaatggagaaatgaaattctatccagtgtttaattcgtcttattttatatcaggaagtgtcactataatgaaagaacacggttttgtcattcaaagcaaagtctattttttttttttttaagaaattaacagcttaggctgggcgtgctggcccacacctataaccctagcactttgggaggccaaagcaggctgatcacctgaggtcaggagttcaaccagcctgaccaacaggcaaaacctcgtctcttctaaaaatacaaaaattagctggtcatggtggcaggcacctgtgatcccagctactcgggaggctgagacaggagaatcgcttgaaccccagaggcagaggttgcaatgagccgagattgygtcactgcactccagcctgggtgatagagtgagatcctgtcagaaagaaagaaagagagagagagaaagagagagaaggagagaagggaagaaagcagggagggagggagggaggaaggaaggaagggagggaggaaggaagttagtttaattaacactttcttcacttggctagactgttggtatgtgtacaacatgcatgtccagcactgtagcccttgctcatccacccagcctttaagttcctgttgcactgacatgcagttctgtaaaagttatttcatatgagtaaattttgtattcccagccaacctctgcccgagctaaatgttaaccttttaggtgtcttgtatagttttgtgtccctcacagtgccagcatcattgctgcctatatcttagctgcatcatcaaaatgctttaatcagctgattgacataattaaagctacacttgtgcagtctatagcaagacgtttcccttccctttttctaggataacagttgccttcaattataaataatttccatacagcaggtactaaattagacccatagctcttctaagatagttgactcaactcccaaagaattcaagggaattctttatttgcatggagaaaactatcgaacaccagggataactggccctgagtgccaaggatggatggtgaagagagaaatcagtgttcctggagtaatctcccatattaaggaatttctgaagtgtctctcttactttcaccatgtgcttagaagctaatttaaatgaaaagtagtaacagaaytaaatttgataattttttgtaatgagttcctgaggtttttttggggggtgagggggcaggtaaaagtttaagttgcatgtgttatgcagattagaatttcagttacagctaagcatacttgtaaaactttaggacagcatttctcaaatttgagaacctaagaagcactgagaatgtttatgaaccagtttgaataacatttaatgccattattttagattatcagtctctactagtgccagggtgagcaacacattgcaattcaaggcactgaaataattcagtgtttagttatgagttggttattcaggtgatctagaatgtgctttttatattatcttgaaattaaaacaaaatttttaaatgcttatgtagaaatactggcctccatgggtcagcagagcccagtttaagaaaaactargctaagaaatatctgaaatatgtttggttttctgcaatcaagctgttcgtaaaaagaatttatatgttttacttatggtcacattttagtgtaaaagtattgaagcaaaggatattgtcattataattctcaattacctactaaaatgatggttccattggctctgttggaacaatttaaaggtatttatttaaccaaaagtctgtttttttaaaataatttgttagtcttaacacataccaattttgtatttgtttgatgtgctgcaattttttcatcttttcccattatttataaaggctttctgtatatatgagatcaagattttwgtgtgtgtgtgtgtgtrtgtgtgtgtgtgtgtggtgtgtaaggagtcaggggagcataacttagagaatattgtgaagtttgggattcttcagaaaaattcatcttctctcactgtaacagagttctgttgttgaaagaatcccatttactattatctagaatacttatttttaaaaattgcctacctattatgttgtttctgaaattctgagaactaagtacaattacctttttatggctggttttgcagggaaaagaagcaagctgtccccaggctgcccatgataaaccccttatcaaaaatttttaaamagtgccatatgagtcaagagaagcaaaaagaaacaacataaactcctttagaaactataaataaatgagagccaagagccttaaaaacttctgaacgtcagtgaggtatctccttaaaagctgggtgtgggagtgtgctagggctgactttcctgtgttaattgtagttatcagcctacctattaattctattaccttattaattctctcatatttaaagactttcccttttgtaagatgcggtgagaatgggctgaaattagttcatttgttagttaaatctgttttgggggaaatattattagttgttgcatatttaaagacttttctggccaggcacaatggctcatgcctggaatcccaacactttgggaggccaaggcaggtggatcgcttgagcccaggagttcaggaccagcctgggcaacatagcaaaaccccatctctacaaaaaaatacaaaaaattacccaggcgtggtggtgcttacctgtagtcacagctaccaggaaggctgaggtgggaggatcgcctgagacaggtggttgacattgcattgagctgtgattgtgccattgcacttcagcctgggctacagaataagactgtgtgtgtgtgtgtgtgtgtgtgtgtgtgtgtgtgtgtataaaataaaataaagaccttcttagccaggtacacacacacatatacatrtattttttatatatacacatacatacatatatatttattgtgtatatatatacacacacatatatacatatatatttattgtgtatatatatagaatatacacacacacatatataaatatataaaataaataaaataaaataaagaccttcctagccaggtgcagtggctcacgtctgttatcccagcacttggggaagccaagacaggaggatcacttgaggccaggagttcaagaccagcctgggcaacatagggagaccccgtctcttcaaaaatatttaaaaattaaccaggcacagagggtgcatgrctgtggtcccagctacttgggaaactgaggcaggaagatcccttgagcctggtagatcaaggccgcagtgagctgtgattacagaactgcactccatcgtaggcgacagaacaagattctatctctaaataaataaatagactttcccttttgtaagatgaggtgaacataggctgaaattagttcacttagttaaattggttctggaggaactgtttttaaattgctgtcttcctattagatcattcctttctgacaaacgatgagctcgctgtactccctgtcgtcaaagtgcttccctctggtaaatacacgggtgccaacttaaaatcagtcattcgagtcctgcggggtttgctagatcaaggaattccttctaaggagctggaggtaagtggcttctgccaatgattctctcccaaagtgtatgcatttagtttgtaaggaaaatgtatctttactggcccaagattagaagaawttttgaaaattttccaactctaaaagcaccaccttatcatatctagcagaaaattaatttttctgattaggatcccaataatagtgatttaaaggaatcactttaactacttggaacttgatacatttccctgaagattatccttcctgcctcatagttaaggtaaaaatgtttwaaaaaaaaaaaaaagccaagtataaatttcaaccatgcactaaactttataattagtgtattgtagacgtgtttcatcattaacagaaggttctaatttaatacagctccaagaatgtgtgtcctagttcaaagcagcaatggctcagagccctagctcctgtggtctcatggtactgtccatatttaccactagaaaagagagtggttttgaagttgaccttgcccctcttcctcaaaccatctgcttatttgcctacttcctaagctttgtagccactaaaaggagttaactttaataagaggttctgctttgtgcttgttgctttgtatatattcctcaaaatattaattctgttatagattgtgaaactgaggctcacagtaattaaggtatactcttctcatcgccatgctatggaatgatttgttcttcaagttcttagatttaaatgtcaccatcagaaaagttccatcacaacccttacaaagtagtgtttataaggatttctttaccacagcagcttattgatttcttcaaggcatatactacaatatttgtttacttctttattgtgtctttctcccaataagctgtaaaggccaggagagccaaaatcttatcttcttgctcaccactgtattcccatcacttattacagtaccttgcatataatgagcatgcaatatatattttttgaatgagcgaatgaatgaaaagtgagcaagagttgactttagaacctaggactatctgaccacaacaccactaccacatggaatattctataacccttacagactatactgtcaataaattgtgctctagctcatcactttatggcagagttgggtttttttaattgtatttttttctaaaatataaacacttttaaacagaagttaaaaattaagacacaaagttctgtctcataaagttgactacaacgtgttcaattaaaagatacttgtaacaatatatttcaatgctgacttaacaaatcactactgactttagacttatttaggacatctgtatttaacactcagaatcagccttaatcaaccaattttgcccctacacatttaaagtatttgaagttattactgaattactgcttatctcaacaaatttatttccatgttttgcttacagaatcttcaagaattaaaacctttggatcagtgtctaattgggcaaactaaggaaaacagaaggaagaacagatataaaaatatacttccctgtaagttccagtttggcttcagatttaatatgtgatcagtataatattaatggattaaaattttttgtgtttaacttacctatccctcacataaccgtgtgcatgtgcatacattcacagatttatatcagtaacaaatacattgaaatattccgtgtaaatccccttttaaattatgtaggtattctgaaaatcagttagaggaacctgaaatatttgataggatattcctgaatttttactagtatacagtattagaaattagtcggtgatgccaaatcattaattttaaaatctttttaaaaataggaactggcttctggatgaggattttcttggttggattcatttatcacaaccaccatcaatttattccacttatttttagtttagagaaatatctatggtaatgaatagctgtatatatatgcatatgactacagtggtactaccagcctacattagacatttcagataccagaagggaacaaaagcaatcattttggcccggtgcagtggctcacacctttaatccctgcactttgggaggccragggaggcagatcacttgagatcagaagtttaagactagcctggccaacatggtgaaaccccatctctactgaaaaatacagaaattagccgagagtggtggctcatgcttataatcccagctacttgggaggctgaggcaggaggatcgcttgaacccgggaggcagaggttgcagcgagccaagatcatgccactgcactccagcctgggcaacagagtgagactccatctcaaaaaaaaaataggaaaaaaaaaagaaaagcagtaatttttacatgtataaaaatcacatgtaaaaaaatcacactgtgattttttttaattatgtatgaatgtgtgtgccaaaatactgacctctagcaaattcttataattaccagccacatgtatatatgttagcactttggattataacatatgacacactgaccctatctttaccaagaaaccataaatctaaagataaataataaaaaaartcaatagtgacaagtcacatgataagtaataatgcaattgtatttttctaatccagatagaaagtacaaattcattttggaaagcttcctgtaagaaatgaatcttagacaacatttaaaaaatggatcagatcactgtttggcataaagtatatgggagttattttagacagcaaaatggccagttgaatatctcaaaatcagaataggacaagccataaatccaaaactaatgagtggatttactcccacaaaacaaatgaccagtatggactaagagaaagaagtcaagtgagaagggcaattggtaggggattttgaaacctatcattaaaaggttttagtttggtaatcacagtaattaccagttaaatttatagatatttgaaatagaaatagaaataacttctaaggtatgtaatacatataaatttattctcttagataaatcttagacaatataacctcagtgaatgatagcttgtacatacttttcactggagcagcctggtttaaaaaattacattttgactatatgaaattataataaaacaaagataagggcctttatgcctggataataaaatgagctgttattttctttattgtgttaatttattgttttggctgcttattaaaagaatataattttattaggtgagtgagagttaattatgccaataacatttgcaatatatactttaatagtgttattgtaatactaaattgtgttctatgaaaaattttttggcattgcctttcagtgctattattattatcatcatcatcattaaaataatgatggagaagtaccagttgtttttctttgtttctctagttacttattaggcaattctaaatgcatttattaacttactaattttaatttcaactaaatctatgtaaataataccaaatttcatatgtcagaaactcactaaactaacagcttagatacttgtaacatgagcaaaaagaataaacataaaataatttggctgtgctacaatttgaaaatatacttctattaaaatacgttggtgatttcatctgtgactatgagaatttctcatgatctttgactcatgcaatttgtaagactcttgtttaaaatgcatgmtatggatggctctgttttgtggtggaaaattcacagatgatgctacaagagtgcctcttggagatgaaggtggctatatcaatgccagcttcattaagataccagttgggaaagaagagttcgtttacattgcctgccaaggaccactgcctacaactgttggagacttctggcagatgatttgggagcaaaaatccacagtgatagccatgatgactcaagaagtagaaggagaaaaaatcaaatgccagcgctattggcccaacatcctaggcaaaacaacaatggtcagcaacagacttcgactggctcttgtgagaatgcagcagctgaagggctttgtggtgagggcaatgacccttgaagatattcaggtaagtgaatgaaatctttccctgttggaaggtgtatctcctagttgtaatccaagcctggactctttccgtgattgcaccaatgttatttctagataaaagacagtgacttcctagttcccatgcaatggaactaatgctagctattttttctttatgtaatataagtttaaatgtgactgtcttcatgaattctgccagtttcctccagtatgtcctctactaaaatggaaatgaaaatgcaggacttttaatgtgattatcatccttggtgatagcacaaaatggctcagaagttgcatgttggaaacttgtgtttttatggtcagacctctaagtagactcattgaaactacttttaaaatctktaagtagaaaatattccctcataaaggcaacttaacatatttaggaatacatggataattttagcataaacagttgttattcagatcattcatactgcagttacctaaccactggatcaatctagcttgaattagataagtggcaatacctgaagtaaagctgctactgtttcctcactctgtgttctccctcaccttactacacgcctgtgcacagtatcctagctagatgtgagtaatgtttcccatagaaatttagctatcttaaggaaacagtgattttacttttatagaaacaaagcatatcaattcagttctattggtgtcatgtaaatgtagcctgagaatttctctcataatttttgattcatgattttttattgatttacactagcttacctattacttaggctagcacagwtgttcaatattcttccagtgatttatccacttaatccacacatttttatagaactcaacccctttatagagatttggcagtcaacaacacagacaaaaaatatttctaacctcatggagcttacattctgaagaggaaataccagtattgatagtgctgtggaaaaaaatagagaaggacaattggctgggggagaatgagaagtatgtcgtaattttcaacaaggagtcagggaaggtatgagaaaatggcatttgaggaaaaatgtgaatgagttgagtgagccatggagggaatatctgaggagaaaaccattccagtcagaaagagccagtacaaaagtcctgagaccaaactgtgcacattgtatttaaagccacagagaatcatttggcttgatgaaagtggccatggggaaagagaggaggaggtgaggtctaagaggaaacagggccagattaggtagtgttgcagtgactctgacttttatctgaggtgcatttggaatggggtcaccagaaaaggttgttatcaaaatgcaatttgtttttagggtttccaaaaagtagtttttatcgatatttaaaatgtggatctagcaaccttgttgatagaggccttccatgtttttcttaatagagccatttagtttcttccacttttcctttgatctgatcctatagacaagccaaaatttgaaagcacaatataatattaagaattaattgtggccgggcacagtggctcacgcctgtaatctcaacactttgggaggccaaggtgagtggatcagttgaggtcaggagttcgagagcagcctgaccaacatggtgaaaccccatctctactaaaaatacagaaattagctgggtgtggcaatgtgcgcctgtaatcccagctactmtgaggcaggagaatcgcttgaacctgggaggcggaggctgcagtgagccgagattgcaccactgcactccagcctggacaacagaacgagaccctatctcaagaaagaaaaaaaagaattaactgtatgtgaacaatataacatgtcatgatccacttattctgttatacaatttcagaccagagaggtgcgccatatttctcatctgaatttcactgcctggccagaccatgatayaccttctcaaccagatgatctgcttacttttatctcctacatgagacacatccacagatcaggcccaatcattacgcactgcagtgctggcattggacgttcagggaccctgatttgcatagatgtggttctgggattaatcagtcaggatcttgatgtgagtacaagatattggctgagtaagcatttgttcagaaataatgatggagtctaatttttgataatgtgttgtgatcttgggatattttaacttatgartttatatgactgccttcattttcttsttatattattatagaaaattgtatttttgtaaacattggtattcaaaactacatagaccgtgatcaacaaaaaataatacttcaattttatacttgttttactgggtgttttttaactgtgtgctcagaggccttttatgcagtatttcattttaccctttatagtctttaggcttgtataagatagtattgttatcacactttaaagatagaaataattgaagcacaaaggaaagtatttttttaatgaaaaagcttgtatttttgtattatctatgggtaaaaaatgtatattttattataaaattaatgctaagtagtttctaaacaattactctacataaaaaaattactataagagtataatcttacttttgaactcaaattaatataaaccttatttaaaattttagaatatcttaccatagataatgtgtaattaaaatcatagtgtcttaaaaagaattttagttaaaagcactttacacactagctgtagtaatttaagtaggatgaaaccaaatagtctttttttccctcatttccaactgttcaatgtcagctgaagtcaaaagatcttttttaggttggaaacacctttagcggaagagcagtgtgcaggaaaaataatttacctttttaaattgtaatattagaaattagtcacacttcagggggaagatgatttcttttctttgggggattttcaaatagattaaccttccctaattcctagaaagataaaaaataagaataccaagtgatgacaaagtccattcgccaagtcattttgtccaggagagtttcccaagactaccagaaggggaagaagagtgggatacagaattttacataagcctcccctctgtgatccttttgagattcaaatccagttatcctttgaatctaacacatatgtggtttcctctgacagtttgacatctctgatttggtgcgctgcatkagactacaaagacacggaatggttcagacagaggtgagtcatggctgggcctcctaatgagaatttttgtaaagattctaatattttttaaggttcttatkaaaccatttttcttttttgagagttcccatgttagagcataaaaccaaacatttactgcagtgaggggcatttttttttaaatgaggactaattcagaaaaaaattaaaatacttccaagctttttaaaatgttgccttttaatttaaaaatgyaatatctgcactgaagagattacagagaatgggatagcatgctggggacagagtttgagaatggtacaaaatactatgtaattaatggcattccttccctatttccaacctgaaaaagagatagaaggtaacattcttgctacagaarttccctgagaagtaatggattcatcagcattgactggaacacagcaaggcaggctggagttgcttagcttcaagaagacattctgtaaggagtgtgaatacatgggtccatttatcctcttttgatgattttcgtttctcttacctgaaaggaaaccatcacccactgacacaatggcgtccttcacagggagtgccgtatttagagtgtctgtcttcactgaagagttccacaatcctctttgtttataatggaagagtgggggatgtagaagccgttttcaaatatccataaattaacatttctctacctcttgaaaaatagggaaatttgctatctttaaaaattagcatttgcctactttcctttcataaacctttttaattcaacttgtcttctaactattaagctgatttataatcacrctttttaggtaaggaaaacattttgattgttataagcagcactttacacctagaaagttcattcattcatttgttcattcaacagatatttattgagtgcttactttgtattaggaactcttctaggccgggcgcggtggctcacgcctgtaatcccagcactttgggaggccgaggcgggcggatcacgaggtcaggagatcgagaccatcccggctaaaacggtgaaaccccgtctctactaaaaatacaaaaaattagccgggcgtagtggcgggygcctgtagtcccagctacttgggaggctgaggcaggagaatggcgtgaacccgggaggcggagcttgcagtgagccgagatcccgccactgcactccagcctgggcgacagagcgagactccgtctcaaaaaaaaaaaaaaaaaaaaaaaaggaactcttctaggtgcctggagcacatcagtgaataaaacaaagatccttgctagaataacaaagatattcttgcaggatactgataaggatggaagaccatagacatgttaaacatgtaaattatataggatccctgaaagtggtaagtgctttagagaaaagaaaaatgaaataggtaaagggaatcagtcatggcagattgggggtacgattttaaacagggcggcaccattggcgaagtaacacttaagcaaagatttgaaggcaaaggagagggtcatgtagatctctggggacaagagcctttcaggcagagggaccacctgtgtggaagtccaagggtcttgagtgttcaggtatggtcacagccaatgtggcgggcagggcacgagagaaggaagagtgaaggaggaggtgaggttagaggggaggtgacagggtccaggactttggcttttctctgagtgaaatgggagcctggagtggcagtgatctgactcacattttaaaggactactaacctgctgtgttaaaatgacaccaagtctggggaggaaggtgtagtgttataagcaaagagatcaattaggtgacaagcaggggtggctacagctggagtggtaagtgtggacagagtgaaagaaacaggacgtgatgtgaagtagatttgctaatgggttgtatgtggtgtcagagaaagagtcaaggatgaatgtgtggaaaagttaaaatacagataagcaaaaaagwaacttaaaaggccacttgtattcctactgtcagagagctgttaatgtttttaggagatgttcttatattctttgtcctaaacacatgtgcacactccttcatgctcacacatactatatataaaatagctcacacatgtagctattttaaatgagattcaactgtggttgttgttttattacttttcatttaatatattgtgagttttttatttgcagactcaattccttgccaaaaaaagtcagatctctgcaccatcaacttaatagaaaataatttcaccaaaggagttcattttcaaagaactttgattttcatgcttttgttccaaaatatttaaagacttattttttggtttgtttgtttgtttgttttttgagatggagtctcactctgtcacccaggctggagcacagtccgtgatctctgctcactgcaacctccacctcccaggttcaagtgattctcctgcctcaccttcctgagtagctgggattacaggtgcctgccacctcactttagtagagatgggatttcaccatgttggccaggctggtcttgaactcctggcctcaagtgatccacctgcctcggcctctgagattacaggcatgaaccaccatgcctggcaagacaattattttgaatagcttcttaagctgttaattttttgacattttaaaacatcaaaatgagctcaacaaatccagaagaaattatgtaggaaggttatttttccactaagtataatcaaagcacaaaaaatattgtagtggcccaccaatcaaagacaacttcagttagcactctaggatagttccatcccgcatccctcaggctttttcttttcttgttttgccaatctggtttctattataatttttataataccacacaattctataccctgcttcttttttttttttttttttttttttttgagactgagtctcactctgtcaccaggctggagtgcagtggcacaatctcggctcactgcaacctccgcctcctgtgtcaagcgattctcctgcctcagcctcccaagtagctgggactacaggcgcgtgccacgacgcccagctaatttttgtatttttagtagagacagagtttcaccatgttggccaggatggtctcgatctcttgacctcgtgatccacccgcctcagcctcctcaagtgctgggattacaggtgtgagccaccgcgcccagcctacaccctgtttcttgcattcaacattctaacaaaatttttccatattttcaaaactcatccaacatcacttccaatagtggtatagctatatatatataatatttacattatacatctaaagtattctatctcactttttttggccataggatcaatatrttttctgctatcaagtcatcctttatgtcctgacacgtcttcaagcagaagaagagcaaaaacagcagcctcagcttctgaagtgacatgaaaagagcctctggatgcatttccatttctctccttaacctccagcagactmctgctctctatccaaaataaagatcacagagcagcaagttcatacaacatgcatgttctcctctatcttagaggggtattcttcttgaaaataaaaaatattgaaatgctgtatttttacagctactttaacctatgataattatttacaaaattttaacactaaccaaacaatgcagatcttagggatgattaaaggcagcatttgatgatagcagacattgttacaaggacatggtgagtctatttttaatgcaccaatcttgtttatagcaaaaatgttttccaatattttaataaagtagttattttataggggatacttgaaaccagtatttaagctttaaatgacagtaatattggcatagaaaaaagtagcaaatgtttactgtatcaatttctaatgtttactatatagaatttcctgtaatatatttatatactttttcatgaaaatggagttatcagttatctgtttgttactgcatcatctgtttgtaatcattatctcactttgtaaataaaaacacmccttaaaacatgaacaagccaaaactgtgtgcagacaaattagacattttcagtgtgttatttttcaacaacacctaggcccctgggaagacaaggacctctagacaccactttccatctccctagttggcctcagtcatgacagccatggagagtagaggtgttgtcagagatcctgatagatcttcactaaatactgatgtgggggtcatgtactggcttaacagtagctcagaaattcagtctttcttccttctacctctttgtgaatgttgcccacttattgagcccaatttatatataaatcagaatattttcaagtcctagccacagtactcaactgaccaagggctaatcaaagaaaacatatcaaactacctggggggcgggggtatatttggttctgcaaacaggaaggaaaagagattgacttcaaagctgctttagcttaatggttctctgttctcagtactaaattcatttcactaaattctaattctaacagtatttctccattcagccacgacactgtaactggatggatgttcttgaccatgagttgtccaggttcttggcatgttgaacaaagaattgaacaaaatgctcagacaaagcagtggaagattaaagcatagatgttttgaagtgaaagtacactccacagagtggaagtgggcttgagcacatggctcaagagccctgattataatgttcctgggcttttattgaattacaagagcatggtaacacccctaagtaccctttagaggcctytgataggttacaccctacacaaatgaagaattcagcccaggaccaatcagaggcaggattctgcccagaaccaatcagaggcatcctgcctgtgatgtataagcaaatgaaagtttcagaatggaccaattacagacatacccatttgtgacataggggaggggaggttcagagaggcatgggcatttggcccctcattacttggtcctggaaaggtggggttttcctcttagtccaattacaagaaggccttgggcttcctgtctctagactcttttctgcctcaacaccattctaagacccaggaaattgcttggctcatcctcataagactgcaccagttctgagctagttgacttgaatttccaaacttaagtgcagcaatttgctgggacctattcccgagaatctggggctatttgaaggcagaagacagtatcaataaacataaagccccacagtaactagctaaagccccagcagataagaggcttgggtcctacctcagaattggctctgaatatggcaagagaagctttaccattcccacttcaatcagaagagtattatagattgggttgtagccggagatttcatttgaaaaaaaggtttctattgctttaaatgacatttggaaatctcttttctgaaagagttggaatcatgaggccttgttttcctgcactggcatgtgaaactaggccagcagagcgctgggggccagtacagctggaggtgattagctcgcatctgaagtcaacatagatgggagagggtggagctggaggttgctttttctggaacgaatgtcactaggaaatggaatggggggaagaaaatgcagatttagctttatgacctatgaatggaaacttcatgatggtaaatatgttactgccctcagctgggatctggctgcaccagcatggaatggtatgagccacttgcaagggccagtctggttagaaagcaaggtgaggccacgcagctggggtggcacatggaaacactcatctcaaattaatgaataagtacaattcagctcttaacacagcttgtattagctaagtgctagaaaatataaactgaagatatggaatggcttaaacgtaatagtttatttctagtttatctaacagttctggaaaagtgaacagcttggcaatcagatctacttggctcagtttttagcccgggctgatgaaagtactgtaatcaacacatagcttccaaggttgagaatcgcctccattccccacgaaggattgcctatggagaggttttacgagccaggcttacatgcaaaacacattgctgtcactcattccatcagcaagaactggccaaatgattgccagtgacaactctatgctatagaaggggaagcacatattgtagtagaatatatttacaaaactgaactcgttattattctaaaagattgagtatcttagtgtagtcctgagcattgcagaattagaaacaattttatcccaaaatcaaaacttcagtgcatgtcattagtagagataattctgaattattatggcaaacaggaaataaacagctgttgagaaaagattcttttacatcagtggtcccagatagcctgccagattttttggtttaaaaaggactagttatctatatgtaatgtgataatccaataaatttaaaaaacagcttaatacacctatcttccagatacagacaccttgataatgataggctttccattttacataattcagaaatattcataattcagaaacattgtaatggtagagataaatgtaataaattataggctgacctgcataatattttaaagccaatcgaaactttactgtatcaatttgggattatatttgactgcaagtaagcaaaagcaaccaaacaggcctacaagttgtaaatcaataagtatgtgagacatgtctcaatttagaagtttattttgccaaggtgaaggacatgcctggaagaaatgacatggaatcacagaaatagtctgtggtctgtgcctttctccaaagatgaatttgagggtttcaatatttaaaggagaaaagtgagctggaggggaaagaagaggggtatggtcacatcactgaacccacatgttgcaggagaaaaggagcagatagggaaatagttatgtatttatcttgcactcagcacatagataaggtgaacgtagagtaactacctgtggagatatttaaccttttatctgtagctatctgcttaggaacaaaaggaaatgcagtttcttgcatgactcarctttcagcttcatttttttccttttggcggagtgaattggggtcccaagtttttattttcctttcacaaattctagagggcttagagtttattttctttccttaagaaaccaagctcagaaggcagttgctcagaagtaggcagttaattctatagctcaagaatgtcaacagcgctataaatatccttggcctttccttggcctggaagtggctgccacagctccagctattatatccacattccagaaaagaaacaagaattggcaaggaaaatgggtcaaacagtactagggcaagaaagcaaaatttcccagaagtcaagggcagacttttccttctgtcttagcaaaatctgtcagatgcccatctctagcttcaagaaagttatttttagctagatgtgttgctgtctagctatgaacaatatcttgattctgttcataaggacaaagacagcaattgatactgggtcccagcaagtagtgtgtgcctttccaattctgcctcagtttccaccattccgtataaggtagcgaacactatgccaatttttcaagatcttcatacatatttagaagattctgaatttgtaactattgaggagattcactgataggaagtatttaaaagtagtcttcaatttttacaggtttagagacatagttttattcactcaaccaaactataaccatattccaaaggttgtgctaagcaaaacctcaggacactgataaaccatgttgctgatttattagcttacaaggaagctataggtgggtctaacagaatgaggaaggctggacattcagaaggggctcctcctgctggggaaagtacatgtcaaggccaatgggaaggttgcctagagaccaacatgtcattcattaactgggttaggctgaatgatcctcgacgcaaagggtatttctgattacacaagaaaaaagtaggggatgtaacaagtattgatcacttatggattggaccaggtgttttcaccttgcctcgttttcaggttgttcaggattgaatgtgttatcaaccttttttagagaggaaactaaaccccagagggattgtcacttgcccaaagttgcccagatacccaaggtaaacgttcaatttcagctctgactgacttcaaccaatagctgtggaggtctcctagctattaaagtagaatgcaggctgggcacggtggctcacgcctgtaaccccaacaatttgggaggcccaggcaggcggatcacctgaggtcgggagttcgagaccagcctgtccaacatgggtgaaaccccatctctactaaaaaaaaaaaaatacaaaaattagccaggtgtggtagcgggtgcctgtaatcccagctactcgggaggctgacgctggaaaatcacttgaacctggaaggcggaggttgcagtgagctgagatcacgccattgcactccagcctgggcaacaagagcaaaactccaactcaaaaaaaaaaaaaaaagtggaatgcaggcagccctgacacagcctgtgttctctccactgcactctgctgccacgaccatccagctgcctctttcctcttagacatggactcattctgcttaacatgatttctctggccccacttctgagtttcatataggtcccagcttttattaactcatgattctttacatcaattagaatgcaacttactcaaatcggacttttttccagttatattttttgttctaaagataacgtggccttctgaacatcttcactatttcaagttcttgtcagtaacatgtttacaaaccatctatggagatggccatcttctgatgtgttgtttctatcttaaaggatggcctttggtatccctcatccttttggtgtccctcatccttggaacgtcctaactgttgtaaatactgaccatattgttaagctttcagaacagcattaaattttaccattttgttttaggtgtctatgtggagaaacaatttagaaattcattttttgtggattctttaaaactcatggagcccgggtacgatggctcacgcctgtaatcccagcactttgggaggccaaggcaggcggatcacttgaggtcaggagttcaagaccaggctggccaatatggtgaaaccctatgtctactaaaactacaaaaattagccaggcgtggtggcacgtgactgtagttctagctactggggaggctgaggcaggagaagaattgcttgaacctgggaggtggaggttgcggtaagctgagatcgcgccactgcactccagcctggatgacagagcaagacttcatctcaaaaaaaaaacaaaaaacaaaaaaaaaaaaacctcacggtaatactcattttagagctggaaatctctgttacttgcaactctcctaactgtgttcattgcagtgatctattcccctactagactataaactttgtgagggcaggagccatgtcccatgtgcctgaacatagcacagactagcttctcattatgtaaacatttatcatatggataaaggggactctccgaatagtaaaccaacagttgagaattaacaagtcacaaatctgcatagttcttttccatataaaaagtgccgtggctctaagacctaatggggctccttctgtactaccacaaaggctttctgaattggtggaaaatacaataatcattgtcattgcattaacccacaagttattgggaatacttacaaaataacattataaacattaaatctcaaaacactttctcacacatttcaaaacttacaaataagaatagacacaaaatggaaccagagtcccaacaaaaacacattatataggaagttatgtgataagggtagcatttcaaatcagtagataaaagaataatgattcaatatatgatgtttggataattaactataaaaaaattagattattatgccatacagga

SEQ ID NO: 93220 - DNA, 171781 bp, Homo sapiens
  misc_feature (1)...(171781): n = A,T,C or G
aaaaaaatacctggatgggcatggtggctcatgcctgtaatcccagcactttgggaggccgacgggggtggatcacgaggtcaggagactgagaccatcctggctaacacggtgaaaccccatctctattaaaaatacaaaaaattagcccggcatggtggcgggcacctgtagtcccagatactcgtgaggctgaggcaggagaatggtgtgaacccaggaggcagagcttgcagtgagccgagattccatgccactgcactccagcctgggcgacagaacgagactgtctcaaaaaagaaaaaacaaaacaaacaaaaaaaaatattccttcagttttgttcagtccattcagttaactcttgctctgcttgatattcatgaacatttcagctcttcatgagtcctatacatttttcctctattctagtgtcacagtttccagtgtcatcagaaactggcatttaaaagcacctgacagagttctatagctgatgataagccatcttttgaagaggatcaagacaaggcaattgtctgtgaatgacaaaatgacccaattacaaatacaattgacaaagaaattaggttattagtggtttacaataacttaaaatcataatgttaatgatgattgaaaacatatactcagacattagaattttagaaatcccacacaattttggaacatacattataatttactaacatataacctgaagattaaatataatttttattttgccaatcccacagaacttccccatgggccctctgtagcatccaaaagttaggggtcagaagagataaccttgaaactgaagtttgatttggggaagcttgttaaatatgttagatatttaaaacacttaatattatgaagtagaattccagattataataagttatttagccaaaatgatgactcaaaaatttttaaaaaggcaaaaaccttttttcattaagagagaagacttagctttccaatctactcctgtcttaactgcctgttttttggaagtttattctcaaggtgcaaacaaaagtctttaattattctttcctattacatgaaaatcttattcaagggagagaaagccaaaattcacccttgatttagtctacggttaacatcaaccccaacttttaaatgaaaccttatagatgattctctctgatcttagccagtttgaccgtgaggtgataatcttgtaaatctttcataaccctttacaaattttgttaaagagcaaatcagtgccttaagaaaaccttgttgtgttttttatttaaatgctcaaattagagacaaaccaaaaaaatactttttgaatttagtcaacatgttcacacagaatttattttataagattaatttttacaaaactaaaatagacaaaacccattttatctaatttaaaataaggcttccaccctcctaaggaaaaatttactttgccatgcctttttatattttttactgctaacacattttacttttcttacacacctttcgtataaatctattttcaatagcttcagttacataagggtaattcacagcaatttgtaattttaatgtaaaacctggtaagctctttgtttgttgttttggagactgaatttcactcgttgcctagtttgtatggcgccgtcttggctcactgcaaactctgcctcccgggttcaagcaattctgcctcagcctccagggtagctgagattacaggcagctgccaccatgcctggctaattttttctattttcagtagaaatggggcttccccatgttagccagctggtctcgatctcctgacctcaggtgagccgcccacctcggcctcccaaagtgctgagattacaggtgtgagccactgtgcccagccggttaagctcttttgattatgtgccaggcacagataaagtttatggcatagctaggaggagcactgttaattacatatgtccccaggcctgaccaaattgtgaaacaggcaaatcaaacaattctcaaaagccaaagaagcagtttataaccttgacatttagcaaacctagaatctgacctgcataatttagactatgtatttacattttgaaaacaattgtattttaccaataatctttaaaacttttaatttctgagagattaaagtcgtgaacaaaaaaggcattatagcttttttccttcaaaaatatttcatctaagcacatatttttctttaagccaattaattagacctcttttttatataaacataatacacataacacatatatataactacacaaaccacaaacagaagatccaatatttgcaagatttttaatttgctcatctcctaattcgattaccacctggtggagcctgtccaaaaacagagctaggaaaacatggaggttttagggcctaatgaacaggtataggtagaagccaaaagcagatttttgagagggatctattcacttttaatttctggagttccatgaggaaaacagagttgttttttttttccttcccaaaatggggtccatgtcacattttctgtttattccgagcagcctcatgctctcagaagttatctcagagcctatcatgcatgcatttagagtggcacaacaaaatgaagaaaagtaattcagatgactaagaagaaaaaaaaactttttccagaaagttccaagaagaggaagaaaaacatagatgccttttaaatatacctatagcttggtccaggcatggtggctcacacctgtaattgcagcagttttgggaggctgaggtgggtggatcatgaggtcaataatatatagcttggttatccacttttaattaagcatagcattccttaagaaaataatttaaaaccccttgttactcaactttagctatgccaagaggccaatatttttggcttttgaccttcaccaaaaatataacctcacaggtgaaaccaacaagcctcaactcaaagttatgacttaatgaagagtgcatgtggtattttcaaagaggtggtaagcagtttttacaaaacctagactctttaaagatagctcagagataggatgagttaagaaaggaagctagaagtcgttcatggaagggaagagaatcagcaaatagtaaaattcacacactaaccagaaagtacttagtccctatgccaatattgaaccaggaccactactgtaaaatggcagacacccaaagaaagtactgccacaggtttacaaggtcaagctcccaggggcttaaaacaagatggagacgagcaaaatttgttactgaccactttgatggcctagcttgaacagtgggcttattgggtcataggccgtgctctatcctagggtattcttacgacagaaccatatagagagacacataaagcatatcagattggctatagcttaagagtagtctaataaatccttttttctattaattaaaactacagagaggatttaaatagtgatttttataactcattctaccagtttacacagggagagcgaggccagaagtttggtaagaaaaacggttttttgctgatctgtcatgtcaggcttttgagttcccttcccccaagttgtgaagacctatctatcctgaagtcctgtgaaagggaagtaggcaatgatactgtaaaagttgtccctcctcaagatatttactcagattggtgcttgcttcccagtttttttttgtttgttttttgttttgttttgtgtgagacagagtcttgatgtcacccaggctggagtgcagtggcacaacgtctgcttactgcaccctccacctcccagattcaagtgattctcctgcctcagactcctgagtagctgggactacaggcatgtgtgccaccacacccaactaattttttgtatttttagtagagatggggtttcagcgtgttagctagggtggtctcgaacttctgaccttgtgatccaccttacttggcctcccaaagtgctgggattataggcctgagccaccatgcccagccttcccagtttatttttaagccaaacagtttgaggtttggggaaattgacttttcccagtctgggggatgaatctgtagggattctgtagcatggggacacaattactcatctgcaaagaggagagaggaggaaaaaggaaaaagaaggttttgttttttttttttcaagggagtcccagtgattcaggatgtatccaagagaagtgcagactgaaggtggctggttacttacctggaaggaggggaaaacggcatcccttagttcctgtgtgtttccagtgaatacctggggtacacgagggagagaaagaaaaggcgtcccctttatttcttctgtctttatatccctgagtcccagtgactcagcagggtgctttcacgcacgtgtaacaggtaggaattatccgcattcacctatccattgcctattttttctgctgtctgtaacttatctatgccatggatgctagcatgacctgtatccataaaatgggcagtgggggtggagattccaattggcaggaattagtcatgctcacctgcactgtgccccttgactattgtctgccgctggatccctcagatccattttcctttctagagcttcagcctgaagcttggagttcagtttgggacaagcaacttccttaggaaggggcatggtttcattaagtccaggttgccctcaccagactgcagccagcagctgtgagggctacttctttgccatcttcttataagctgaatactcaggtatagctgtgcaacgggtttgtactcagacaatggagagaaagggagaattggggatctggcctagtaagatgccttccaaaagaaaacaaaacctcttgcatagaaaagctccctgtatgtggcagagaaaagaaaagaaaaaaaaaaaaaaacagcttacattcagggcagggaaggtgcttggggtggaaaaagcctctttatgcaaatagattcctcgagcagggagagagacttttaacctctgcttcctgttttcctctaggaacagaaactgcattgttctgaattacatacctgatggctggtccaaatgctctttccacctagtaatatgtttgtagtttgcaacaacacttgcaacattgtaaaagagataagtaccataacatccccgaaaaacaagaagacaaatgccacaggaaaaatgggaattgaatgaggccaacattccctaaccccaagagtgatgggggagggtcctctccagcatcctgtcctctgtagttgcaccactgttcttaactagcttaccagagggttggtgcttcatctgccttcagaaaaatgtctgaggacaagagttcacagaaaaaaagtgaaatttaggtccacatttactcacccttcaggtatcctgagtgagcccccaaaatgataggatttttcttctcagtcacttcgtaagctgatgaaccctggctggtgatgccctgcttgggccttgcatggccatgctggcatgccccagctcacctgtgttatagcttgtacccctttttggtggttctaaaactcttgtcctgcacccatgaagaataaggatgtgctaacaaagtgagcaaggtgggaagttttattgagtcacgaactagtcaggcaaacctgaaaagggacgaggggtttgtcccccttcccaaaggcaggaaggtccctctaatatggctgagtcgggctttttatgggcctagaatgggggaggggcaagccataggtagtactggaaaagtcaacattcgattggttaaaagatactattcagaaagaatcaatcataaatgaaacggcaggcaaaaaggaacagaggttctcattctgggttgtgtttcatacaggactagcagtcagtctttcagcctgtggcctgtttttggctttcaggtggggtttcaccagggacttgcccctgtctaggcatttggctggcttctgtagctatcagactgttgaataattgaactttgtttatttctccatatttttgcagtggtaattccattataaaacctaatgaaacaatgtttttatagatggtgtggaaagacttttctgggctcagaggtgaaactgacccttgtgtatcagcagcatttctgactgactgagagagtgtagtgattaacagagttgtgatgttagttaagaaacttagatttgccattgtagcttttctaccaattagcagattgtttaactcactgaaattgtaaagtggtagacgtggacttagtcattactgggcagcttatgaattgtattcatttactcatgatgtaaaaatggttagtctccacttttaaggctctagttctagtggctaaataggtacttatttatacagtatgataactgctgtattaaaatacatgtctcaaatgtggaatagtagaagaggtgaagaaaatcatagtttgaggtagaatactgtttgctggtcttaaaaactgtggtattttggtgattccataaattaggtcagatacttccactggagggaaacagttyaaaggatatatgtgatactattaatagaatgaggaagacacaccagatatttaggagggaattagcgagcttgaaactaagagctggtttgaatgagactgggtcataagtgatttcaagtaccagattaaggcactgagattttatttttaagcactgaagtcagattttttccttttaaaagaaaggattcatgatgaaatctgctttttgttttgcagagagcttggagataattctggtggctgtgtggagtatgtgttggaggtgagtygctagctgaagaattaaaacaatagttttagcagtttgggtaagagatgtttacagaaatgttttgtggaataaaactgaacagtcagagacctatgagattaccatggtctgatagaggggcagctaatacaatcttttctttttttgtcactgagttaattactaagctggggcaggatatttgtcttttacttcataagaaaatagctcacagtttaacagcttaaaacaacaaacatatcttttcgtttttgtgggtagcagttatttatctgaaggctggtatgtccacttccacaatggcttactcacatgattgctgacagcagggctgatttctttgctagcagttggcaagaggtatgtccttgctgtaaggatatatctgtaagcctgtttcagtgtttggggcaagccttggctatcaagctaagggtacctatgttgaggcctagggaattatctattgtagcctgcttgggaaaaatattatgagaaatttttgttgttctgatttgaacagtagaagtgtgtagtacttgaggttccttgagggtatatttaatatggatttttctgtctgcaaaacaatattgtggagatagtgttgaatctgtaaatcactttgggtagtactgataacagtagtaagtcttgtaatacctggacattagaggtctttgcctgtatttctgtctttagttatttttccctccacaataaatttttgtttttagtataagtcattggtctccttgattaaattctatagatttttctacatgtaatatcatgtcatctctgaataggcacagttttactcccttctttctgatttggatgccattttatatctatctcttctttctttgctctgactaggactctccatactaagttgaattagaggggtccttgtcttgttccagatcttagagaaaggctttgcgccttttcccatttggtatgaagttaggtcttgcactcctctttgtcttatatgacttttttttttgacagagtcttgctctgtcacccaggctggagtgcagtggcgcaatcttggcccactgcaagctctgccttccaggttcacgccattatcctgcctcagcctcctgaggagctgggactacaggcacctgccaccatgcttggctaattttttaaatttttttaatagagatgggattttaacatgtgaggttgtgtccagaatttattccttcttgtgggttcttggtctcgctgacttcaagaaggaagctgcggaccctcgcggtgagtgttatagctcttaaagatggtgttcggagtttgttccttcagattttcagatgtgtctggagtttcttccttccagtgggttcatggtctctctgactttaggagttaagctgtaggccttcgcagtgagcattacagctcttaaaggtggcgggtctggagttgtttattcctcccagtgggttcgtggtctcactgacttcaggatggaagccgcagaccctcatggtgagtgttacagcttataaaggtagtgtggacccaaagagtgagtggcagcaagatttattgtgaagagcgaaagaacaaagcttccacagcatgaaaagggacctgagcaggttgctgctgctggctgggtgtagccagcttttattcccttatttgtccctgcccatgtcctgctgattggttcattttacggagtgctgattgatccatttgacagagtgctgattggtctgtttacaatcctttagctagatacagagcgctgattggtgcgttttacagagtgctcattggtgcgtttacaatcctctagctagacacagagcagtgattggtatgtttttacagagtgctgattggtacatttacaatcctctagcaagacacagagtgctcattggtgcatttttatagagtgctgattggtgcatttacaatcctttagctagacacagagtgctgaatagtgcatttacaatcttctagctagacagaaaagttctccaagtccccattcgacccaggaagtacagccggcttcacctttcaaggtcaggagctcgagaccatcctggctatatgacctttttttacgttctgttttgttgaatggtaatacaaggttgttgaatttagttaaatatttttttctacatcaagataaagatcatgtggtttttctcctttttttggtgatagggtatattacattgattggtattcatgtattgaaccaactttgcattgcaaaaatcccatctgattataattttttcatgatactgctaaatttggtttgctagtgttttgttgaagatttttgcatttatatttatcagaaacattggtctgtagtttctttttagtagaaaagaaagtggaaaagaaaacactcacagatttagtctaagaggcctgcattacctttattccaaagtcaatttgtgagtgttttctttatttttcaggaagactttcaggatttgtgatacgtattctttagatgtttgtgtaattcttcagtgaagtcatgtgatcacagacttgttggttggaaagtttttaattaatgattcagcctccttactagttataaatctgttcagattttctaatccttcattatctagtcttggtacattgtgtgtttttagcaacttacattcattttttgtagcttatctaatttaatgacatatagttgttcaaagtattttcttagactctttttttctgtttgcattggttgtatatcccttctttcagccttggttttagttatttgaggttttattttttcctctttatgtaagtagtggtgtcagttgtgtttatctttcaaacagcctccttttgatttggttgatcttttttttctattctgtattttatttatctctgctatgatctttcttcagttagcttcaggtttagttctttttctcccttaagattatagttgggttgttaatttcagatttaaggccagcattttacaggtattaaacttataaactttaaaactatgaacttttcctctagcattgcttttgctgtgtcccatcagttttggtatgttttatttttagtttttctcgatatattttctaattgtcattttaatgttttctgacccattggctcagaatgttttgttaaattttcacacatttgtggatttccagttttctttctgctgttgattctattttcatcccattgttttctgaaaagataccttatgttgtttctgttattttaatcttattaatacttgatttgatatgaggtttgtcttggggaatgtgccatatacacttgaaaagaatgtgtactctactgttgttgggttagtgttcagcatatgtctaattgttttattgttgaaatcctctatttccttgttgattttttttttttgtctggttgggtagaaagtgagttagggaaattttgtactattattttgttgctatctattttttcctttaatctgttaatattgctttatatattttagagctctgctttttgttgcatatttacagttttttaccttcctaatgaattacctttttatgattgtgtctttccctgtctcttgtggaatttttttatttagtctattttgtgtgatattaatataacaaactctgctctcatgtggttattatatgcatgaaatatccttctccattttttcactttgaagctatggttattctttgatcacatagtctactgtaggactcttgtgagtctcttatagggaaggataaggttgaacttgcttttttatccttgcagctcatctatgtgtttgattggagaatccatttacacttaaagtatttactgaaaggaaagtattaactattgtcagttagttacttttgcctcgtatttcttgtggatttttgcttattttctcttttactgccttttgtgttttgtttatttattttttggtagcgataagtagtttcattctgttttcattttcattggtatatattctgtattttgtttctggttataactgcaataggatcttgtgacctgtagagagtttacatagtaaattgatgttggactatgcttcatctctctcctccctaaaaaaaaatgcactccacagaaagcttgcatatgcttttagagcaattggttattaattcctaagtcattcatagatcttacaccatcctcacttaaagcagcttgtatacaaggcaatcgatgaggaaaaggaaagacattgccattttttcaagaattttctggaagaagaagttcagatattgggtggctttcagtaggggagccttgaacatattttataggctaagaaaagtgaatccaggaagaaactgagaaaaattgagagaagattagagcaaggtttttttcataagtggggcatatatgtgggatcaggagcccccaggtaagggacaaaaggaacagacatgagcaagtttgaagtagtgtttagtgaagtggctggtttctttcttacttgcaggaaaaacttattaagtcatttttattagcagcagaactaaaatagaaaatgggagggagggagtttttttagtttgtttgttttaaaacctatttcatataaaacattttgaatgagaatttttatgtatcaaaaaacaatgaaagagaagactatatgataagatgaccatatagaggtagatttatgtgtgtatatacttcacgtttggtttttgtccattttcttttcaatcctgcccttatggaataatattaatttgtaacttggttttcaattttatttattaaagaacaatctatgtctgacttaaatgtttagttaccagtctttagtttttttttgatgaatatggtcaggaaaaacagaatagtattgcattgttataacgttttgtcttgattattaatgagattgaaagggtatgtgtgtagcggtttaatcatggcagacttcctatgttagaatccctttttccactaagtactgatttgagcaattaacttttttgtttgtttgtttgtttttgagatcgagtttcgctcttgttgcccaggtgggagtgcaatggcgcaatctcggctcaccgcaacctctgcctcctgggttcaagcaattcttcttcctcagcctcccaaatagctggattacagccatgcgccaccatgcccagctaattttgtatttttagtagagacagggtttctccatgttggtcaggctggtcgtaaactcccaacatctggtgatccgcccgcctcggcttcccaaagtgctgggattacaggtgtgagccaccacgcctggcccagcaatttacttttttttactctctgtttctacttacctgtgaaggtggttaataacaactactaaatggatttgctgagtgaaattaagtgtttcacatagtgtctgacttctaaaaagtgctgttcttaaatttgttatacacatatgtattggtcatgtgtggttttttgtttatttgatttgttttactttagttttttatatactgtgccttactctgtttctctctctctcttttttcttggcagtgtgttttggacacatagatatcactgattattcttttctaccttgctttgatttcaagttttaatttttttctttttttttttttttgaggtggagtctcactctgtcgcccagactagagtgcagttgtgtgatctcagctcactgcaagctctgtctcccaggttcacaccatcctcctgcctcagcctcctgagcagctgggacaacaggtgcctgtcaccatgcccagctaattttttatatttttagtagagacagggttttaccatgttacccaagatggcctcgatctactgacctcgtgatccgcccgcctcggccttccaaagtgctgggattacaggcgtgagccaccgcacccagcctcaagttttaatttttatggaaacaaacctagttctcaatcagtgacacatcagattaagcttggagattttaaagaagtgctgattattaggtctcagatgttttgctgtttggtctaggctggaacttggacattagcagtcctctagaagtacttcaggaaatgctaatttgcaatttagtatgaaaaccactggactaatgaatatggaatgtaaaggatttggtggcgttttcccatactcctatcagattgcagtgaaccctaaccagtaaatttctgtgtcctctagtcctgttaagattctttgaatatactgttgattctcctgaaggactattaaaaaggaccttgggaaaaaagacttgtcaaagtggaaacgtgagctcacttgacagatttgatggttttggagaaatatggtataatttaaaccctttccaaagaagttacccgaaagttttaaattttatatttaaatcacttaaaaaattatcttaaaagccatttataacgctctgatacaatgatgtgttgactgtgcattgtcttgaattctttgtaaaaatctaatactagtttccttatgtttaggtattaaattttcacagtatatataaggcagcaattgataggcctttcacagattcttctgtaagttaaaaatgacaaccaagaagcttacttatttttctggaatgttatataatatatggcatgtttcctggcataactgcttgtacaatagtgtgaatttcttaagggaagtaaaactgtaaatacacatttagctttttatttctctcatttttataatcctctgttattaactgtaaagactggtgattttagtgtacatattaaaattgtaataatttcttattcatctttttttgttgttttttggagacagagttttgttcttgttgcccaggcaggctggagtgcaatggcaccatctcggctcactgcaaagtctgcctcccaggtacaagcgattctcctgtctcagcctcccaagtagcccagattactggcaggcatcaccacacccagctgtattttatattagagatggggtttcaccactgttagtcaggctagttgcaaactcctgatctcaggtgatccacccgccttggcctctcaaagtgccgagattacaggcatgcaccaccatgcccagactcttactggtctttttaatatgtaagacagtggtaccttttttccttttaggttatgaaatggtctctgcaagatgttttgtccttgaattggaaatttttaaggctgatatatgctggtacttcatcttctatatgtggactataatttcttcccttaggataactacataaagagacaaaaaaaagaaaaaagagcaaagatctgtgctgtgtcaagtatgacagccatcactcatggctctccagtaggagggaacgacagccagggccaggttcttgatggccagtctcagcatctcttccaacagaaccaggtaggagtaagactgtgttgttttgagtactgtgaaatacaaaattgtgaaacatgtcctgaatgatttgtaaagtaatcataaaatatgtggttattttaagttacacgtgaaaaaagtgactgtgggctaagtgtggtagctcatacttgtaatcccagcattttcagaggctgaagagagaattgctttagcccaggagttcaacagcagcttgggcaacatggtgaaaccctgtctcccatacaaaaattagctgggcatggtagcacatgcagatagtcccatctacctgggaggctgacgcaagagcatcacctgagcctgggaggtcaagactgcagtgagctatgatcgaggcactgcactccagtctgggtgatagaatgagaccctgtctcaaaaaaaaaaagaaaagaaaaaaaagtgactctggcatttagtgaaaggaaaccttgattactgtacatggttgagaatgtagccctgtgtttttctgtatctaaggtcccatgtgaatctgagggcaaaagtattaaattagtccctgtaaccttagttataagcacagacttcaggcagctatttatattcaaaccccactttataagattatcttatgactctaactgctataatacctaagcctcagttttcatatctataaaacaaggataagtgaaataatatttctaaaaggtttaacatagatttaatatcaaagttctgtgctgacctatttggaaataattacttcttttactatactgttagatttttttgtaagatacatgaagcttctaatgttagtaatttgcctttactttttcttggcttttttcctagggtgattcattaattgcattgagctaatgttttcagggttttggctttttaattcccatttgtgtgtttttttttcctttttctaagattcattcttttgctttctttaggttttgtttgctgttcattttctagttccttgaagtagtattttgttgatatttggatttatgtttatgatatattggtctagttttcgtgcaatatatttggttgttgatgtgagggtaatgctgacctcatagaatggcctagaaagaaagtattccctttgcttccatctggtggaaaaaaacggtagagaattgatatatttgagagaatttaccactgagcctttctgggcattgtgctttctgtttcagaagattgttatttattgactgtttatttagaaaatattgccaattcaaatgatctgtttcttttctgagttttggcagattatgtctttaaaggaatttctggtaggtgtagagctgttcatagtattcctttattatccttcaatgcagcagccccaacccttttaggaccagcaactgcttttgtggaagacaatttttccatcgatggggggatgtaaaatggttttgggatgaaactgttccacctcagaacatcaggcattagttagattctcataaggagcatgcaccctagatccctcacattgattcagtttacaatagggttcaggctcctgtgacattctaatgtgtctgctcatgtggcaggagttggggctcaggtgctaatgctggctcacctgacactcaccttctgctgtgcagcctggttcttaacaggacacggactggtaccgtctgtgacctgaggcttggggatcccttaatgagtatggcatctgtattatatgtcccttgtttcaattctgtaattaataatttgtgtcttcttttttcttagtctggctagaggtttattgatgttttcaaagaaccagtgtgtatggttttgctgatttttctgttaatttcttgtcattttcattcctgctgtagtttttttctgcttactttggaatttgtacttcttgatagttttttttttttaatggaagctttgattattgatttaagagtttctttttaatatatgcattcaatggtataaatttttgtcttagttgtgcttttgctgtattccacaaattttaagttggattttcactttgtacaaattttatttttatttctcttgagctttctttctctctgtcttttatttttctgttttagactgagtcttgctgtgttacccaggctgcagtgcagtggcttgatcttggcttactgaaaccgctgcctgctgggttcaagcaattctcctgcctcagcctcctgaatagctgggatcacaggtgtgcgacaccacacctaatttttgtatttttagtagagatggggtttcaccatgttggtcaggctgttctcgaactcctgacccttgtgatccacctgcctcagcctcccaaagtgctgggattacaggcatgagccactgtgaccagccctttctctttctttctaaataactcacgttatttagaagtgtgttagtaacgaaatattttaggattttacaactgtcttttagtgagttctggtttaatgctattgtggcctgaaagcatgtgttttattatttttattttaaatttattaaggtgagctttatggccactgggcgggttatcttggtgaatgttcccagtgcacttaggaagaaggtatactcactgttgtgggggaaataatctagagatatcagttagatccagttgatggatgacgctgtttagttttttatgtttctactgatatagtctgctgaatctgtccatttctcatggaaaagtgttgaactctcaaactatcttaatggatcaatctagtcctgcttgcatttatatcactttttgcctcacatattatggggccatattgttaggagcatatacattaaagatatttccagctttttgaattgaccacatatataatgttgttgtttattcctgataattttccttcactgaagttcactttgtgaagttagtatagctaattttcctttgttttgattagtattagcttggtatgtttttcttcattcctttaattctaatctacatctttatatttaaagtgggtttcctatggacagcatatagttgacttttgttttttgatctactctgataatcttttaataggtatatttaggccattgatattgaaggtgattattgatatagttgtgttagtaactacactatttgttattattctccatttgttacccttattgtttgttactgtgtccattttttctgccttttgtggttgtaattgaacattctatatatttttttcttttctaagcttattaatcataggcttttattttttatttttaaattttttagtgattgccctagaatttgcaatatgcatttataccaaatccgtaagtccactttccaaagtggagtacatgtactatcataacaaaatatctgtaattgtttcctcctgttcttgtatcattgctgtctttcatttcatttttacgtaagctgtaatcattgaatacgttgttgttaatgctattttaatttattttattattttttgagacaggcatcactgtcaacccaggctagaatgcagtaacatgattttagcttacagtagtgttgaactcctgggatcaagtgttgttcccacctcagcctccaaggtagctaggactacaggcatgcaccaacatatctggcttttttttttttttttttttaacttttgtagaggctctcactatgtttcccaggctagtctcaaactcctggactcaagcaaccctcccacttgagccctcccaagtcactggtattacagacaaaagccactgtgcccagctgctaattttattttaaagaaaccattatgtcttagatcatttaagataaaaagaagagtttttatgttaccttcatgcattacttacagaatgcttttcttttgaagatgtttctgttgtatatcatttttctactctcagaaaaacttgcagagcagatacattgacaacaaattctcttaacttttgtctgagcaagtttctatttctccactttttaagtatacttttgcagaatacagaattctagataggtagttgttttctctcaacacttatagatattttattccagtctcttgcttatatgatttcttagaccaaacccagtgtaattctaatcattgctttgcttataggtaagatgtttgcctgtagcatgtttcaaactttttatttttcatcttctgcaatttgaatgtatttctagatgtactcttttttttgtttttgttttttttttggcatttatctagcttggaattctctgagcttcctgaatctcttgtttattgtatggcactaatttggggacttttttagttataattgcttcttttttttttttttttttggaggcggagtctcgctctgtcacccaggctggagtgcagtggtgtgatctcggctcactgcaacctccacctcccaggttgaagcgattctccggcctcagcctcctgagtagctgggattacaggcacgtgtcaccacgcctggctaatttttgtatttttagtagagacagggtttcaccatgttggtcaggctggtctcaagctcctgacttcatgatccgcccacctcatcctcccaaagtgctgagattacagccatcgtgccaggccaattttttttttttaattttcagcctatttttctctgctcttcagtgttcaaagtctaattttttaacgagtgcatcattaaaatgcacaggaatgaaggcattcttcattcctgttgcagtgtttttgatctatactgtattaccttgaatcttttttagaatttctctctctttgcttacattaactaccttctcatgtcatctactttattcattagagcccttagtgcattaatggtagttatatttccatctgataaatctttttatttggagacaggctatcactgtgtttcccaggctggagtgcggtggcgggatcttggctcaccacagtctctccctcgtgtgctgaagctattctcccatgtcagcctcccaagtagctgagactacaggcatgtgctaccacgcctggctgatttttgtgtttttttttttttttttttgtagagatggggttttaccatgttgcccagccaagtcttgaactcctggattcaagctacccacctgcaatcgcctcccaaagtgctggcattacaggcttgagtcactgcgtccggcctccatctgttaaatctaacattcctgttacatctgagtatgaatttgatgcttgctctgtctcttcaaacagtttttttgtcttttagtatgcattgtaattttttcttcagagatgcacattaagtactatgtagaaaggaactttggcagatgggctctagtaatgtactactggtaaggtattcgggtaggggaagcaatctgtaatcttacgattaagtctcaatgtcgtagtgagcctgtggcctttgggctgtggcttagatggaacatgatgggtatagggagctggaattggagtttttagttctaccatgtagaatgctgtagcaggctagagttgagtattttttttcctttaggtctcttagtcattaaaaaacctcagtagtataaactagtttctcttgagggctttcttttaacagaacagaatgtccttatgtatttcaaaatggctactttgcatctttccctccgagaagctcaagggacttttttcttatcttttcagggaaaggttaaaaaaaaaattgttcattcccataaaatttggcttcttagtagttttttttttttttgagagggagtctcgctgcgtttcccaggctgtggtgcagtggtgcgatgtcggctcactgcaaccaccgcctcccaggttcaagcaattctctgcctcagcttcctgagtagctgggaatacaagcaccaccacccctagcttatttttgtatttttagtagagatggagttttaccatcttggccaggctgctcttgaactcctgacgtcatgatccacccacttcagcctcccaaagtgttgggattacacaagtgagccaccacgcccagcctcttagtggtttttaacttgcattgcatacttcccaccatgagccttcaataattctttaattacagtttaggttatcataccttgggactggttgccacagaggtttaagatctactcagattgtctatttctttataacttgttcttggcgtagattgtatgcctctgggaatttgtccttttatccaggtcatgcagtttgctgagatacagtggtttataggatgcactgataatccttaacttttttgtataaaattcattaatgcctcttttatttttaatattaattatttgactcttctctttttcttagtcaatctagctaaaggtttagcagctctttatttttttcaggaacagaattttgatttcattggtttttcttagttgtttttctagtctctattttgcttacatctgtgctcgcttttgctttaatgtgtcacttaatgaaggcatatgttctgagaaatgcattgtcaggtgatttcactgtcttgcaaacatcatagtgtgcttacacaaacctggatggtataacctactacacatgtaggccagttattgccctaggctactaacctgttagcatgagttgaatatggtaggcaattgtaatacaatggtaagttctaaacagaaaaaatttagtaaaaatggactattgcaatattatgagatgaccattgtatatttagttcatcttgaatgaaatgttttgtggagcatggatgtattttgttattcttttagttctttaaggtgcaaatttggttgttgatttgagatctttttttaaagtactttataaggtttcctcagcactggttctgctctatcccataaatttggcattttttcattttcatttgcctcacatattatatagtttctataggatttctcctctttgatggatgggccatttaagatgtattgtttaaattctacttatttatgaatttttcagtttttcttctgctattgctttctttttctatttttgaggcggagtctcgctctgttgcccaggctggagtgcagtggtgtcatctcagctcactggaagctccgcctcctgggttcacgccattctcctgccttagcctcccaagtagctgggactacagatgcatgccaccacgcccggctaattttgtttttgtatttttagtagacaacggggtatcaccgtgttagccaggatggtcttgatctcccgacctcatgatctgcctgcctcggcctcccaaagtgctgggattacaggcgtgagcccccacgcccggcctcttctgctattgatttctactttaattgtatcctgatctgaaaagaaactttttatgagttaagtcttcctatatttgttaagatttgttttgtggcattacgtatcctgatgcatgttccatgtgcccttgcaaagaatgtgtattctgctactgttgtgtatgtagagcaggaatccctagtccccaggtcggaccagtaccacactgtggcctgttaggaagcaggtcgtacagcagaaggtgagcatcaggctggtgagcgagcattaccatctgagccccaactcctgtcagatcaatggcagcattagattctcataggagcatgaaccttactgtgaactatgcatgtgagggatgtaggttgcgtgctccttatgagaaatctagtatctcatgatcacaggtttcatcctgaaccctcccacccctcaactggctccatccatggaaaaattattaattattgttgttaatctcttactgtgcctgatttatgaactttaactttatcatagatatgtatggataggcttgactgtgactgtggtgggtccatttccacaatggtttcctcacatggcggttgggtagaggcctgtttcttaaccatgcggatcccctcgtagggctgcctgagtgacttcagacatggcagttaacctctgccagagaaattgacctaaaagagagggaagaaaaagccatgatacctttcatgacctagactcacaaatcacattgtcatttccaaagtatccctatctgtacgttctaggccagaaacacacctaagggttatgttcatatgacatcattaatctgaaagtttacttacattattattacctttccattttagagaatataactattttctcactggccagaatggggttggttaattcaagcttagagactgttgaatcagagataggtaagattcagtggtcttctattttgttcttccttttcagtagaccatagtggggctcttcccattgtttcagtgaaacaatggtgaaatgtttcactctcttctttggaggccaccattaggttttattattcccaactatggcataatatcctgataggaaatcctgatttcctatatcctgataggaaatcaaactttctgcttcaagccttgtaaataatgtgttaaagttatgctgaagctcatcttcccacactttctgtgactttccacactttccgtgattttccacctgcatctgcagtggattttgagctagttttgagcctgctgcccatatccactgtaggcagaattgtattggaatgaaatcattaatcgcagttatcttgtctatatgtttctggagtattccgtttttcttacccaggtagcttctgcagttttttaagcaagcaactaattttagccacttctcagttataggcagatgcagtaatctgttgctaagtatcacatctgacttggaagttgaaacccacgtgcatgtgctttttgtttctcttgctttttaaatttctatttgtttggctacagacagtaaacgtcacttggtttatacataatgtatgcataatatacaggtattgggtttgacaaatgaaagactgtaaccagcagtataatgaacatgtaaaatacaaaaatttatttgcactgcccttgtatatttaagtcttccattttcagttcctggcaactgctgatctgctcttcatttgtatgttttgcctttttctttttcttttgtttccttaactagagatagggtctccctatgttgtccaggctggtctcaaactcctgggtttaatcagtcctcccatcttcacctcccaaaatgctggtattacggatgtgagctaccataccgcatagtttgtcttttctaaatcatgctgacttaatctttcgagattttgcattatgcatttagtattcttccatattgttacatgcaacaaaagttttttcctgtcaattgctgagtagtattttattgcataaatgtactagtttgtccatttgcctgttgaaggacagttgggtgactgaaagactgaaaaagaaataaataactataatttcagtttctgagtacagacttgtaaccaccagtataatggttctgagtacagaaactgatattacagttttaaaatcttgcaataaagaaaacataggaaagttctattaaacatttaagaaatgaggtcaattctatacagtcctcttccagacatacttttcaatttcatcttcctaaaacataattggtatttgtaaggaagacatttatgtgttgcttaagttaaatattttaatctctttaattatgaggtgttaattcttgatgttttgaggaatccagcttcattgccttttcttatttgtctctctcaagggaaactgaggaagaagaagagtaacagcaataggaacctgtaatccctagttaggaatttttgtgtctaaactattggttattattaaggaacgaagagtttttttggaacagattgtgaatctataattataatctataatctaagtttaaaaaagtaggtttgtacagaatttatgtagtatatagtcaaactaaattattagaacctaaattgatgaagacactgtaaacacaaaggtgcatgtgagggtgaagattagtgttatctttgataatgtagtttgggaatatagccttaaaaggaatagtttatcttgtttagttagtcattacttcagtatcctatccttaaggagataattcataaggtttattatgaatgtatttattaacagtaaacatgacaaaaacatatcctctaatttttacttagtcaactcatgcagtaatgtgttgccattaaatttgtttttttttttttttttgagacatagtctcactctttcacccaggctggagtgcagtggcgtgatctcggctcactgcaagctccgcctcccgggtttaagccattctcccgcctcagcctccgaaatagttgggactacaggcgcccgccaccatatccgtttttgtttttgtaattttagtagagacagggtttcaccatgttagctaggatggtctcaatctcctgacctcatgatctgcccgccttgtcctcccaaagagctgaaattacaggtgtgagccaccacacccggccgccattagttaatttttaagattcttaattggccgggtgcggtggctcacgcctgtaatcccagcactttgggaagcggaggtgggtggatcacctgaggtcaggagttccagaccagcctgaacaatacggtgaaaccctgtctctactaaaaatacaaaaaattagccgggtgtggtggcgggtgcctgtaatcacagctactcaggaggctgaggcaggagaattgcttgaacccaggaggcagaggttagttacagtgagccgagattgcaccactgcactccagcccgggtgagacagagtgagactccatcccccaccccaaaaaagattcttaatcatgagggaaaatacttctgtattaaccaaattaaattttaaaaagataaacattgtgaccctagttttattaaatatttgggcatatatatggatacttaaaaatagatatttttccttaatctgtggtttaaatttggaatatttaatttttaattaagacttcatcacctgattcttccaatgagaattccgtagcaactcctcctccagaggaacaagggcaaggtgatgccccaccacagcatgaagatgaagagcctgcatttccacatactgagctggcaaacctggatgacatgatcaacaggtgcatttgtttggatttgttttattaatggatgcagtaaactagaaaagcaaaactacttccagcattgcaactagtagtaaatgagaaaaagaaaagagtagattgtagtgtctcaagtcttactattttaatagcctgaacattttagtcctagctgaacactttgcagctcattgtacttaatgcaggcatttcttatggattttaaatattggaaggtaatgacaatatgaatacagtttcagattaatgatgctttatgaacccttcctgtgtttctagcctagacaaataggtaggtattttgttttgaatgtttacaaacatttctctttgataagaactttataccagagttctggagaacttttctcacttgtggaatgtccatttgctacagcagagaccttattgcagaaggttgtattgcttctttctctgttttgtttagcggttgctgatttctgttagagtgtatttttcataaggactagagaactgaaactgttagtaaatccttagtggcagacagaaaagatttttttttttgtatatataaaagcaacaaaaaggatagaatcagtttacctttaatagattatatgtattgaggcatctttttaaaaacgaaaagagatatttgggaattttgctgtttcttagtacagggattaagggacaggtgaaagaaagttatttctggggagtagtgggtttgtcagtagacatagttgcagaaagctgaactttttacaaaagtaaggaatgtaccaggtgagtgtgtggtgccctttgcatcactttttaatgtgggagtgtacttaagatggcatagtggctttctgtattgccttttgatatgggaatgtacgtatgacagtaggtttagaggcccacacctgagacgtgatctttaggaaaaggtgagataaatgttttgttgagatctaatttcttttgtctttgtgaagaggagtaaaacaaaacacttgccacagtgtgtcctttcactaataaatatgagcccccaaagagcgttttcctactaataaaaggtatacatttaattgataattgtataggttagttttagtattctagagaagctattaaaagaattccctgccattgctatatctcatttgacagtgcctaaaaaaattcagtatatagacacaatagatgtctcttagttttccaatgtagataatttgcctacttctttttagaagtctatatggtgaatataatataggcagaatttctcactttttcatagtaacagtaactatggtaggtaacttatttatagtgttcctttactatgaaaccagtaaagcctctttttgttttataataatccttaggcctcgatgggtggttcctgttttgccaaaaggggaattagaagtgcttttagaagctgctattgatcttagtgtaaaaggtgagtgtggatgtacattttctataatacgtgctcctatatatacttacaccttgttcttaaaggcttttcatccctctgttataaaggtactgtttattcctagtttataatgtgtcacaaaccttcctggtaaggattattttacatatatacatgcatattatatatacttattacacacacacacacacacatatatatatatacacacacacagacaaatatacatacttccctatagtaaaggttcatagaaatctttagatagcctttagggatacctggagccatttaagtattatgtataattttatgtgtacaaccatatttctaaggtgagaatatatattttttaaatttttaaaaagattgttatccagaagttagaaaatattttccagaatatgaggaggggatatagctcagggttagagcatcagactgcggaccaagaaaatattttccagaatatgatagttctaaagtctgctatatgaagtaatgtgcattaaagcatattttacagtttacaaagtgctgcatagagggtttattgtatgacatcatatatatttggtgacctttttacacttaagtcacatgtgattgagaaatatgttaatttgtgattgagaagtatgttaatttgtaaataattttgccaattatttttatttattttattttatttttttgagatagattcttactttgtcacccaggctggagtcagtggcgtgatatcagctcactgcaacctccgcctcctaggttcaagtgattctctagcctcagccccccaagtagctgggattacagcaatgagccaccacacccggccagccccatctatttgttttttacatgcaaatcactatttcactaatattgagtgtatatgtttagtaaactgtctagcttacatatttagcttttttttcttcttaacacagagttgaagcgtttttcttaaaaagaaaaacgtcttaaaagatgaagccttaatataaaaaaaaaaagcaacctatgaagaaaatttgatatttttactctcagccacaagtaaaagctttgggtttgaatgaagcattttggatgattttgttgtaataataggtgcaataaaattcatggatgagccatttttgtaatattttgtattattttatttttattttattttattatattttattttattttattttttttttttttgagacagagtttcactctgtctcccaggctggagtgcagtagggcgatcttggctcactgcaagcttcgcctcctggttcatgccattctcctgcctcagcctcccggtagctgggactacaggcgcccaccaccatgcctggctaattttttgtatttttagtagagacggggtttcacagtgttagccaggatggtctttatctcctgacctcatgatccgcccacctcggcctcccaaagtgctgggattacaggcgtgagccagcgcccccggtgaatactgtgtatttttttaaggacttgaaagctgtaagaagggtcagaagtatttaatttttgtgtcattcagcaggaacttaactgtcagtgttgttagacaaatttttaattcctttggtatcctgtaaagtgtttctgttgccgagtctgactctgtggtggtattgataatttcatttaactaataactatcctactgtcatttaacgactgttatgttgttttactgatcttaccaatatgtgatctagtgacctctgaaaatattttaccagattgaaaatatttctcctcatttaaatttcttttgttaattgcatatttattaattgagcaaatgtcaaggacttctgtactaggtatgttctagggtctaacactacaaaatgaacaaaaactggaaatggtatttcatttcatagcattgatattcagtggatgtatgtcatttgcagggacttttcctctgttattctgagatcgtgattactgtaagataaaactagtttaaatgatagagtagtatgtatataattcaaatcaaaatatatctccttgtacatatttaatatgttttgagttgctttaagagttacaggttttctggctgggtgcagtgatcctgtaatccctgtaatcccagcactgtgggaggccaaggtgggaagatcacctgaggtcaggtgtttgagaccagcctggccaatatggcaaaaccctgtctgtacaaaaactacaaaaagtagccaggcatggtggtgcatgcctataatcccagctacttgaaggctgaggcaggagaattttttaaacctgggaagtggagattgcagtgagctgaggttgtgccactgtacttcagtctgggaaatagagcaagactcttcaacagaaaacacttgtaagttttattttttgatagaggcacatggatcttgcttttcttaaatcaggtaaaggtaaaaagaaaaaagaaacttaagatttgcctcttaaatttgatgataaatgggcaatttaccgggaaaaatcagattttttaattgtcactttttaattttcacagattttttactgtatttcagtaattaaaattctatgaaatggttcaattccctgtctactagtgaacattctttttctgatgtcatattttcaagctgtttcattgagttacattacttgatttgatgtagtttatacaactgtttctaaaatttcctgaatattatatttccttcctttttctgaaatcccatgttttttcacctttttaacattttataatgtcatgtctcatttcaaaagccacaacactatttgtgaattggagaccataatagtttctagcaatttactatgtttaatcataattggccaaataattttttttaaacattctttgtttggctcgttttttaggccttgatgttaaaagtgaagcatgccaacgtttttttcgagatggactaacaatatctttcactaaaattcttatggatgaggctgtgagtggctggaagtttgaaattcatgtgagtcttgtatttcatttctgggactcagatttacatggtgattcctgtggatttgtttttgaaaaatacttctgtgcgtaacatattaacatatcaagtctgctgatatatactgcataattgaaggttagcatggtctttaagaatgagcttgcggttttgatttagtaaacctttgtttaacctgtcccctgaaatttcaacaaccttgtaaccttacacacaacacagtgtatttcatcaaatgcaagatagtattgattggaagaggcactactattttgtagcacttgaggtcaaaaatacttaagcagactctcaatgtagctgggataacaaaggatataatttcagtgcaaatgtaaatggtaaagaaactcactatgcacaaatgtaaagcaaagaaactattttccagagtataatagttctaaagtcagttatgtaatgtgcagagaatgaaagaaagaagattggtagagaaagaagaccccctgtcttggaaatttagaccagaaaccagtattcacacaattttgtgatacgaattcatacttagagttttgatgccaaaaaagtcaaatagaatttaatacattctcagattagcagtatcttcaagtgacaggtaaaaggaaacacaagtaatctcaggtaatattgcaaatctagtacctaggtatatattgcagtctgccaactatcttgattctattataagataccttcatatttcagagattttaaaaatgacaaaaactaaagtatctttactgaattactgtacatacttcaggcctctggttcttttttagaaaatgcagttaaccaaaagttatgaatcaaatatatactttttgatgacctcaacctaaaaaatacaacttagacattttccacaaatgaccatggcatgcatatgccagcagctctgaattgacctataacttttttgtaggggtggaaattgaaattttgaaaatatgtgacttttgagttgagatgttgataacaaaactttaaaggtttcctctaaagtacaaattccagagagaaaagtggcaatttgtgtgtcctgtagacataaagcagaaatagacaaactgtggtacctactttatttgttacatttctcaaatagcttttgaaattaagtgcaaatttatgaaataaatattaatttatctttaccaatgtattactttgatcccaatattagtgaaattatgcagaattaagatgaccagtgcagaaaaatggaaagagattattaataaaaattaaatgtgtttgaaattgcaatgtgttcttattataaactgtatcatatcctatccatgtaacagagatgtattattaacaatactcatcgcctagtggagctttgtgtggccaagttgtcccaagattggtttccacttctagaacttctcgccatggccttaaatcctcactgcaagtttcatatctacaatggtacacgtccgtgtgaattaatttcctcaaatgctcagttgcctgaagatgaattatttgctygttcttcagatcctcgatcaccaaaagtgcgttggtttgttattttcaagattaaatattaatttttttatttgcatttgccacagaccattagtgatgtgaacctgtctttaaataatgatcaagtcaatacatagtcttgttttatgtggatttctgtttaaagacctattatttaatatgtataaccttgaactcatggtcaataaccatataactcatgcctgaacagggtttattatgtattgattggttgaatatgctccttggagcatagtgtttgtgtttctgtgaggagaagtcagtatttgctaattcattgttcacagctacttcagagactgtaattactgcaaataagcatgggctgttctttgtttgtactgtgtgtatatatttattaaagcagcagaatgcttacatatatttacagactgtataacctcagtgagatttaaaaattgtaccattttgctttcatgacataccattaggcgtttcctgtaatgcctaattttcttaggagaagatggttcagtgttcaacagctaaatcttggatcatgtaagtaatctttgtagttgtacctcaaagggaagttagatctgctttatacttgccagaattaacaatttttctcaaggaagcgggatagaagacagcaaaatctaattacacatcaaaaagccagaaaagaaaaaaacagccaaaaccactgcactagcagtcaaagctatggaaaagtcacccaattttgtatattttcactttaatgtgtcagtatctttaatattactgtagtggctatttcatatctcaaagtcagtttgatcatattaaattcaattaatatttagcgcatgaaaaaaaaacttaaccagcaacagaaaaagaaaatagaacgtggctttagcaagtatactgcatatgcacatgtgcgtgtgctcacacacacacacacacacacaaactcgcagaatccaaaaagataaaataatacagaattcctttaaatagtataaaatttttgtgaacagacataatttacttttttctttcccattggttcacattggataaatcctattactgctttttcttgtgttacctccacaggtaggaggacttaattagtgtattgaatagaaatagtgaaaggaggcattcttgattgttcctgatcttagataaacagctttcagtctttcatcatagagtatgatgttagccaagagctttttacataaagtctttattatgttaatgtcaattatttctgttcctcatttgtttagtggttttatcattgtggtggtaaattttgtcaaagctttttcggcattgatggccatgatcatgtgatttttttcctttcattctcttcagattgtgtgtcgtattgatcaatatttgtatgttgaagtgtctttcattccaggaaaaaaataacttggtcatgtatataatctctttaatatgttttaaattttgttgctattatagtattgcagaattttgcatcaatatttataagggagattagtgtgtagggttttttttttttgtaatttctttgtcttgttttgatgttcagggtaatgctgtcttcatagatgagtttggatatgttctttcctcctcagttttttggaagactgtgaggatgattggtcttaattcttcaagtatttggtagaattcccccagtgaagtgattgggttttgtttgggcttttctttatgggggtatttttgattgctgattctgtctgattagttatgggcctattcaggttttctatttcttcatggttgcgtcttgggtagattgtatatttctataaagttgtcctcctatctaggttatccagttttttaggatgcagtggttcttagtactctcagatggttttttatttctataatatacatagtaatgtctcctgttttgtttctgctattagttatttgagtcttctctctttttcttagtcaaactggctagaggtctggcaatttctttattttttcaagaaccaaattttggttttgttgtttttctgctctgtttgctaatctcttggcatttatattcttctgctatctttgggtttattttgttaccctttttgtagttattttttgtttgtttgtttttgtttttgagacagtcttgctctgtcgcccaagctggagtgcagcggcatgatctcagctcattgcaacctctgcctcccatcctgtgcctcagcctccatagctgctggggttaacaggtgctcaccacaatacccggctgatttatgtatttttagtagaaaagaggtttcaccatggtggtcaggctggtctcaaactcctgacctcaggtgatctgcccacctcagcctcccaaagtgctgggattacaggcgtgggccattgctcccagcttctttttgtagttctttaaggtataaattttcggttgttgattggagatcttttttaaaaaatcctctgtactatgaagttctctcttcgcacagcttttgccgcatctcataagtttgatatgttttcatttttatttgcctcaaatattatactttctgttggagttctcctccttgatcgatgggtcgtttaagatgtgttgtttaatttctccttatttatggatttttcagtttttatttttttttattttttgagatggagtttcgctttttcacccaggctagagtgcagtggtgtgatctaggctcactgcaacctccacctcctgggttcaggcaattctcatgcctcagcctccggagtagctaggattacaggtgtgtggcaccacgcccagctaattttttctatttttagtagagatggggtttgaccatgtcggccaggttggtcttgaactcctgagctcaagtgatccacctgccttggcctcccaatgcacctggctgatttttcagtttttcttctgctgttgattcctagtttccttgcatcctgatctggaaagatagtttgtatgagctcagtcttaaatatgttaagatttgttttgtttgttatgtaatgtatcctgatggatgttctaagtgcacttgacgagaatgtttattctgctacttttgtgtagagtgttccataaatgtttattaggtcaacttgttctctagtgttgtgcaaggcctttttttccttatttttttttttggagacagggctttgctttgtcacccaggctggagtatagtggtgccatctcagctcactgcaatctctgcctcccaggctcaagctgttctcctgctgtgtagctgggattacaggcacccgccaccatgcttggctcagttttgtatctttagtggagacagagtttcaccatgttggccagtctggtcttgaacttctgatgacaagtgatcctcccacctcggcttattgacattttgtctgattgtttactgattattggaaatatggtattgaagtgtctgactaattttgtataactttctctctaggtctcataatgtttgcttcacacagtcagcagttctgaagtttggtgtatgcatatttataattgcagtgaattcacccttttatgatcatataacatccttttttgcctcttgtgagaggatgctacctaaaatttattttgcttcatattagcaaaacgttctcttttagttactgtttgtgtggattttttttttttttttttttttgagacagagtcgctctgttgcacaggctggagtgcagtggtgcaatcttggctcactgcaaactctgcttcccagattcaagtgattctcatgtctcggcctcccaagtagctgggagtgtgcaccacgatgtatgtaccaccatgccctgctaatttttgtatttttagtagagacgggcttttgtcatgttggccaggctggtctcaaactcttgacctcaggtaatctacccacgtcggcctcccagatgttttgtattcttagctttcaagttgtgtgcatccttatatttaagtgagtcttttgtagacagtttatcttggattctgtttttgttttttaaatctattctgccaatctgtatcatttggttgggaagttgaacctactttatattcagagtaattagtgataaagaggatttaccactgccattttgttgttttctgatgtcttacagctttttttctgtataattttcttacctactgactttatcttcataatttcaattcttcagattgtcttttacagacatgttgtgattcttctcatttccttttaggcatattccataaacatgtttttcctggttaccatggagattacataggggcataccttggagatagtattgcaggttgagttccagaccactgcaataaagcaattaccacattgaagggagttgcacaagttttttgtttctcaatatatatataattttcactattcttagtctgttaagtatgtggtaacattacatctttaaaaaatgtactcaccttaattttaaaatgcttcattgctaaaaaatgtgacattttacaaatttcacttcttaaaaaaaaactatctgcaaaattcagtaaagcaaagcgtaataaaatgaagtatgcctgtatattattataatagctgtaacagtctattttaaacccataccaacttgatttcagttgcatacataatgtcctttacacctcacctgctgcaatttatgttattgatatcacaaatgatatatttttatatgtaatacagacataagttttttaattctttggcctctcaaattctgtaagagaataaaaagtggagttattagacaattacagtaatactgagttttacaaatgtttgtatgtttttctttaccacagatttggtaatttttttttaatacattgaattatcacctagggcccttgtatttcaacttgcacgccatttagcatttttgtagtctagtggtaatagactctagcagcttttgttggtctagaaatgtcttaatttcaaggactgttttgccaagtaccaaattattatttgatagtattttcctctcagtacttcctaatgagcactcagctgttagctatttttgagggttttgttgttgttgttgctgctgttgttttgttttcattatgtgaggagttacttttcttactaatttctagattctttctttttataacgttttttggtggtggtctttgggggtgtgccttccctagaggtactgagccttttctatttgtatatatccatgtctttcctcaaatatggcacagttttggccactattttggccactatttctgcatgtgagacctctgtttctttatcttctgcttcttggacgttcataatgtttgcatttttccaagtggtggtattccctaagtctctcaggctattcacttttgacttctttttttctccacttactctgattttaaatgaccttttctcaagtcgtgattgtcagtcctgcctattgatgtcttctgttgagcccatcttgtttccgtattttcatctgcagaatttacgtttggtttttttgtttgtttgagacagagttttgctcttgttgcccaggctggagtgcaatggcgcgatctcgacttaccacaacctccatctcctaggtttaagtgattcccccgcctcaggattccacgtagctgggactacagacacgcacaaccatgcctcactaattttttgtgtgtttagtagagatggggtttcaccatgttggccagcatggtgtcagtctcctgaccttgtgatccgcctgcctcgacctcccaaagtgctgggattacaggcatgaaccaccacacctggccacccggctacttgtatttttagtagagatggggtcttcttctccatgtttggtcaggctggtcttgaactcctgacctcaggtcatctgcctgccttggcctcccaaagtgctgggatgataggattgaaccaccacacctggccctgtttctttattattttttttctctgttgacatgttcattttatttgtatatcatttttctaattttctttagcctcctttttcattagttcattaggcgtatttgactttttcttaaattattttattttattttatttttgagacagagccttactctgtctctcaggctggagggcagtggtgcgatcttggctgactgcaacctctgcctccctggttcaagcgattctcttcctcagctccccctggccccgagtagctgggattacagacgtgcaccaccatgcccagctagtttttgtatttttagtagagatggggtttcagcatactggccaggctggtcttgaactcctgatctcaggcgatccgcccgccgcggcctcccaaagtgctgtgattaaaggtgtgagacactgcgctgatattttaaaatgtttgtcaagtgagtctggctgtgtttctccaaggacagtttctgtccttggacagaaaaaaaaaaagatttattttatcttgtctactttttgtaggctgtgtcatctttttttttttttttgagacaaagccttgctctgtcacccagcctggagtgcaatggcaccatgtctgcccactgcaacctctgcctcctgggttcaagcaattctcctgtctcaccctcccaagtagctgggattacaggctcccaccactatgcccagttaattttttgkatttttatattattattattattattttaagaccagatttccctcttgttgcccaggctggagtgtaatggcgtgatcttggctcactgcaacttctgcctcccaggttcaagcgattctcctgcctcagcctcccgagtagctgagtttacaggcacccaccaccatgccagctaatttttgtatatttagccaggggtttcaccatgttgaccaggcatgtcttgaacttctgacctcaggggatccacccacctcagcctcccaaagtgctaggatgacaggcatgagccaccgtgactggcctcctgagtcattttgagcatttgaaaaagcacttatattccccagtctttgtgaactggcttggtacaggggaattccctttattaatcagctcagcttgcaggcttaaagcctgctttaaccttttctaggtatttgtctttcttgagactttccgtgagtcttttttacccatgtatttcacatggttctggttattccattccatgatggttgctgtaaaaatttcccaattcctccatgagcctcacctctgtttatttttgctgccttacctgtcatgtgcattcttcattcagtagttcgcctcagtagtctacaggtttgtaattcccttggagacttcacaaattgtcttcccatggcttctagtcggagttttaagccactgttggccccttgcccttcaggttgagtatgcagagactaatcccacaggcagcctgcagacaaatttagaatgttgtaaatctagccctcttgattcctccagttcatacagaactggtgaccagatcactggttctgcaaactgtaccttggtaggaagggagtgggcaaggataagtgaaataacacaaaattgcctgttccctttgaatatggctttttcttgaactgggcattttcttgatagctgtatacttttgactgattttcagaattgcagtgaagttttttctttgaacagaaacaaggctttggagtgttttagtccacaatcttgctgatgtcactccatgaactgattttttaaataataaaaaggtaggaaaatataatattatagtaaaatcattcaggaatatatttaccaaagcttttaaaattcagtttttcatcgtatcaaacgtaggattagagttatacaagtgtattctttaaaagttattttttatttcacattttccacatgtcctgaatatgtttttctgttcaaactggagaaattatttctctcaagattggtagtatggtcagacatgatggctcatgcctataatcccagcactttgggagtccgaggtgggtgtatcacctcaggtcaggagttcgagaccagcctggccaacatggtgaaaccccatctctactaaaaatacaaaaattagctgggtgtattggcaggtgcctgtaatcccagctattcaggaggctgaggccagaggattgcttgaacctgggaggcaaaggttgcagtgagctgagatcatgccactgtactccagcctgggtgacagagcaagactccgtctccaaaaaaaaaaaaaaaaaaaagaggaggaagaaaagattggtagtaaaacatcctttgttctctactccctctttttgatttttctcctaaaacttgactctagaaaatgatataaaaatctttcattttaccttatttcttaattcttagtttattcattcttttcataacttctgaagtcgttaattcatattgcatcttaacgtttagagatgtttttagatatacaacctttacctgattcttactcgtaccagatacatgagatataaacaataccagttgtgtccccatgaactatgatataatttctgcctgtgctgtgtccagctgaaagatatagaaaacaaaatacaatataaaaggtttaaatctctgtaagtatatatagtaaacatgtcttgtactctttttaaagataatttagtataattttttaattaaattttccatttctagtatgcttcacacaaatgcgtttcaaatagtaactttttttctgaaaggggggaattaatttttattattaactgtattacagggttggctagtggatctcatcaataaatttggcacattaaatgggttccagattttgcatgatcgtttttttaatggatcagcattaaatattcaaataattgcagctcttattaagtaagttatgttttcatgtttgttaaataatttcatgtttgttcaaataattgcagctcttattaagttatgttttcatattctgtgcattatacaaattactattttatttacttaaaaatcattgttcmtttttttcagtgtgggttgtgtctcactgtaaaatgaggacctgtttttgtgtggtcttaaatgttgaaagtaattggcaagtttagttcttttaaaaaacatgaatgttacagaggttttgtgtccttcgtatttcagaccatttggacaatgctatgagtttctcagtcaacatacactgaaaaagtacttcattccagttatagaaatagttccacatttattggaaaacttaactgatgaagaactgaaaaaggaggcaaagaatgaagccaaaaatgatgccctttcaatgattattaaatctttgaagaacttagcttcaagaatttcaggacaagatgagactataaaaaatttggaaatttttaggttaaagatgatactcaggtaagatattttccaccttaaattatttgtgtgaattctgatataacatttactccaaatttctctcatttatggttgtaaatttcctcttttagtggaaagatgaatgcactgaatgaaataaataaggttataacatttactccaaatttttctcatagattgttgcaaatttcctcttttaatggaaagatgaatgcactgaatgaaataaataaggttatatctagtgtatcatattatactcatcggcatagtaatcctgaggaggaagaatggctgacagctgagcgaatggcagtaagcctcttaaatcttttattgtgaataagacactgcttatggaaaattacattattaccaattattgttagaagcaacaatagcaaaactaaaattgaaagatttatgactaattgtaagatctttttataataataataaaaggtttaataaatgattagttgtttgaaactgttgaggtaacttaattgtttctcaggtaaatttattatttttgaatgtagctttgatgtaaatagatggcttggttgaaatgaaatagtaagatgtgattttcggaggggttgagtggatctgcagtctggtgaatgaactaacgtagtgatcacttcctaattccatttgaagattaataaatagggattataactaatgggataattgagtagtgctttatcatgattttaagaatattaagattaatttcttttttttttttttgagacaaagtctcactccatcacccagtctggagtgcagtgacacgatctccactcactgtaacgtccgtatcctgggttcaagcaattatctgcctcagcctcccaggtagcagggattacaggcgcctgcaaccacgcctggctaatttttatgtttttagtagagatggggtttcaccattttggccaggctggtcttgaactcatgacctcatgatccacctgcctcagcctcccaaagtgtaagattaatttcttaataatttcattttaaaatcactatgtatgtcattttgacaggtaatgaaactgtttaccatagaaattttcatacattttagtttcaaaataaatagcaaatacttcaccaaagtattaaaaagtctttttttgagtgtatgtggtttgcatagtggagatcatttctgtagaataagctttaccataaaataaccttcaggttgctagtggaaaggattagaatgtgaaaaaagatatgctaaggacatttgggtggtcttaatagtgtttaccttagacccatgctcatactcagtgctggtggtcaggttttatgtatgcaatttgcctgctttgtggaatgttaaacagaattactcagtatattcactagtccttgaattattactggttcttgagagacaccaacattgaaagtatttagcaaaatttgacattgttgtggcacttttattgtattttacagaagaatctaagattgggaatataaaactggttgttttcaatggatagtgtgagaagtgtactgttgtatcacatatgggaatctttatttgcagaagtaaaattctgtaaaattatttatgttaatgtatactaattgcagattacaacaccaaggtaattcattatattagtgaattataatttgtgaatctagtacacctatggaaagattttatatgccaaattttgtgaaataagttattttagtgtttaattttgaattaacacaacacttaaatgttacactactgtgctgtaatttgtgaatgtatacataatttggacttttgaattcctacttaatattatttagaagttggagacatgtttttatttcgctttttaaaaaaatttctttttagtttcagcattgaatttttgtattacatttaggaatggatacagcaaaataatatcttatccatagtcttgcaagacagtcttcatcaaccacaatatgtagaaaagctagagaaaattcttcgttttgtgattaaagaaaaggctcttacattacaggaccttgataatatctgggcagcacaggtaagaaagtgagatgatagctattttctaagaaagataccaaaaaggagaaaatttttggtaacccttatataatggccagcaatttagtattgccygacttttactaatgcatgtgctgttcatgtagagaaatcttaccaagaatttttaaacaaaaaataacatttttctgtctttgtatatatattcatggtagcagcttataggtagtttttttggttttttttgttttgttttgttttgtttttagatggaatcttgctctccctcccagactcgggtgcattggtgcaatctcagctcactgcaagctctgcctcccaggttcacaccattctctgccttaccctcccgagtagctgggactacaagcgcccaccaccaggcctggctaattttttgtacttttagaagagacagggtttcaccctgttagccaggatggtcttgatctcctgacctcgtgatccatcctccttagccccccaaagtgctgggattgcaggtgtgagccactgcgcttggccatacatggttttaaatgaaagatctatatagcaaaataattatgattaaaggaacaattattgaaagaggataaagaatctatatttggaggttttcacctatgtaatgcatagaagaaacaaatgtcacgagttccattacagtgactttaaaaaacatacgattattatagaagattatgactttccataataaaaaaccctggtttcagatatactaatgcatatgtttttatattatcttaatggcaggtttctactcctgggtcacttggggagtattgttaggcactggctcataaagcttgttttttgccttttttttaagagaaacaacaaaatacttaatcttgcttttattgagcacttaagcttggagttttgaaacaatctaatattttgacttctttttctcttagttttatttgtaaataccttctagtaagttttcatattaatttccgaagtttactatttgtacccaaaaaaactgagttgccaggtattaaatgacagttctaaagcatttcaaatattaagaattctgttaattactcaaatgaagtaggaatgtttattaagtaatggagattcttgtagtagaactatttttttgttattaaaatttaagtatactataattttttttttgcttttatttattctacttttgttttttcaacaggcaggaaaacatgaagccattgtgaagaatgtacatgatctgctagcaaagttggcttgggatttttstcctggacaacwtgatcatctttttgaytgctttaaggtagtagcttgaatagtaaagtattgccaaatagtaaatattgccagttaattctaagtaaagtttaattcgttagatttcttttgcttatagctagtgtgcttaactaacattttcatggaagaatctctgatgaaaaagaattggtcattgttgtttcttccaatcagagtttaacagtaatttgttgtaatagttttcatcacaaatgcagaatcttaatgttttttcacttacattatttctttgaattcatttccactggtaattttcattttgactttggttaaaataacctgtagaaatgcagagaataattggaaaatgaggcataaaacattctggttctatggagttatgtatatggcatatagaaatgaaattcaaaaaacaagaggtttctaatatcataatgtcacttttaaagacattttggcacaatggtctcgctggtttttaaggttgatgaatttatggatcaagaatataaatccatatgtcattattcaggaataaatatttcagtaaatagtaattagatttttggtgggagctttacttgctaattacaagagagaataggttggcattgttcttttaaaatgtagattcttacgttctatcacccaactattctatttctgaatctatgccctgggtaaactcctgaatatgttcactaaggaatgttttcaacagtatcttagcaggattgttttattagtcccgaaatgaaggaaacaacttaaatgtctatatattatgaaaggataagtaaactgtggactcctttatatggaacactttgtgacaatgaaagttaacacattgtaacagtttggcacatagatggatcttgccattatggagaatatagaaaaaaggaagaaaatgatgtacaagaagtcagaagtgacctggataatagtttcacaactgttacactttgaattctgactacaccccagatgtgttaaatcagaattaccatgtaaagggactagacttttaatcatgtcagcataataagaatttatttgagatgactatatgttttaatctgttggatgtatatcagaggtaggcaaggacatcaatattgagaagttatatttgatactctttatttcctattgtttttagtcctgagataacttctgaaacagtgatgcaccaagacagccataataatagatggaggatctggtgtcaatttctctcttttttttttctccctctcctttttaattcataaattctcaagatgacttcaagataattaaaataaaaaatctattatctgactgggaacggtgtcttaggcctgtaaccccagcactttgggagactgaggagggtggctcacatgaggtcaggagttcgagaccaccttggacaacatgatggaaccccatctctattaaaaatacaaacagttctctgggcatggtggtgcatgcctgtaatcccagttactctggagaatgtcttggacctcgggggcagaggttgcagtgagtcaagatcacaccactgcactccagcctgggtaacagagggagactgtcacaaaagaaaaaaaaaatctgtcatttctgtattgctgtttggcttacctattgtttatcaaaagtctgttattcagtgactagcattgcatttttgaggtgttggtaaatctggcagttcttacacagcatgccagtgtgtcttcaaaggtctttgttaaggtgcttttaaggaggcaatgagtatacgccaattatcagttcttcgtgggctgcagctggatgattccaagtttatctttcttctcagttacatgtagttaatgtgcttgctcaaactctaggtgataaagatttgaattctaagtaagcctttgtcttctgaggtgttggtactaattttcagtgcttgccaacgtttatttttggcataatttttcatttttgaaagtcccatggttatgagattctctttgtggtcatcaattttaatatttctagatactgagattgaacattgttacaggtctttgagctgttctcacttccttcttagaatatgtctatttttcctgtccagtagttgtcctaatttgtttcctaggagtttttgtgtatctaaatgcttattgttcaaaccgtatcacaaatagtttctcacaggttttattaacagtttgtttgaatcaggatctaactacattcctcactgtctagttttctatcttttaatcactcctctttgattctgtagttgcctccttacatttttttgttcttgtaataatattcatcatttgctattttgttagtagtttctgtattccttttgttatttcagtgggaattttgtggacaccagagggaattaaaagcaggtgttacagttgtcttcctaagaaattctgtatttatcattttaaagtgctgtacagttactaggttaaggtgatgtagtcctttctcctattattggacatttaagtggatttcagttctttagttctagtgtgtccagaatttattccttcctgtgggttcttggtcttgctgacttgaagaatgaagccacagaccctcctggtgagtgttacagctcataaaggtagtgcaaacccaaagagtgagcagcagcaagtgttattgtgaagagcgaaagaacaaagcttccacagggtggaaggggacccaagccagttgtgctgctggcttgagtagccagcttttattcctgtatttggtcccacccacatcctgctgattgatccattttacagagcactgactggtgtgtttacagtcctttagctagacaaagagtgctgattggtatgattttacagagtgctgattgttgtgtttacaatcctttagctagacacagagtgcagattggtgcatttgcaaacctttagctagacacaaaagttctccaggtccccatctgaactagaagctcagctgacttcacctctcactaataactactaataaaatactacatatagcttcctctgtattgctgggcatttagaacacttgttttactttaataaattaattttttatactaagaagattgtagattcacgtaccatgttaagaagtaatgcagaaaatcccatatattctttaccctgttactcttagtgttaacatctttaaaaatcactgcaaccaagattttgatcactaccaagattttgacattgtttccatcaagatactgaacatctgtgtcatcacaaggattcctcatggtgcccttttattgcaacacccgcttgccttctgccccaacttccttcttaacccctggcaactaaccagaccgccagtcggctcaatttctaaaggtcttttgcttttactttaaacatgtactaactggaattgaacataatatggacttttgaggttagtttttttttcattctatttaattgtttgcagtctcactagaatgatgtatgtatctatcaggttgagtatcccttatctgaaatgcttagtaccagaagtattttggaatttttttttttggagcatttgcctcatactgactacttgagcatctctgcattaaaaatctgaaatccagaatgtttttattgctgttgttttttgagatggagtctcactctgttgcccaggctggagggcagtggtgcgatatcagctcactgcaagctctgcctcctgagttcacaccgttcatctgcctcagcctcccaagtagctgagtagctgggactacaggtgcctgccaccacacccggctaacttttttgtattttttttcagtaaagacaggatttcactgtgttagccaggatggtcttgatctcctgaccttgtcatctgatctgcctgcctcagcctcccaaagtgctgggattacaggtgtgagccaccatgcctggcccagactgttttaaggagcatatcttttgagcatcatgtcaccatgcagaaagtttcagattttggagtatttaaatttcagatcttcacattaggcatactgtatctgacatttgcttcctttattgacgagtagtactcatggtatgaactactcaccatgaatggacatctgtattatatccaggttggggctattataaactgctgtgaaccttggtgggcagggtttttggcttttttatgtttttattttgtgttttaatgcaatgcttatttctctaggtgagatgaaatgtggaaatgttgcagtcttcctaatgctgtgaaccttggtgggcagggtttttggcttttttatgtttttattttgtgttttaatgcaatgcttatttctctaggtgagatgaaatgtggaaatgttgcagtcttcctaatgcaccttattgtagcattttctcattttctgtatcagtaccccatgttctttgtcctgtgtccaagaaaattaaggaacgtggacacaaaggtgggattggagtgaaaatttaataagtgaaagaaaaaagctctcttcagcagagaggagtccgagtggattgctgggttatagctgaatttaacagcttttataagaagctcttctcatctctgtagcagtttgaataacttctattatcagtaaagctgtctgtgcaactcctcttatcttaagcagttgtggatatgtctctaggcaagcacagagtgccacttctcttcttgatataactgagggtttgttttcgataagcccctcacctccctgtgtaagttctcaccatttgtatgcctgaaaaactttttcctgggagctgactaattatacaaagttgcttacctatgtgcaggtgcagcctgaggttttccaaactgatttttcctttgcttctccctcattccctgcttcaggagtggaaaccctgactgctgttgggaagattgggcattgatctttctggttaattcctgctggagacaggcattgtgtggggaacagaagctaggattcctccaggagatggtttaaggcactcagatgaaagaagtgtttatgcctggttccatttgcattaccatttggagcttgatagcttctaagtgaaatgaaacaatttgggttactagtggacatatgttaaaatgagacaagaagtggggaaagacagcattaaaatcctgaggctgttgacatgccctgataactggtggctataactatgcctgttaagattttgggtgcatggggctaggctttgttgagcttccttggtcttactttcccaaaatggaaacgtctggattataggttacctggcagcatttgtaggataatcgccctgaactagaacattgttccagatttttacgttacatatccctttctgtttcctgtgagctgcagccagagatggctggttagtttacaggaataagcaatgttagtttaaaatgtaggcaggaatgtaaaaactactaacgaaactagaagtcaatgacagatatgtgataagtttggaacataatttcccttttttcagtgctcatttctgttaaaaacaaattccagtcctcatttctgttaaaaacaaataagattgagttgtttgcaaaatagactttagttttaaagttggtctgagatttgcataaaatgcaggaagaataattatttttacacaggccttttagataggctttgatggaactttcttccacaaggactctcagatgggactttgaagctgagcccagccacgggtttgtaccctcagatacctgtgacttaggtaaacttttcttttcttgaggttccaagagcatggtgttcctagggctgtgagaaagtgaaatttgttactcaccgcaggttaggaagcttatatggaagctgtgtagacaaggtgtgaggccacttttcccaaagggcttttattggctctgcaagtcaagactgactccttcagtggaaacaaaccctccagtcaaaaccttggtaaaacaaccagtttttcaaattgtgtgcaaaataaaatggattcttactgcactgacgcaaacaaccatattataagtcaagaatacttacaacaagtatctgaattttaaaggaaccaggcagaaagaaacaaacatgctctaaaccttgttcacaagagtataccttactcagttgttagtctgtagctagctcaagacaagtttccttgactctgaaaaacaaaataaggatcagcactgttgtaagcataaaccaaaaagattgctttagttttctattagttcagtccattctgttaactattgttctgcttgatatttgtaaacatttcagcttttcgtaagtcctgtacatttttctgttatgagaaacctgcatttgagagcacctgttaaagttccatagctgattataaactatttttttgaagaagattcaagcaagacaacaattgtctgtaaagacaaaatgtccaaggtggttacagtcaagaacatgattgacaaatgtgattatttccatgacttaaaataactcaacataacaaccttaattgcaattaacagcacatactctgggcctagaatcttggatatcccatacggttatcccatcagcctttattattatatggaaatcctgttgaagagagaaagttaaaatttcacccttgcattagtttactattaatttatttagcctcagtttttaatgaaacattgtaggcactcctattcaattttaaccagtttgaccatgaggtgagatttttgcaaacctgttataaccctttacaagttttgctaaagagcagattgggatcttaggaataccttgttgtgcttttatttcaatatttaatttacagaaaaaaacaaataccctttttaatttagttaatatgttcatacacagtttcctttgtaagattaagttttgcaatctttttcagtttgcttaaaccttccagtttatctaatttaagacagtcctttattcttaggcacaatgtacatttccttgctttcttataatcttttactaaaaacatattttactgtttttatataccttgcatgtagatctatttccagagtttcaattagatgtcaaaacggtaactctaggaatttttttttttttttttttgagacagagtctcgctctgttgaccaggctggagtatagtggcctgatcttggctcactgcaagctccacctccctggttcacattattcttctgcctcggcctcccgagtagctgggactacaggcgcccaccaccacacccggctaagtttttgtatttttagtagagacagggtttcaccatgttagccaggatggtcttgatctcctgacctcgtgatccgcctgcctcagcctaccaaagtgctgggattacaggcgtgagccactgtgcctggcccagaatgtttttatttttaaagatgaaagtcatgtgaactgaaaggtaccacaagcttttgctttttctttaaaagtatttaagtgcttatttacttaggccaattaattagaactctttttatagacatcacatacatatcacatacatgactacacagacagaagaagatccaacagcttagagtggagcccttttaagagcagtctaggaatacagtctcctgtgcctagtaaacaagcatagctggaagacaaagacagattagaaggacttaccacctctaattacaggggttgtatgaagaaaacagaaatttctccccaaatgagatgtgttgcaccttatctgttttctcaaggagtcctgggccaccagaagtcattctagggtctttcatgcatgcaccaagagtggcaagacagagtgaaaaaagttgactgaagaagaaccttttgcagaaaaacaagatctatgaaaagaaaaacaccagggccttttaaatacacccatagcttagagacccactttcaattaagttgagtgctctttaaaaaaattctttttcattaattaaaactttacagagaatgtaaatagtgattcttacttcttttaccagtttgcttcacttcctgttcacagtcatattcgggttcccagttttctctgggagaaaatggctggacttaggcaagggcaggttttcaactggacaggagatccctttagcagcgaagcttgatatttgaggaggcaatttgtctgttagccagaacctttccttggaggacagcagttcttctattttgtgtggggtggtaacagttaaattaggctgggcatggtggctcacacctgtaattccagcactttgggaggctgagacaggggcagatcacctgaggttaggagttcaagaccagcgtggccaatatagtgaaacctcatttctactaaaaatacaaaaaaatgagccgggcatggtggcacatgtctgtaatcccagctactcgagaagctgagacatgagaatggcttcaaccctgcaggccgaggttgcagtgagccgcactgcggcactccagtctgggcgacagagccagaccatgcatcaaaaaaaaaaaacagaaagaaaaaaaagttactccccatggttaacccattgacctctagcactagcaaggccacactgtaactgcttgcaggtgggctgaccatcctttagccaccaagttaagttccttgcttaagtaacccactggctgttgagccagacctcaagccttagttaaaaattctagggccattcctttctttcctgatacatagagactggatgctttccctgtgggaagactgagggctggtgttttaagtaaggcttattttagctggttaaaggctttttgagtctcagggtcccaagttgtgggggtgagttttaactgtttgagtttcttttatgaggtaatataaagggagagccatttccctgtactcaggtattcacagtctacaaaatctggtaatacctatgaatccccttaactagtaaagaaaatagactcaatcctttccttacctacttctctggtcctttctgttgagactagacctagtgactttactgaagtctgacagagctgagtgttagatttttagaccctatatccactttaagctaagagattgaggatagcctcagtgccttcctgagacatccttaattagggcacagaggagagggtcatttatacactgcaaagtttttacttgagggtgagaaaaactagatttttcaacagagtgtttcattaatttccttcccattttaggagctgcctgagtaataaaccagcagagaaggaggtgtgtttcactaaagcttttctcatcctttccaaaaatgctgaaggattttcatctagtttttgatctatcttggaaaccttagagcagttaataggtttggctctaatcccctgcaagtccttcagcatacacatttgtaaaagtttccatctccattttctgatgttatcatcatagtcccatttagagttctttaaggtcactggtacttttctcatggctttcccttccctggaacatccttcatggagaatttaaatacttggcttacatcctggaaggcctttatatgtgagtgaaattggggctttcccagagtgaactttagggtctgaggattaaaggagaaccagtctgcaatcaaggggattgcaggtgtgaggatggggtattatatatctagaaaagagacaagagaagaggcatccctcagtctcttcagtgacccagagtggagaggaagacagtgagagcagcacccccacccactgccaactgttttccctctttggttactgtgtcccagcaccatgttgaatgtgccacccccaaaccgtgataccagaggagcatagcagtggggttagtcatgcttacccatgtggccttagtgctctgctggtgataaccctttgacctcctagacttgtgtggtctgtgtgactccttgatggatgggtgtgtatagtatgctggtaagagttttagatttacttttttcatgtgaatattcagttgtccaaggagcatttgttaaaagattgttgggaatattgttcagcatctttgtcgaaaataagtcaatcatagatggaagtgtttacaagctttatgttctgtttcattgtttggatatatctgtcgtgaaaccagaattgcattgcattgatttgcagctttatagaacatttacaaattatgaagcgacagttcttcaattgtgttatcttttaagattgttttggctattctaggtcccttgaacttccatattggttttagcattagcttgttgatttttgcaaagacattagctggaattttgataaaccttattcagtttgtattgtactaccatcttaacagcattagtcttccaatcagggaacatacaatgtctttccatttatttagggatgtctttccgtttatttgggtctatcttacttttgttcagcaattttttttttttagttttcagttcaactgtgctaaagtgataccaaaagaattttttgtttttgttgtgaatataaatggaagttttcctaatttcattttggattttttaacatctaatgtaaagaaacatgtatcttgtatgtagaaatacagttgatatttgtttattgatcttgcatactgaaactctgttacatttctttcttgtagtagtttgttattgactcttaaatttttctatgtatggcatcatattgtttgcaatacagttagttttacttgttcttttccaattatataacttctccttctggcctgatttccctaacaagaacttctagtacaatgttaaaagtaatggtgagaacagtcatttttgtcttgtttctgattgtagttggcaagctttccatttttcagcataaaatacaatgtaaaaaggagggcttttgtagatgccttttattgggtttaggaagttctcttcaaatcctagtttattgagtatttttatcatgaaaggatattggattttattaactgtcttggtatatggagatgttacatgtgtttatgtcctattttacattagttgatttttgtatgttcagccaggtttatacttctcgaataaattatacttgtcttggtgtataatctttttttatatgtgttgcttcttaaactgcaataaacgatacttgttatgatctataatctttttatttgttgctggattttctttctgttttgtttaggacatttttaggtttttaagaaactgccaaactgttttccagaatgactaaccttattcatttctacccatagtttatgaatatgaataatccagtttctccacattctttctacattttggtattgacactattttttattttttattttttatttattttttttttttgagatcacaggagtctcactcactctttcgcccaagctggagtgtagtggcacaatcttggctcattgcaagctctgcctcccaggttcatgccattctcctgcctcagcttcccaagtagctgggactacaggtgcctgcaaccatgcctggctaattgttttatatttttttagtagtgacggggtttcgccatgttggccagggtggtctcaatctcctgacctcgtgatccgccagcctcagcctcccaaagtgctgggattacaggcgtgaaccaccgtgcccaccccagtgacactattttttaaacttgttttattctgacaggtgtgcagtgaaatcccattaatggttttaatttacattatcctaatgactaatgatgttgaagatctttcatatatttagtttctatgtggagtttttggtgaaatgcctttttatgttttttgttcatttgctaatttaagtttgttattactgagttctttatgtaatctagatgatagtcatttattagaaacacagttagcaaatattttcaaacagtctatagcatatctttttgtccgctttaacaggtgttttaccagttgagtttgtattctgatgaggtccgacttattttttcttagaaatcatgcttttttatgtcaaattctgagcacttattgcctacccataaatcctatttattcttatattgtttctctaaaagttttacttatgtcattcaggtctgatccagttgagtgatgctttcttgcattctttaggtgtgagacttagatctaaacttctttttcttctcccaggtattccagaaccattttgtgaaaggctgtctttcatttttaatttattatgttgctcttgtacctttttcagaaatcagttggtcacatttgtgtgggtttatttatacattttttgttttcttcattgatctttgttcctgtgcctcagaattgtgattactgcaagtacataatgtagtattaaaatcaggtagacagactcatcccagtttatctttttttcaaattatttagttgtttttaaattttgcttaccgtaaaaattttagataatctgatcttcattttagatatctgcttcccagtaataggagatacactgttttaaatagtagtacgtaaattctgtatatcggtttggggagaattttggcatggatttttgagccccagaatactatatacctcttcattgattcagacctttgaattatttattcacacatacaaaccttatacatgtttggttaaatttacagttaaatgtttatgtgtctggttttactttgagtaattgtgaatgtttttgatgctgtgtttatacatttattactactcctgtataggtttgatttttatatgtatattccatgtcctgcaatcgtgttaaagtccatgaggctttttttttctctttgaggatccttgcaattttcttttatatagaaaatcatacccctgcacgtaggaagaattttgcatcttccttctccttgtgtgtgcctgttacttctttttcttgcctcattatgttggttagaattgccagtataaagctcaatagaagtggctagagggagcaatttagtcttgctttgatctcatggtaagaaaactatcagtgtttcattgttaataacgttagcctggagcagtggctcacacctgtaatcccaacactttgtgaagttacggcaggaggattgcctcagcccaagagttagaagctacagtgagccaagatctcaccctgtctgttttagaacagaaaagcaagtacagagggaataatgttatctcccccttttttgtagatgccattaattggtttaagaaaattgcattccatttttgttctgagactctttgtcatgaatggatgttttgccaagtgtttttttctgtatctgttgctgtgatagtgagtttttttttttagacatggtctcactccgtcacccaggtgagagggcagtggcgtgatcacagttcactgcagctttgacttcccgggcccaagctatcctcctccctcagcgtcctgagtagctaggactaagggcacaccctaccacacgaagctaactttttttctaatttttatttttacagaagtggggtttcactgtcatgcccaggcttgtcctcccaaactttcgcctcctgtcactgggattacaggtgtgaacagccatgtacagcccagtttttcttttctacccttttaatgtggtggattacagtgattgttttttgattagttagttaggcctgtatccctggaataaaccatacttaatcatatatcattattattgtgtgtttttgactttccttttctaataattgttaaggaattttgcattcgtatttctgagggatgcagtctgtagttttctttgtaatgttcaggttttgcagtcagaacattacttactttataaaatattgggaagtgtttcttctttttttcctcactgaaactatctggtctggtgattattttggggagttttaacattacaaatttagtttttcataataattgttcttttaaaattgtttatattgattgagttcctgtaatttgtttttaagagatgtgatatattttgtctaggctgtcaaattatatattatttctagtgttccgtattgttttttgatgtcagcacagtctgcagtcatagctgttttattactgatgttagtaatttgtgtattacctttaataagattttgttttactcactgcgctagaagtttaattatacatccttttgaaaagacaagtctttgtttaattaattttctctgttgtttcttttaaagtttatggatttttgttaattctttagtgtgtcctttattctgctttcttcaagcttgtattgctctttttttgtagtttcctaaagtaggagttaagatgattcacttcagcatttcctcttatctgtgtgtttggtgttaggaactcccatcttccactatgtttaaatgttgcatattttatccaaattttgctttttttgacaagcatatatatgcaaacaggcttatgtatatgtatatatatatatgcctatatatatacatatataccagtataatatacatattataaatatatagatatacatgttgcgtgtgtgtgtgtgtgtgtgtgtgtgtatgtattccttccagacagggcctcaatctgttcgcccaggctggagtttagtggtacaatcacactcactgcagtctcagcctcccaggttcaagcaattctcccacctcaggcttcctgagtagctcagactataggtatgaatcactatgtccagctaatttttaaatttttttatagaaataagtctcactgtgttttttaggctgggactcaaacttgcttggccttaaactattgggctcaagtgattctccttccttggcctctcagagtggtggattacagtcatgagccaccatgcttagcctcaattatattaatttctgtgaagatgactctttgagaacatagaactaggacttgaacaacaattaataggaggttttcatgtcatcgtaatgtaattgatttatactttgattcctgtgtaattatatgattttcattcttaaatttcctgaggttggttttgtcactgaagaggtggtctatcttgtgtgttttcttttgtaggaactttgaaaataaggtttatcctgctgttgtgtggagtgttctataaatgtcagttaaatcctgttggttgatactttcgttgatatttttgcaaattttctgtgtagttctgtcgtttgtttagagagggttgttgatgtctctctaattatgattttgtctcttttgcctttgattatcttagtttttgcttcatatattttgcagtatacacattttggtgtatacatgtttagaactgctgtgtcgtgtcttgatgaagtgatcctttttcattgtttagtgacctatgacatttttttcttgtgctgaaatctattttaatctcattaaaatagcttttctactttcctttaatgtttgccggttttatctttttgcattcttttgctttcaacctgttttctttctttttttttttttttttaagagagggagttttgcttttgttgcctatgctggagtgtaatggcgcggtctccgctgactgcaacctccgcctcccaggttcaagcgattttcctgcctcagcctacgaagcagctgggattacagacgcctgccaccatgcccggctgatgtttctttatttttagtagagacaggatttctatattggtcaggctggtctctaactcccaacctcaggtgattcacccacctcagcctcccaaagtgctgagattacagccatgagccaccgcgcccagcctcacctgcctattttgttacacttaataatacaaagaatccctgctaccccttgctatcatatttttatgttctgcttattctcttctgtttttcatttctctgtgtttattttcctgccttctggagggttattggaatattttttaaatttctgtagcacattactgtgtctgtttatgtaactttaaaatctttgataattctaacatctgtcgtttttgtgttggcaccagtcaattcttttttcattcatgttgatgtcttcctgattcttgatatgtcaagtaatactcagtggaaacccagagatattcatatgttgtttgactcaaggaatattgaaacttctgttttccttgatttttgtctggcaacactcaggcaagggaagggagggatacccttggttgttaccacttggaagtagaactccaagttccctatactgtcttccttaacactcgaagggggtgttccttattactgctatgtgggggggaatttctgaccccctgtgtggtccacacttctaacttctaccatggtgggagtgatgttttttgcaacgggcagtgatgaaagttctgattctcttttaggcaccactccagcagaatcaggcaggtgctggctctttgttattgtcaagtggagttagaaatcccagctcactacttggccttctttatcttccatagaaaccccagctcactagttggccttctttatcttcccacagattttggcatgcttggttacagccttaagaactttagggttttcactcaactttttgtggtatgcatggggagtgagtcatagttctttctatagtttttgcttggagtaggacatttattttctaagttttcaatttgcatgtttcctgatccataggctataggggtggctgtggggagggagggtgcttttcttatctgcacctactaatgttggcaggttgctagatcttttagcttcaaatctggaatatatgaaataaaagaaaattctgggaattcactaccttcttgttccttatatttagaagtctctgtgaggtctacattcttctctttacttttcagggactattttcttccctattcttttcagactccaaagttcgtgttatgtataatgtccaggagttttggttgtatttaatgggaagaataatgaaacatctgttttaccttcacaaatcaaaatgatcttaattcttttcagtgagcattttatctcctacatgtagacagcatttgttcatcatttctttgtaagttggaggtttttgttgtttggattttttggtctgtaacataatttctaataaacatttttcacctcttatgtttgctttttgttgtaaaatgtttaatgaggattacttaatcatctgctctctttatgtataacagcatttttgtgtcaggtatcctttgttattttttaattacgtaattttcaagttaaaagtaacaaagtttatattggaaatagaggctctttttcctggagttgcaattactttgtctcgcgagtactattttgtttcctctactaacacctttgttcagatatgctcttggggtgtgtgtgtgtgcgcacacgcccctgtgtgtatgtgatgaatgtagtttattcaaagacttaaagcagtggttaatgtaaacaaaygtaataaattatgtggtatttatatcatttaaatactttctttaggcaagttggacaaatgcaagtaaaaagcaacgtgaaaagctccttgagttgatacgccgtcttgcagaagatgataaagatggtgtgatggcacacaaagtgttgaaccttctttggaacctggctcagagtgatgatgtgcctgtagacatcatggaccttgctcttagtgcccacataaaaatactagattatagttgttcccaggtatgggagtgtttctttgttcagttttctgactttccttcacaagtaggataacttagttacaagatgattccagttttttctatcattttatttatttatttttgagacagagtctcgctctgtgtcccaggctggagtgcagtggcgcgatctcggcttactgcaagctccgcctctcgggttcatgccattctcctgcctcagcctccccagtagctgggactacaggcgcccgccaccacgcctggctaattttttgtatttttagtagagacgggctttcaccgtgttagccaggattgtatcgacctcctgacttcatgatccacccacctcagccccacaaagtgctgggattacaggcgtcagccaccgcacccagcctgccattttttatttctaaagtaatctcgaggaattggcatactattgtcgtataagcctggctacccgttctccacccttgggttttccagccagattttatatatcattcactaagcatttttgcctcactgagacaaagatgttaataggtagaacatattacattcatattgtaactaaatatgtagtgctaatacagatcataaagatttaaaagcactaagtgactttagatgtataagggtaattacattttatttgctagtaagaagttagtaagattaacagaacatattggcttccctatcagcaaatcacaacagcttcccaatgtttaaccgatgtgccttatgctacaaattttaagtattaaaacttcacaaaactcaatgaaatgcagtagccaccattcagacaaatgttttaaaatcatactaactgtaaatgtgctggtatttgggaactgtgtcttggtacaggtatttctgaatcatggaacattaaatttatagaagcgccttacattttggtgttttctttataacttcaaaataatatatttagagcattttgtttgaactcttttacaattacatcataaatttggtgatgctaggtttagaaggtttcctattttataagtctcaaaataattttgaaggtagaattacattgagtattgatccacttacagtataaatttttttcatgtataaggatcgagatgcacagaagatccagtggatagatcactttatagaagaacttcgcacaaatgacaagtgggtaattcctgctctgaaacaaataagagaaatttgtagtttgtttggtgaagcatctcaaaatttgaggtaagacttttttaatagagaattttcttatttttatctgtatattatgttggaaatggtgtatgaaagcaaattttaaagaaagaaaaccatggtgggaaaacaagaaatttctaagagtttgtttacaacaaaataaggatacttgatgatattcaacttttttgtattttatgacacagataggtaagtgatatatccaatactaaatagcaattaagtatcatagcgacattaccgcctttcaggtcttagttcagaattgtctctgacttccagcagatgtatcagatattatgccatgtgttgtatttatcttactcctcattttactctatcctttccacggttaactctgtcttggctcaatattccttgtagttacaaatagtattatttgttatttatttaattgatttaatctaacatttttaacatttgtaggggggaacacctctttcttgagttttaaaaattagactacaaagtgatttaaattataaaacatgacaagactgtttaaagatttttttactcataatttattttagctagattttctttaattttaaatgtttggtgttatatgttaaattgtggttatttaaataatttattttattttattgtaacatattgaaaattaatgaaataaaaggaaaaataacatggagaaacctgtgttagttgaagaaaattctcagtgcagttaggattcccagtgatgaactccaggcttatctaactagctgtaatcttagaaagattctctcatgggtgctgcggctcatgcctgtaatcctagcactttgcgaggctgaggcaggtggatcacttgaggtcaggagttcaagaccagcctcaccaacatggtgaaaccccgtctctactaaaaatacaagaaattagctgggcgtggtgacgggcacttataatcccagctacttgggaggctgaggcaggagaattgcttgaacctgggaggctgaggttgcagtgagccgaaattgcacccttgtattccagcctgggcaacatgggcaaaactctgtctcaaaaaaaaaaaaagattgtctcatggtgtatggacatttgtcttgtgtatcagatgacgattaatcaagatgctttatagcttagattgatataattatgccccaaagagagtttttgtgttgatagaagcttaaaatgctatttatgttttgtgattttttttcaagttgacttttgactctatttttctaacgttggaaatattacaggaaatttgaaagtttcatgggaataaacactggaaaaaatacttatgaaggacacattttgattatttctctatctatatcgtttgtcttttatcagacttatctatttactatagatagatgcagtacatacacttttttaagactggtgacctcattaccagtagattagtaacgattgtgagttgattggtttcgtcaataatgacaaactaggaaggaaaagagaactatgtattttttgtgataaccccaggtagaagggtgtgaactcattgttccagaatgtacctggatgtctgatattcttcatcatgcaacacatgtgctttgatactaatagatactttttatttttaaataagaatactgaaatggatatttggttggaggcatggattatattttttacagggtttgatattttgttaaggggaggatattgaccacattttgttaagaatgtatagcattaaaaatttttaaagtagtagctagaatttagcttctgtaaactctcttaattatagcaattttcatgtgccttattatactgttaagttcttcttatttcagtcaaactcagcgaagtccccacatattttatcgccatgatttaatcaaccagcttcaacaaaatcatgctttagttactttggtagcagaaaaccttgcaacctacatgaatagcatcagattgtatgctggaggtatgtatgataagctaaaattaactatggggaatcaactttgttttgctctaaatgttaataacctaagaaataacaacatttatttttgaatgagaaaaaatagaagtggatttatacttcatattgcattcacttaaggaatatgatctacttggtatcccaaatcttaggcaacctaaactctaggccacctttcccagtgtctttattaaatgcatgtctacttactcatccttcttcttggtatcttttctttcatacctgggagctctgcctgttagtatctatggtaggttataattctcttgggtctctttggtgtgtactcaagtcattacgcttttgctctttttttgaggggaacggagtctcactctgtggcccaggccaaagtgcagtggtacagtctaagttcattgcagcatctgcttctccggcccaagtgatcctcccacctcagtctcctgagtagctaggaccacaggcacccaccactatgccctgctgtttcatatttttagcagagacagggtttcgccatgttgaccgggctgatcttgaactcctgggctcaagtgttcctcctgccttggcctcccagagtgctgggattacaggctgagccaccatgcccagcttaatttgttattaattttgcctgattctgttattacatatattatagttcttaataattctgaaatattgttatccattgtttaaagagcttattagaaattcattggatttgttatcactagatgtgtcgttggttcttagactatgaaatattttaaaactgtttcttgtattatacttctcaacagtcttttcgtatatgctatgtggagatctatcttggcatgttgaaggttaatttgaatgttatttgtactcttaacagttttaatacattttgtgtgctggagcacacagtaggctttctacatgtatagttgtatgcccctttccccaaaagttcataaaacatctgcgtcccaaatcaaccacttcacaggcccaatttttatgattatagaggagacaaacttttattgtcccatgttgaagccaagatttaccataatgttggactgaaattgctgcttaattgatacgctacattagtatctgtggaattcaatcatatatgttgaaaatgtggatatttgtattattaactgtttgaaaagcatagtagagtcttggtatggttgagtttgtaaaattcctcaagtttttgcttaatgcttccttttaaagtcacataaaataatagaaaacttaagtaacttccagttacctctaattatttcattggcttctgttcctctcacattttacccactctttttacccttgttgtagaactataaaagcaatctgagcatcaggtgctgcctgcatttcaatcctgccagtcaggttcagaagctcgaagacaaaagtggtatgacaggcaagcccatataggcatgtaaccaagcttgctggcccctttctttatcaagagcagctaaaaccagtgaaagcaacataaaatttgcatatcgttctcttaaattctgtatcacctcaagccttgcttgtaccttcttgaaggtacaaaggctctcccagatgccaatgaagaccctccccaaaagtgatcacaactagatacttaactccaatgataattttattcattttgggtggttttgtctgtaattgtaatgttatcgtcaacaattgaagacctaatttccaattcagtcaagaggaaaggcataggtgcattccagcctcactagggtgctctgtttatttgttcaaattctagttgagttcttgactgatgtcttatgatcatgagtcaagaaatgaagaaattccacattctcatgttcatattatttgtttataaagttgaagttggaatgtaggctttatagttaaactgctataaagtttatatagttaaatacacaattagatttatatagtttatatagttgaacctacctccaactgagtgacttgcaaagtacttaagtcttctgtgattaagatttaccaaatttgtaaaacaagaataacagtagtatatacctactttataaatgagttaatactttctagaacatagtatttgccagaatgttacctgtatacagcacatgcttgaacactttctgtaattatacagtcccctgaattcattgattatgttttctagaactaatcatttacctttaatattttccatttctgagtaatgttgctcattctgagtaatgttgctgaataatgtcagtttgttcttaaatatagggacacaatttctctcactaaaacttttatatgattaggattatataaaccaataccaacaaaaactatggtgattgcatcttagaaatttcttcaagcataggatgtaatatgcaaatagatttgaagttcttacagttcactaatgttttcttagtttctgataatcatttcattagtctgtattctgactatatacgatactactagttgtttatttttgtaaaaacatttcaccagtggcatggtcagctaatttcatgttattttagataacaaagtaacattaaaattttacttatggcaaaaatgagtacccttgtctcactacttgaatttagccaggaatacttcctgaatgacatttttcaaaaacctttatgtgcatcaacaaactatcaaccactttgtttatctcattgaaaggatggtatttgtgatgatttacttacaagagtattatatgtcatttttcctgatttctgaataaaatttgtaggatttacactagttacagggcacattactgttcaagaaaatgtctttttctaagaattgtcatttaaatgtcttctgttctttctactttcattatgacacttgattcttttggggacaagttgccgcaggaaaaaagtctcttcacaagtgtcactcagcaacaatgtcagtgctaaatgcagaatctggctttgattcagtcactaattctacctcattttctttgtgttttttttttttttttttttttttttttgaggcaggttcctactgtctgacccaggctgcagtgcagcagtatgatctctgctcactacagcttctgcctcccaggttcaagtgattctcctgtctcagcctcccaagtagctgagattagaggcatgagccaccatgcctggctaatttttgtatttttattagagacaaagtttcatcctgttggtaaggctggtcttgaactcctggcctcaagtaatctgcctgccttggcctcccaaagtgctgggattacagatgtgagctactgtgcctgtccttacctcatttttgcatgccagctatgaagtactattaaatcttcagtgtgggtttttctgatctaaaaaatattttgaactgaagtgattaatttcatgaagtttgtatctctttgacaatgtaggctttgtactggaaagtacaggatgaactttaaacatcctactgtgccagaaattgtaaaaagtttttagaaaatcatattgacatatcaaaaagacataggatttgcctctcagtagtcaaatctgtgacaatttgggcatcaaaataattatacttatgacataactgctttacaatatgagtcctttatgttgattaaaataaatggagaacaatgccaacgaaacataggaaaaaaacaatagatgataaaagaagtagctgaaagtctaataagaaacagattactgactcagtgtcaaagtatcctcccagaagtttatacaaagagaaaaatactaacttttcagtggagaaacgtggcagaaacaccttaaataagtgatctaagttaaaacataattaataaaggacacactgacatggcttctgataatatgtgaaatgaacataggatatttttggggtattttgttcaaatcattgcaaaacctgaatctatggaaaatacagaatgcaaattgagtggtgtaagtggctttattcttaaaatggttaaaataaagaaacacagaaaagataaaaggaaactttaggtaaaagaaagctacttgtagtatatgagccagagttttattctagacttgcagaaaagaaagcataaagtgatgacattattggtacacttcattaagtttctaaatgcaccatggatctgatagcagtcttatttggagtcttaaaacctggtaaatatactgtggttatgaaaaatgttacgtgattgatccttgaacaacacagggttaggggccaccctacaaagtcagacaccccacaaagtcagaaaatccatgtgtaacttttgtaggggacaccctacaaagtcagaaaatccatgtgtaacttttgactccctcagaatttaattactaatagcatactgttaactggaaagtattaatgataaccaaaacagctgattaaaacatattttatatattcatgcatattgtacactatattacaattaagtaagctagaaaaacaagatgtcactgagaatattgtaagaaagaaaataacctctactgtttattaagtggtagtgcatcaccctgaaggccttcatcctggttgtcttcacattgagcaggctgaggacaaggaggaagaggaagtgttggtcttgctgtctcaggggtgtcagttgaggaagaaatggaatgcgaggcaggaaaggcaggcacactcgtgtaactttagggaaatattatttctggctgatgtttttgctttgtcatgtttcaaaaaatgtttctatacaacaggggtcccaaacccctaggccaaggaccatgattggtccctggcctgttaagaactgggccacacagcaggaagtgaacagcaggtgagagagcattagctcctgagtcttgcctcctgtcagatcagtggtggcattagattctgataggagcgggaaccctattgtaaactgcacatgcgagctctctaggttgagtggtcattgcacttgatgcctgatgatcttatgtggaacggtttcatcccaaaaccatccccacccagtctgtggaaaaatttcttccaagaaacttgtccctggtgccaaaaaggttggggactgctgcggtatagtactaatccatcctgcaccatttgctgtagtttcagcacctgtattatggaagtccatgtcataaaagaaggcaaaagcagtctttagtgatcagaatcctctgccagcttgtttaatgtcagtttgttttctgtcagtgcttctactacttcctcattgtctgccactggttcagaagcattcatttccattaagttgtcttgtgtcttaattccttggtgtagtgtctattagctcttgaatttgtccaagattcatatcattaaaccgttaacccatccggtttttgctgtttgcatgatctctttcatgcgattaccttaatgagctctgttgtaaatcctgggaagtcatgtacaacatctggacatagttttgaatgtgttgtttccagcctgagggctttcatcatcttttctgttaaaatgatggcatctgcagtggtgtaatccttccacattttcatgatcttctctctgttagggttctgttacacagtattcacagtcctttctagagagtaccatgtgtaatgagccttaaagttccttatgacttgctgatctagaggctgaattagagacgtgtttggaggcaagcagaccacattgatgcctttgcccagaggcattgtctaatttcaaaaagaacattaaaaggcacccattactggcaaggtacttcctgacttcagggacaaagctctgatggaaccaacccagagaaagggttcttctacttgtcaagccttcttgttgtgcaaccacaagactggcagctggtgtttatcttttcctttcaaggtggagcattaacactttataggaaaagagccatcctgatcattagcctgactgcatctacagttagcatactctttcctgccttaaatcttagtacttgcctgtttcttactaacaaatgtcctctgtgccttttttttcttccagaatagggcactttcatctgcattaaaagtctgttgaggcagagatcttttctcaatagtttttacgaatgccatctgggaactcaactgctgcctcttgcttggcaaaagctgcttctcctgttatcttgatatttttaaagacaaaccactttctgaaattatcacatcatcctaagctggcagttcttcagtttcaaatccttcaccttcctttttgctgggtctgacccgcagactctggccaagcgacggatgagaaaatgtacgcagacacaggttttttttgcctgggcacacggctaggggactgaccgctcacagacacccaggaaggtgctgtaaagagtcacagcagttgcagccctgagaagtgggcatttatttaatacacatttaatgacaaaggctttcagtcaacacaacttgtgggtatttacctggagagagcagtcctgcacgcacatgattaaaggccaggttctgaggcctaagtaaacttaacttacctagatcaattcctttacacttccttgttatctaccttttgctctcaggctctggataagagaatttggctgccttcagccaaattatctttcaaagcttttgcaaaacctcccagccttccaagaaggtttgcatcttttcctataatttcttcttataatttctcccactaccctgaccgaactcctacaccttttgctttaagttgtcatatgactttgatttttcccgttagattagtctataagtgtgccttttttatagcagtcttactcaaaaaaactgcattttcaatacaaaattgaagatatttcacaaaagtgcaaagtttgtttctattgtcatagatgcaatgacagcttcatgaagagtgtgtgtatctgtgtgtgtgtgtgtgtgtgtgtgtgtgtgtgtttacaatcgtccttacactgaattcatttatcgtgaaatggtgggcagtcatggttgcagaactcagtctgcaatgcatatcaaacaattcagctttttcttgtgatatcatgattttcactattttgggggaagcacatcatttaggtcctctggtgtcattcattgtttccattattgcactaaacacaaaaaatacatgagaactgcaagagatttttttttttgagacagagtctcactctgtcgcttaggctggagtgcagtggcacaatctcagctcagtgccacctctaccatctgggttcaagtgattctcctgcgtcagccttctgagtatctgggattacaggcatgctgcaccatgcccagctaatttttgtatttttagtagagacacggtttcaccatgttggtcaggctggtctcaaactcctgacctcatgatcctcccttcttggcctcccaaagtgctgggattatgggattacaggcatgagccaccatgcccagccaagagattactttttaccatgatacataatttactgaagagactaactgctcactcaggagtttagaatcacacagcattttaagtatactcagcaacactggagctcactgaaataaacatattttaagtattcatgacatttcattttttctaaatttttttttttttttttgagactgagtctcactgtcacccaagctggagtgcagtggcaccatgtcagctcactgcaaccttcatctgctgggttcaagcagttctcctgcctcagccttgtgagtagctgggattaggtgcccaccaccatgcccagctaattcttatatttttaatagagatgggctttcactgtgttgaccaggcttgtcttgaactcctaacctcaggtgatgtgtctgccttggccttgcaaagtgctgggattacaggcgttagccactgtacccggccttttcttattttttttttcaatatttctaagctatgttgttcatctgttttctctaattgtcacaaattttctaaaaattttccaatactcatcatttatgttaaaagatccatatatattaatgagtagaccagtgcagttcaagcccatgttgttcaggggtcaactgtacttgttactgggaaataaacataactttaaggaataaaattaggtgatgtgtccagcttaccttcaaatggttcattaaaatgacatatacatataaacagagatacctgtaaaaacaaataggcaacatctaaacagttgatatatctggataaacagtagttcattgtattatttttgcacctcgtctataaatttgaaattacattaaaatgtaaagtcatacacataaaccaaccccatgccacacactccccctcaagaaaaaaaaaatagcttttagttcaaagtgtataggggatgaaaaagtacctcgagtgccagtctgatgtttaaacagatgtttcagtatcagtggtcggaaaaacaagaaaacatatatgcaactgaaagtctttttatattattgtgccagatttttaaagaaaacttgaggttctgagatttggtgcaatctgtcagtctcatggaagtaagctgtacgtttctacaacagttagcaggtgttcctgtatatagaagtaaaaagccacgagtcaaaatatgtgagatttctttcttcactaaatagtgcacattctaaacattctattccatctttattgcaagtcaagattttgcttctaattgaagaacgttttttggcaccaagtgtgaacgttacaaggtccaagagatgtatacctgagaaatacctgtgtctgttgcagaagaaaaacaacatatttcctcccatactatgtttaaaagtttcgggataaaggtctttcattcctgacaacacttggtattggcatgtatttcaactgtcttctgtttaatctcgcaaacagtcattttcaggcatatggtttttatcgtattcttctaatgcttttcttctgttacttttattttgctaggtattgggataagccaccttagggcacttttctttaaaagcatggcttttgtgttggagtaaattcatattttagttgagtgttaccttttgaataagtgtgtgtgtgtgtgtgtgtgtgtatgtgtgtttgagatggaatcttgctctatcacctaggctggagtgcagtggagcaatcttggctcactgcaacctctgcctcccatgttcaagtgatttccctgcctcagcctcctgagtagctgggactacaggcgtgtgccaccacacccggctaatgttatatattttagtagagaccatgttggctaggatggtctcgatcttctgaccttgtgatctgcctgcctctgcctagcaaagtgctaggattacaggcgtgagccaccgtgcctagccaggacagtagctttgaacttaatctttgctgtttaaaatgtatttacaggtcaggcatggtatctcacgcctataatcccagcactttgggaggccaaggcaggaagatcatgaggtcaagagatcaagaccatcctggccaacatgatgaaaccccgtctttactaaaaatacaaaaattatctgggcatggtggtgtgcacctgtagctccagctacttgagaggctgaggcaggagaatcacttgaatccgggagacaaaggttgcagtgagtcaagatcgcaccactgcactccatcctggcaacagagcgagactccatctcaaaaaaaaaaattctttacaaacactgagattttcacccagtagatgatgttaataaagtaaataaaaagcatttaccaattttatattaaaaaataaagatttctgacataggctaggcctggtttccaacacaagtatttataatcataatgacaaggtaggtttttcagagtatctgagactgtttgagccagttcataccctggtgattgagatactcatatgataactttataaaatacagcattttctctcatcttaatttttttgagtgaataaagaagtgatatttttaatgttgaaatactttgcctacaaagaaggaaggaaatattttgcctacaaagaaggaaggaaaatggaaacatgatggtaaaaaaatcgtaggctgtactcacaaattgcgccagtgtgtgtgatgaatgaagggggaattaagactaaaaaaatatttttgataacgtgttcagcaagttatatttttctttgtgtaaaaagtgactgtatttttgtgggagtaaagggtttaaataaacataccataattacaagtttccgttaatgagaatgattattaacttaataatttctttttacctaagtcaataatgttgtggatatacatgtgtataatgcataattttggtttatttgcagatcatgaagactatgatccacaaacagtgaggcttggaagtcgatacagtcatgttcaagaagttcaagaacgactaaacttccttaggtttgttttaaaccatcagtgctattcttttaaggcactgcagtgataaggaatgcagggttattctgtatttattttttctttttgagacaggatctcattctgtcattcaggctcaagtgcagtggggcaatctaggctcactgaagcctcaacctctccaggaggtgatcttcccacttcagcctcctgagtggcttgtgaatattttaacaatgatagagacaaaagcaacctctaactatgtataataacattactttaaatgggataagtaaagttgtctgtcctttaagccaaacctatgttccaaactgaatttactcagtaatacatagcttttaatgacatgtatttttttatgtatgtatagcttgagtattgagagatctcttagaaatgcagtttaccatactattgcaagaaaagtatttgaataagtatactaagaaaagttgccagaactatttatcagtgttttataaaatttactgaattcattgtttctctctattaattctgggattagttttctttttacagagcatgtaattctgtttgctgatcaatcagataatttatgggacaatatttatttgacataaagtctgtttttttttttattcagtcagttcataactattgaggattttacggtctgccagatagatctcatctttattataggatttcagtttgcaaaatattctagtatcaggttttctgacacttgtagtaccttttttttaaccacatagaaaaacaatctgcctcttaatattgagtatctcttccaaagtgagccattgtttttggtaaatgtgttccttaggtttattgggttggaaaaattagttagaatttattcattctattagtaaagtttagaatcagatgaccttccagagttcatattacagtactacagttaatcaaagggggaagctataagagctaatgccggctgtatatatttggccttgtgctaatcactttactcatcatgacagccttgtgaggcaggtgttaactcctcattgggattccatttggggaaaacaaagtgctttgaaatcacacagctggtatgtgatagagaccagattacccatatagaagtttttaaaagtgtctgccctatgacaccagtgaattttcagacatttacactgaaacgttagtttacaaactgctgtgtttcatcttgctggatctcttgttgctcatttataaattaggatgagagagattaggtagatttaatctaggtggtcccttcatgctcagcactcttacagagatattaacaacttaaaattaagatccaggccaggcgtggtggctcacacctgtaatcccagcactttgggaggccgaggtgggcggattacctgaggtcaggagttcaagatcagccaggccaacatggtgaaactgggtctctactaaaaatacaaaaattagctgggtgtggtggcacacgcctgtaatcccagctactcaggaggctgaggcaggagaattgcttgagcccgggaggcagaggttgctgtgagccaagattgtgccactacactccagactggccaacagagtgagagtctgtctgaaaaaaaaaaaaaaaaaaaaaaaaaagatccagaagaagaaaccttctgctattaaataaaaacaccacactctttttggaataaagccactgtcattttgttaactaagtgtgaagttattattcaaattaaaataaacttatttttcctttcattgtcattcacagaaatagtagacagagtgggtggaagagtgctaagagaaagtggaagccaaccaaataaagagactgcttaaagcagactaatcattgttttattgtagtgaactaataaatagtgaaacaactaaaaagctcgaggacatcactgaggacacactaatgattacagagatagacataatttttaattactggtggattttttgtttcatatggctagttatgagtgcaatattttcagaaatgtaagcagtttaagccgctttaaattcatggtgatatttagttatctctgaaagtcatttagtgtaataaccttattttgcaatgatataatttaagggagagctaaatcagtattgggtttcagaaggagagctgaaaatgaggagaagtcttcttacttagggcacatcacccagcaaagttgctggcattttgtagctgcctcatatatatttgttaaacaaatgtgaatacctgacacattttaaattccagatatgtgtttaacaaattattttgaaagaattcatatttttaaagctgtaattaaaatataattgtggtgaagtattatgttgtgcctgtcaaaacttgctttgcaggaaaaaactatgttgaccctaattactgatttatgtttctccaagatttttactgaaggatggccaactgtggctctgtgctcctcaggcaaaacaaatatggaagtgcttagcagaaaatgcagtttatctttgtgatcgtgaagcctgttttaagtggtattccaagttaatgggggatgaaccagacttggatcctgatattaataaggacttctttgaaagtaatgtacttcagcttgatccttcccttttaactgaaaatggaatgaaatgctttgaaagatttttcaaagctgtcaattgtcgagaaaggaaactaatagcaaaaagaagatcctatatgatggatgatttggaattaattggactagactacctttggagggtaagtgagtagtaagaactttcatatgccaacattgtacctgaggttactttttaaaaataattcaagagtcataattttgcctgagaatttcatggctatattctgttttgatgcttgtcctagaaatctaggtgtgcaaggataattgctcttctttaccttcttatattttattcattactggttttttctctcaccctgttgtactaacttagaatctgtcacccttttcagatgtatagaattatagtaggctgggtgcggtgtctcatgcctgtaatcccagcactttgggaggccgaggcaggcagatcacaaggtcaggagacggagaccatcctggctaacacggtgaaaccccgtctctgctaaacatacaaaaacaaaattatccgggcgtggtggtaggttcctttagtcccagctacttgagaggctgaggccaggagaatgatgtgaacctgggaggcagagcttgcagtgagttgagattgcgccactgtactccagcctgaggacagagcgagactccgtctcaaaaaaaaaaaaaaaaaaaaagaattatagtaaccctctacatgctgactacatcttctattctcccctcctttgtgaaagttattctctcttttttatataagatagatcttgaagtttatatgtatttgatgctgacatgaacgatggacagaagactattactaggatatcattatgaatcaatacctttattgatattgttcactttgtatatatttaaatagctggaataaatgttgcatgctcataaagctaactttcccatattaatagtgtaatatatcttgttgccatcttgatatatctaatctgttgtgtcacagcttatatttgggttttattatttacttattctctggacaaactttatgtaaactgagaagttgctacggtgttccattaaaaccagtggtttttgaaacattttaactagtagtaactcctatcaattaaaaaactatatacaggtagtggaagtaagagaggaaagcttgcatttctttgcttagtttcccattattcatttcctttctgtcttcaaactccccaaattttcattcctgaaatactctaaggtgcaaggattctaaacttagtttgaaaaacactgatttattaaatgattggtaaagatttacaaaaattgctggggccagcaggacagctctatgttaaatagtatttctcgcacctttttttttttagcatacttgaattaacccttgaaaacctatcagcttgactaacaagttgacaagttaaatattatcacttgaagtatttgtgtctttcattcttaagcaaacggctttgttcagaaaacttgtattttttattaatctttgaattcttaagatcccttattgtatattaagtatcaatcaacttatctttaagttattgaagattatattaaaaataattaaggatatgatttaaatttaaataccaaattaaactgtatcttgaatggttttaatactgtaatatttttggaaccaggttgtgattcagagtagtgacgagattgctaacagagctatagatcttcttaaagagatatacacaaaccttggcccaagattaaaagccaatcaggtgagaattgaagtgcttaaaaagatccacaacaattgggttaagttgttgggtagtatcttttttaacctgaaaataactagaaaataatctttaactcttgtcaaaaatattttttcagtgtttaatccacttttctcccttgcccaatgctgactaaagaaatgtttctttgataattatccttaggtgattgaaataattttaaatgtaattattcattatcgtacgttgagatggccagaactttgtcttagattggccttttgtctaggcatttgtttttttttgtctttttgagattcctgtctgtcacccaggctggaatgcagtggtgcagccacaactcagctacagcctggaactcccaggctcaagctatctccctgcctctgattataggcgcacaccaccgcaccagctaattttttttttcattcttcttgttagagatgagacctcactatgttgccagagctagtgtctaactcctgggctcatgctatcgtccctcttcagcctcccaaagtgctgggtttacaggcatgagccacatgtgcccgactggacattcactttttttttttttttttgagatggagtttcactcttcttgcccaggttagagttcaatggcgggatcttggctgtctgaacctccgcctcccaggttcaagcaattctcctgcctcagctttccgagtagctgggattacaggcgcctgccacaacacctggctaattttgtatttttttagtagagacggtttcaccatgttggtgaggctgatcttgaacacctgacctcaggtgatccacctgcctcggcctcccaaagagctgggattacaggcgtgagccaccacacctggccaacattcactttttaaaaacaaaattggtttatacttgctagtttcacgtaatcagtttccttttcaggaaacttgtgttttactactgggtaaatatgactatgattgagttacctttaaattgacattttactgctttttattagattgatgtcacatttcatttgtaaacaacctggattatctgtatttgtccattatttataggtggttatccatgaagacttcattcagtcttgctttgatcgtttaaaagcatcatatgatacactgtgtgtttttgatggtgacaaaaacagcattaattgtgcaagacaagaagccattcgaatggttagagtattaactgttataaaagagtacattaatgaatgtgacagtgattatcacaaggaaagaatgattctmcctatgtcgaggtttgtgtgaagttgatctctagtgttaatttacaattacttaatattttcttagaaatttacttaggaaagtaataataggttaaaaggaaagtgggggatattcttatttctgaattccaatattctcacctttaaaaacagctatatcttttttaaaaaagatgctttttgatagggtacatttttattttgatttatattttggtaaggtatttcactccttagttaacagtgtctcttttatttttccaagttgttatcattccttaagtgtgatagagttattttgcatttgatggtttttttatttgaacgttcttaaaaataaaattaagaactgcttattaagccagtatgagaaggaatatttttaaatggtgtttgctaaaattcctttaaatttaaaaactaattaccataaaataattagatgatctaatagtcagatattaatataatcataaattatatccaaattctatagcatgtgatacgaataataatcatataactaaatcatataagtataactaaagtcagttacttattaacaatttaatggcaattacagttttggggaaagtttacagaatgagcacaatcacgttttttaaaagtctgattccactttcttaactgaaaaaatgtaaaattgctttttaatactgtttattttgcatcttacctatcagaagagaataaagtaagcaagattataccaagataaatattttggggtatattttgacagaaatgtgcattttagcatttttgttgatatgttcaagccgaaactcatattccgtgtttgaaaatagtcttagtgagttgagttttgtggcatgaaaataactgaagcattattcatgtctgttgtgatctatcataagtaggaagctttttttcagccttcacagagataagattaacaacagaatttgattattgcatttccaagattgtgatgtttgttcactgtttaaaagaagcatggtgttctaaagatcctaaatacaaaataagttgttttaactgtcatcctctgacttaataataaaatattaaattttcagggttttttttagcagtctgctgaatatcattgtggttttttctttttttaaaattctttttatttacttatttatttttcagagcatttcgtggcaaacacctctctcttatagttcggtttccaaaccagggcagacaggttgatgagttggatatatggtctcatacgaatgacacaattggttcagtacggcgatgtattgttaatcgtattaaagccaatgtagcccacaaaaaaattgaactttttgtgggtggtgagctgatagattctgaagatgacagaaagctaattggacaattaaacttaaaagataaatctgtaagtaaatacagcttttaaataagtcatgaaacttaaatgttgaggctatattagtaagcctcaacatttattattaacgtattatttagtaaatgtctgttgggcatctaactattatgtacaaacttctgtgttggtatctagattataatcaccttgaataagatagatgtcacagaacttaaaggaaatacaattaaatggttatgttagacagtaatttttaaatgtatttctaaaattaaagcctaaggtgtattttaacctttcaatgtatctagttcccattacttgtagaaatgttttgccttgtctttgctaataaacacactgttattttcagctaattacagccaaacttacacaaataaatttcaatatgccatcaagtcctgatagctcttccgattcctcaactgcatctcctggaaaccaccgtaatcattacaatgatggtcccaatctagaggtggaaagttgtttgcctggggtggtgagtaattctctattcaaaatatgaagaaatgtgtagaatagttctttttctgaggagcttcatagatttatagagattcataaatgggtcaaaatgtcaacggtatagtcaactgttaacttctgagtgaatttcttagttgtaggaatttataataaaattatgtaggtagaattaatctgttatagcttacgtatggtattaaatatatagctctagaaggtactactatattttcagtcttttaggatagttttaaagaaaaataggatgtattattttctatgattcttaraaatacatctcatatgtaaaggaacaacagcttctacctttcttagcctttccctcagcctcttaaaaattatgcctacaattataccagtcacttcagcattagggaggtttaagtctctgaaaaaattggattaggaatttaattcctgagggagtgaggtgccttttgtataatcagcatctgagtactatgtgaaactacagtttacaaaaaaatcgaaaaactgttgcaatgaaattactcaaagtatattagaaagcttaatatgtaatgtataaatttgcatgttgaatcaatggatttatcaatgtaaaaatagtcatttggggtggtataaatggtatatccagaaatgtgattgaccaatagaaaccttatttgaaggatagagagtggataaattttcattaacaaaaaactttttgtagcacaatttgcaggtaaatattttgtatattctgtattctagataatgtcagtgcatcccagatacatctctttcctttggcaagttgcagacttaggtagcaacctgaatatgycacctcttagagatggagcaagagtacttatgaaacttatgccaccaggtaagaaaatggtccatccccctattccacagaaaggatgctcataactacatgatggatgaaaaagaaaatattaacaaattctgtttgcaaatctaatatactttgtggaatagtctctaatgttgaacatgtgtctttcatagtgttgctgatgaaaatattttcatggatgggaaaatatttaggagcatgtaattttcatgaaatacttctagaaaactaatacttcagaaagtcagggttctttcaaggctcccagtgatgaacaacagtctcctacctcatccatctatcaaagaaaactcaccctcaaggtttacctttcattactggatataccactttttttctaagcactatgcccatgctatttttgtgtgtcaggttttagacattaagtattgacttgtgaaaatgtatttcttatgcgttaccgcatccttactctctggtcatgtcacagtttttgtttaaatctatatgcattgttcacatttttaacacaatgtgaaaatactacaatctcctaagttactcacacatgattatactagattttaatattgcctttatcatttgcttggttttcttggtgttaattactaaattttctcatactccttccagtaatttcctacaacaattgttcatgtggtcagatctgttatatcatgttttcttggagcatttcatcttcctgctgccttgtgctttgttctctttgacacagctatcattctgggacttctgtatacagcctttcctttggtggtcttctggtgctccttggtcttgcatctttcttgagttaatcttcattttgccgaagcacaccctcctaaaaatcgatacatggaaaacaagatttttttgttaagacattacttttctgaatgcacctaaactctcccacatgcagtagtttattatttggttgttttgtttttttctatttttttacttggagttggttgaacatagagctgaaagtagaacatctgcagtttcatggcaatattggctgctgggaggactgaacctgttgtgtcttaactttctgtctagaagctttgtttttaactctttagttctgaaatctaatgatgaagtgccttggaatggtagttttactttgatttttttgttgtttgttgtgtgtactaagtaatcaacagatcttgttagttgaaagagtagtttcttcagctgtgagaaattggtatttttgtataaatagcatctgattttgaacttactgtcattaaatggcttgtatttcttggcctacaaatgagccattttccagctccaagactaaattggccatttacctgatcactgatttcttttagtgtaacatgttccatagaagataaaatatgggctctctaacatataaataaaatctaccatatgtatatgtctatagatgtgccttggagatactgtggtttccattaccataccaccacaataaagtgtacctctcaataaatcaagtcagacaagtttctttgtatcccggtgcgcataaaagttttttacactagtataaaactaaaagttttatacactatacacataaaagttttttacactataaatgtgcaatggcattatatcttttttaaaaggtatacagcaattaaaaatacattattgctaaaaaatagtaactatcttgtgagccttcagcgaattgtaactttttgccattgaagggtcttgcttcaacatcaactgctgctaactgatcagggtgatggttgctgaagctggggacatctgtgttgatttcttaaaaggagacaacagtgaacttttctgctattgactctcctttctggatagattcccatgtagcttgggatagtattttatagcatctgaccccaagtaaaacttatttcaaaacttgagtcagtcctctcaaactctgctcctgcgttatcaactaagcttatgtagtgtaatattctaaatcctttgttgtcatctcaacagtattcatataatcttttccaggtgtagattttgtctcaagaaaccacttcgtttgctcagccatgtgaagcaagttcatctctgttaaagttttattgtgatattggcagcaattcagtcacatctttaggcttcacttctaattctagttctcttgctgtttccactgtatctgtagttccttccccgactgatgtctcaaagtcatccaacttcttccaaactcccagtaacgttgttatattgaccttttcccatgaatcgtgaatgttcttagtggcatctagaagggaaaatactttccagaaggctttcaacatagtttgcccagattcaacagaggaatcactgtctatggcagcaacagccatacaaaatgtaatcctttttttttttgagacagtttcactatgtcacccaggctggattgcagtggtaccctcttggcttactgcaatctccgccttttaggttcaagtgattgtcctgccttagcctccagagtggctgggattacaggtgtgtgccacgacgtgcagctaatttatcgtatcttttgtaggaatggggtttcactgttttgaccaggctgggtcttaagctcctggcctcaagtgatctgcctgccttggcctacccaagttctgagattatgggtgtaagctaccacacccagctattcttaagtgataaagtgaaactcacaattactccatgggctgcataatggacattgtgtcagcaagcaatgaaaacaccattcatttccacatacatctccgtgagagctcttgggttgccagatacattgtcaatcagcagtaatacattcaaaaaatctttttttctgcatagtaggtctcaacagtggcttacactattcaataggctatcctgtaaacagatgtggtgtcatccagcctttgttattttgcttgtagggcacagacgaagtagatttcgcgtaattcttaaggaccctaggattttcgggaatggtaaataaatattggcttcaaattaaatttacccatgacattagcccctaacaacagagtcagcctgttttataaagcctggaagccaggcattaatctctcctttacagttaagaaaggtctagatggaatcctcttctactacaaggctgttttgtctgtactgaaaatccatttactgtagacaccatcgtcaattatcttagctccatgttctaggtaacttgctatagcttcacttggtgcttcaacttgtacttttatgttttagagatcgcttcttcccttaaacctcatgaactaacctctgctagttttaagcttttcttctgcagctttcttttctctcagcctttatagaattggagaaagttagagcttcactctggtttaggctttggcttttaatggaaggcgtggctgttattgatatatccagacagctaaagctttcttcttcttttcaataattctgtttcattttctaatctttcctatgtgtagtggagcaacacttcattttcttcaagaacttttcctttgcattcacaacttggctaactggtgtaagagatccagctctcagcccatttcagcttttggcatgcttttcttactaagcttaatcactagcttttaatttaaagtgagagatatgtgacttcctttcacaagaacacttagaacattgtagggttattaattggcctaatttaagcattattgtatatcagggatagggcggcctgagaaggaggacagatggggaaagaccagtcagtggagcagtcagaatgcacacagcatttattaagtttgctgtgatatactggtgcaatttattgtgccctgaaacagttacaataggaacatcaaagactgctggttacagatcacctaacagatatgataataatgaaaaactttgaaatactgtgagaattaccaaaatgtgacacaagacacaaaatgaccacattctattgaaaaaatggtgctgatagacttggatgcagggttaccataagccttcaatttgtataaaacacagtatctgcaaaggatagtgaagtagagcacaataaagccaggcttatctatctatctatctatctatgaatgagatcacaccattacctccaattttagttcagttccacaagcttctttttgtttcttttctctttccctatacgaaagttttgtctccaggagtgagaaacctggctgagtattattctttaatatatttacttgtttgattaatcctatagttaccaattatttatcttctctaccaaccttttccttgcctagataacctcctcttcacttagctctggcttcagcctctaatgccaggctgccatgcaacatacaatttaagcagagtactactagaaataagagttactgactttgtgtataatttggatggcccaggtagatgcctcactgtgaccagctcctgttttggaagatattaagtatgcacaaaatgaaaagagaaattgttggcttaacagcattgagataaagcaagtgaatgatagaatattctgaaacagagggactgccatataggtggaacataaaaagcatcagcaggtgatgtggtctgagagcattacaaggatgggaataggtgttccctttttatttcttaaggtagagctgaaagcttttatgtatgtagcactcaagctaatggtttctttctttctatctgaaggttatacttctactctctggctcttcttgcctatgagggatcccatctgccaagcttagcttacacattatactaatattatgaccctctttgccgattggaaatgagctaattggtattatagaaatgtgttgttatacaacaagcaagcttatttctccagcgcctgtaccgagttttgcttggtttcttctgttttgcatggtcgcccctgtccactgaatcttttttttcttctattaaaatataaccaacttttgacattgtaatagttttaaagtcatcatgaataatacagagtgcttccatatacacttccagattcagcaactgttaaaatgttgtcacacctgctgtatcattctttcctccatataattcttctaacatttggagaggaagttacacataacctgtgtttttacctaactgtctcagtgtgtttccttagaacaagaacattctcttatataaccacagaagaatttatcaatatcaggaattacaacacctttgatgatattgacattgttgaaaaagaccagttttgtacaatatttctcaaattgggcttgcatgccttctgactattaccatcaggcaattcactttttaaaagaaattgtggaaaagttaccatacagtttatcatcttaaccattttaaattgtatagttcattagtaataagtgttttcacattgttgtgcaaccagtctccagaatttttttcttcttacaaagctgaaactcagtacccactaaaaacaactcttctatttcttcctgctcccctaccctcaaagtcatcattctactttctctttctgagttttactgctctacgtagctcatgccaatgaaataatacagtatttttctttttgtgaccagcttgtttcgctcagtaatgtcctcacagttcatcatgttttagcatgtggcagaattgttttgtttttaaggctgaataatatagtgcggtttgtgtatactagattttgttgatcccctcatctgttgatggacagtaaagttgttttcagcttttgactaccatgaaccatacttccttgaatatttgtgtagaagttttgttgggggcttatgtttgcattctctaggttttatatctgggactcaaatggctggatgacagtaagtctatgtttaacttattgagagctaccaagtttttccaaagtggctgtaccactttacaatcctcccagtaaggtaggagtgttacagtttctcctcgtcttcaccaatactacttaaatgtttttttgatttggttatccattctactgatgttgaagtgggatgttaatatggttttgtttgcatttctttgatggctaatgatgctgagcaatttttcatttgcttcctagccatttatctatttttgaagaaatgtctgttaacatcctttgctcatttttaattgataatttgtcattttattattcaattatatgtggtcaatgcttgtattatttctctttccagtttttggttttgggttttttttttcctttctgtctgcagtggatgaaggaggatttattgatctgaactctctggataggaaacccttcccttcatattttgtgttggcagttaaggagtcctgattgatcactaatcagtcagttcagttctagttatatattgtaacatttgatctcagcttaatgagatttgtggatataatttttatttatttaagataatactcttcaaaatggcaaatgtgaaacattaataacacatgagttacactttattttagtctgtgtctttttcctttgcagatagaacagctgtagaaaaattacgarctgtttgtttggaccatgcaaaacttggagaaggcaaacttagtccaccccttgactctcttttctttggtccttctgcctcccaagttctatacctaacagaggttggtttttgcctttgcaaaaatgtaatttttatattatacggtaatgtgaagaacactgataagactgtaaagaaagttttttaaatagtcgaatttcttagcaatgatcagaggagaaatagatgttactaagtttttttttaaatcccttttaatatactctccttttttttttttttttccaggtagtttatgccttgttaatgcctgctggtgtgcctctaactgatgggtcctctgactttcaagttcacttcttgaaaagtggtggcttacctcttgtactgagtatgctaataagaaataacttcttgccaaatacagatatggaaactcgaaggggtgcttatttaaatgctcttaaaatagccaaactgttgttaactgcgattggctatggccatgttcgagctgtagcagaagcttgtcagccagttgtagatggtacagaccccataacacaggtaataaatgttaagaaacttttaaaaatatttagtccttactatttaataaatgtaaactctgtaataattattaattattactatttaataaatgtaaacttttaagtagatgatggaaataattcaacagatagcatattatcttagggatttttttgattaagttgtatttatattaaaaatgtaaagattgactgttgcctatcctactttgagtgaacttcccagtctctttaaatcattttttactttcagttgtttaaagtgtaatgaaaacttcacctgaatcttttgttaagtcataccaaaaagatacataaagacagttcgtcataaaggagaatatataattgccatgcagcaaacctctcttcccacaactgtgaatctctttctcctttgctgttagccttgagcagcatcaccaacagttctcaagaagtgcttagattggatgcaaaagatgaattcagttctaactaaattgagttcactcacttatgttataaaggatggttttactaattactgcttgaagataaaatggttcagggatacagattattacatttagatatatgtgaggtgttaattagggaaatttggatagtgactggattatctgtatattctagactgattaattttattttgggtatgagtcatgctgtcattattgacctaagataaaatgtctcaggtttgcttcaaaataattctggggtaatataattctgggtttgtttcttggggagtcagtgaaacaagtttaaacatttgttaataattattgaagctagataatgggtatttgaggatgtattatattcttttatctgcttttatatattttttgaaatgtttcattcaaaaaaaggacaaaaagaagaaagtggtcttgtacatgtcaatttagatattaatttacaaagctctgtctccatcctgagtaagttttattgctttatattgtgggcttcatgcatatttacataaaaaaaggtagggttcttattatggtccttgttatgggagtttactgaaatacaaacaagatattttttgtatstttttacatatttctttctgtatgcatgtttaagaagtgtgctaccaaaggacacagagatacataataatctctaatcatattctggtaaggagcttaaggaaaattagtctttaaaatatgtttaatgtacgactgtctacaatacgtacaagaggttaccttttgagaaattggaaaacgcaaagaaaattctgaggggtttctctcatagatttaaaagctttttatgctattaagtaagatgttgtagtactttctacacattccacacttattaatccttgattactataattcctttccatggagaagttatgaatagagaatatttggttctgccagtattagagtaaacacagttatttttgcattttggagcactcctaatccttcttttgctactgagttgaattagagagttaatatattaccagtaatgttaacaagacaattttggtgtaagaacaagtgacacaagactttgctgacatgaaaaactctagttggattagcaaaattcaatttgcagttttaaagcattgtgtaactttttattcaacaagtaattgatattatgtatgtacttagtacctagtataaaacagataattgctagagatgcatgtagacctcacataatttctaaatttattggatattaatggtcaaaatatattgagctgtttcttgtatgccagtcactatgctttatctcctttaatcacgaagacagctatatttgttgagcctctgctattactttctatttagtaagtgaaaattgagacctggagccatgaagtagcttggtccaaaatgataaccgtcagctgagatttttttttttttttttttttttttttgagacggagtctcactctgtcacccaggctggagtgcaggggcgccatcttggctcactgcaagctctgcctcttgggttcaagtgatgctcctgccccagcctcccaagtagctgggactcccggcgcgtgccaccaaacgcggctaatttttgtattttcactagagacaggtttcactatgctgggcaggctggtctcaaactcctaacctcaggtgatccacccacctcggccttccaaagtgctgggattacaggcatgagccaccacgcccggccagctgaaatttttaattccatgaggccactgacttggaaactatatttttaccacctttgcaatactagtttttttgtgtgtgaaattttatgtagtatcacttggcaaattgtttgtgaaaactttattgaaaaatgaaaataatatgtacataacagttaaattttaaaattcgttggttgaagttggaaacagtggctggaagtatttgatttgttcagtcttaacgctttgaccgcctgacagttgcagtaacatctcccccaggctctcgaatctcttaaaatatctgttttaatatggtctttttaaactttttttaaactttaggccaggtgtggtggctgatgcctataatcccagcattttgggaggcctaggggtgaagatcacttgaggtcaagagtccaagaccagcctggtcagcatggcgaaaccctgtctctcctaaaaatacaaaaattagccgggcgtggtgatgtgtgcctgtattcccagttactggggaggctgaggcaggagaattgcttgaacccaggagggagaggttgtagtgagtcgagatttcaccactgcactccagcctgggtgacagattgagactctgtctcaaattttaagaaaataaaataaaactttactgtgtaaataacagcggtagagaggataataggttaagctgcgagaagctttagcctgtctgtgaaatgagcattagaatgcaggtggcataatcagccttgggcaaaataagtagcttcctaaagactaagtctgtagattttaaaggactgtttaatggtatcctcagttttctccattgtattatggtaggcctagtcacctgtggcaaagggggaccaggagaagtttctacccagagacatgttgtatcatttatcccctgcaaatgagcccaagtgcagaaataatagaattcatctcaaattggagtttccagggtgttactacgtgtgtagtttatttcactttgagtaatattcgatattcaaggcatggtaattccacattttgttaattcgtttgttgatgggcatttggattgtttctagttttggctgatgatgggagtaaaactgttaggaaactcatcaacatatcatagagcttctgtggatatatggttttatatctcttgggtaaacacctccgtacgtctatcactttgaaagacagctccataatgttggcaatgtgaaataatttttatgcaaacccccataaactccacaggggtaagtgaaggaataacatgccgaggaagtggtgatggatgaggagtaaaaatttttttaatgtaaaaattttagggattatggtatatacagttttttcatttgacgtaaaatgattcacttttttcagattaaccaagttactcatgatcaagcagtggtgctacaaagtgcccttcagagcattcctaatccctcatccgartgcgtacttagaaatgagtccatacttcttgctcaggaaatatctaatgaggttagtatgaaagttagacagttctgggatcttgaatgatctctacttaacacgtaaataaattaagctatgagaatttgaggctaaatattgtagacccaaaacactttagtctctatctcaatttatttaaaatttcataaagttatgtttgacctgatagctgctgataatattaatattagagctttagaaattttgaaatttttaaataagctttctgagttataatttacattgcacaaactagatcaaataagttttagtatatgtttaaactgctcacacaagcaaggaataggacgtttataatggctccagaagttttcttgtgatgtttattctcttaaattttacataaatggaatcatatacgttgtactcttttgggtctggcttatatccatcagcaaaattttgaaagttattcatgttgttatatatgtgtgtagtttatttcactttgggtaatagtccatgtatggttactccacatgttgctaattcattcgtgtgttgatggacatttggattattcacaacagtctagttttgactgttgtgaataaaatttttgggtaactcatcaagtcatagtgcttctgtggacatacatttttatatctcttgggtgaacacctctgcatagcatggctaagtaatttgactgttgttatttttaaaattttatgaaaaataggataaagccatatcagacttgaacctgaagcatacttggtgggtattgctgtgtcttccgttcatatgggaagccatattttttgacttaatgttaagatattaaaaaaatgagaacaagggaactttggtccttaaaggcaggtctgatgcatgtttacttttacttccatttccacttctttcactaagagaaatattttgttttcctgattattcactttaatgttctgccagcacttttaattatttatttcttttctgcaggcttcaagatatatgcctgatatttgtgtaattagggctatacagaaaattatctgggcatcagcatgtggggcattaggactagtttttagcccaaatgaagaaataactaaaatttatcagatggtaagaattattacagaaatagatttttaagaaaatgttgcttcattgtacatgtgattaaattttcatcatttctgtcaccttatagaccaagtcgcttgtatctaatggtttaaaatttattgctacctataaataaaatgagaatatattgttttattttggaaataaaatactctagaagcctgctatgaggcagctttcttttcctacttttttaaaaagacttctcattgactcaaatatagttatactgtaatgaatccacctctccctattttctttagttcttcttgattttgtcctgtgtaaatttttggtaattgtctctttgggaattatggcatttaaattttacctggcgtcgggcacagtggctcacacctgttaatcccagcattctaggaggccaaggtgggcggatcgcctgaggtcagtagttcaaaaccagcctggtcaacatggtgaaaccacatctctccggcaggtggggggcgggggaagggggcaaattagccacacatggtggcgcatgcctgtcatcccagctacatgggtggctgaggcatgagaatcacttgaacctgggaggcagatgttgcagtgagtggaaatcctctgcactcaagcctggtgacagagcaagactctgtctcaatcaatcaatcaatccattttacgtggttcttttagaacactcaacagcaggaagagtgtctaacatttaggtattatcaccagccttgtggtacattaagcaagctatttacagaaataagactgtttagctctttgttgtctgtggtgtttacctacccatatagaaccctgatggtctccattaaaatatacattagtgtatttaaatatacattagtatagttaaaatgagaaagtgtgtcatggcattatacaacttccgttttaggaatagttgaatggttattctgttccaaacgtacaagtcttagttacattttgatggatagtgacagattaaaaattattagctacctagttatattttaggttgcagaagtcttccataggcttcctgaacatttgtattatgatcaatttttgaatgaaatgacttgtaggtaggctctacaatagaactactcaaagacccaaactgcagtgccaaagtgattctgtagtagcagttatgattgaggcagatcagtcacatccagaagaacatgaaaagtgaggagtacctatcactgaatgtgcttcttaaatcccccttggagtatatcccaaagagcctctctagccgcaagtgaagagtctgaggcygcatggtctttaccaagtaggcaattgtaaatgttaaccagagggtttgtgaatttcttcttgaatatgtctctaggtaacttgctcctgattctaattttgcagaccaccaatggaagcaataagctggaggtggaagatgaacaagtttgctgtgaagcactggaagtgatgaccttatgttttgctttacttccaacagcgttggatgcacttagtaaagaaaaagcctggcagaccttcatcattgacttattattgcactgtccaagcaagtatgtgatttttatgtgtaatttgaaggaaggcttaccttaccgttccaagcagaaatgaatgacttctgaagaaaatttttttccagaagtgaaggaaggaacccttttacttgcccatgtaataccttgaagtgtagaagcatttttttaaaaacatttccagttaacctgaatttttttctctgcaagatgccagcattgatttttttcttttacttttttttattgtagtaaatcatgtaattatatacataacacaaaattagccattttaacctcttttttaagttagctttattcagtggcattaattgcacaatattgtgcagttatgactggtgtatattgaatgattgcaatattgtgcagtcactcctgctttatctcaaaaatattttatcaccctcaaaatattttatcaccctcaacaaattctttttaactaatgactcccattttcactaccctccaatctctgataacttaaaatattcatttagtttctatgcatttcctattttaggtatgtcacataagtgaaatcacacaaatttgtgcctttgtgtctagtttgttagcttagcataatgttttaaaggttcatctatgttgtagcatggtcagaacttgattcattttcaggggatactctctcatatgtgtatactagatgttgtttatacatcggtctgttgatagacacctggattatttctaccttttagctcttgattactgttattgtgaatattactatgagcacagatctctgagttcttattctcagagctattgagtatatttgtagaaatggatgtgctgggtcatagggtaagttgtgtttaactttttgaagatctgctgaacttttttaacattggcttcaccactttacactcccaacctcaccttacacaggctttagtttctccaaatcctctcccacactattttcacttttgttaatggccatcctaacgtatgtaagatgtaacctcattgtggtttgtatttacatttccttatgactattgtagtgatattgagcattggctcttgtgatattactggccacttgtatatctgctttagagaaatgtatcttccagtttttatagcattattgaatttgattatttttgtagtgagtttctgtatatattctggatattaattcctttccagactaatgatttacaaacattttctcctattcttcaggatttatttccactctgctgataatgttattttatgcacagaagtttttaattttcatgaagtttaatttatgtcttttttggtttcctgtgtttccatcatcctcagtatagaaatcattggcaaatccagagcaaaagctattttctcctacattgttttctaagaattttttatttttatagttcttaattttagatctttcatccaattggagttgatttttgtgaatgatgtgaaactaagtgtccaactccattcttttgaatgtggatatccagctttcccatcatgatgaacatggtcttaccccattgagtggtctaggcaccttgttgaagatacaaggggttgtttctaggctctaaattatattcctttggtctatatgcctgtccttaggccaatgccacactcctgattagtacatcagggaatataagtccttcagctttgttggggtttttagtttgtttgtgttttggttttgcctaggtttttatttgtttttgaggttatttggaccttctaggttctataaaaatccatataaattttaagctggatattgcattgaatctctctcaaaagagtgattgcctcttaacagtattaagtcttccaagacatgaacatgggatgtcttttcatttacttagattctgtttacttcttcaacactcttatttcttctctgcgaaattatttctaagtactgtagtgctaactctttttgctgctcttgtggatggaattgttttcttaattttgttttgggatattcattgctagtatatcaaaacaactaatttttttatattgattttatttatcctgcaattttgttaaatttctttatgaattagaggtttttttacagtaagatcatgccacttgcaaataacatagttttactttttctttcctttttggaccaaatttatctcttcccttttttgcctatatgctctactgccttgattagtagtagtaagagcaggcgtacttatcttgttcctgattgaggaaaagcttttagtctttcacgatttagtgatgttgttattcctgatccagacccctagagagggttcctggacctgggtcaagtccacagagtaaaataagagcaagtttatagagaagtaaggaaccaaaagcacggctactccataggcagagcagccctgagagttgctagttggttatttttgtggtgatttcttgattacatgcgaaacaaagtttatttgtgctaaacaagtggattattcatgggttttctgggaaaggggtgggaatctgctgctccccactcccaacccacctgatggtttctcccttttttgaactatataggataaagtctggatggttgccacggtatttgtaaagtgatatgacgctggtgggagtgtcttttcgcaagctaatgcattatatttagcgtacaaagagccagcttctttactgcatcctgttttatcagcagggtctttgtgacctgcattttgtgtggacttcctgtgggagtcgctctggttcgaatacctgtgaccatgttagctattagtttttcatatacggcctttatgctgttgagaaacttctcttgtattccaagttttcaaaatcagttttattatgaaaaggtgtttacattagtttggataatttttttgactcaattgagatagccttaagccttattttctttattgtatttctgatgatactgttactggaaaagattcctgatccagatcctaagagaggactcttcggtctcatgtaagaaagaattcagggtgagaccataaagtaaaggcaagtttattaagaaagtagaggaataggccgggcacagtggctcacacctgtaatcctagcactctgggaggccgaggcaggcagatcaccagaggtcaggagttcaagaccagcctgaccaacctggtgaaaccccatctctagtaaaatagaaaaattagccaggcatgatggcaggtgcctgtaatcccagctacttgggaggctgagacgggagattgtttgaaacctggaagacggtggtgcagtgagctgagattgcaccactgcactccagcctgggcggctaagtgagactctgtcaggaaggggtgggggaggggcaggggaaaagaaagtagaggaataagaaaatggctactccaaaggcagagcagccctgagggctgctggttacccatttatgtggttatttgttgattatatgcaaaacaagggttgggttattcatgctttccatttttataccatatagggtaaacttcctgacattgccatggcatttgtaaactgtcatggcgctggtgagactgcagcagtgaggatgaccagaagtcactctcattgccgtattggttttggtggggtttagctggctttcttactgcaacctgtttcatcagcaaggtctttatgatctgtatcttgtaccaacctctgtctcgtcctttgacttagaatgcctaaccctctgggaatgcagcccagtagatctcagccttattttacctagcccctattcaagatggaattgttctggttcagaggcttctgacaatatattaggaatcaattcatatgtttaaacacccttacgttcttgataaatcccacacttcatcgtggtaccttgtacttttaatatgctgctggatttcttgctagtattttattgaggatttttgcatgtatattgttgtcaatgaaaagaatcaaactctatagaatatttgaagagatttattctgagccaaatatgagtgcccatggcccgtgacacagccctcaggaggtcctgagaacatgtgcccaaggtggtcggggtgcagcttggttttacacattttagggaggcattagacatcaatcagatacatgtacaaaatacactggtttggtccagaaaggcgggacaactcaaaagcgggtgatgggggcttccagggtataggtaaatttaaacattttctggttgacaattggttttatgcaaagacctgggatcatagaaagcacatgttcaggttaagataaaagattgtggagaccaaggttcttgtgaagtctttttacagtggctgcccttagagacaataaatgacaaatgttttttattcagatcttgaaaaggtgctggaccttcagttaatctctttaggattgacagggcttggaagaaaaacacttggctatattaatagagattcttaacagatgcaggttttctcccacaaaggaaagctttgcagagctgtttcaagatatggctaagaaacatgttttggggtaaaatattttgattttcttccttgtatcgtaatgttatgccagagtcagactgaaaagtaagtcacgatatatagggttaaataaaagccatctgatgaggatttatgatttgtagggaatgactccccagaccctttagacaggaatttgggcaacataaaaagtcagatcttcgtcctcattgttaaaaggtattgtgttggtctctactttccccttccctccttcccttcctttctccttccctttttcttcccttttgcttcccttctccttcccttccccttcccttcccctttcccttccctcccccttcccctccctctctccctccctccttccttccttccgtccttccttctttcgaaaaaatatttgtctagctttgttaggtgaatagtattggtcttataagttaagaagtacaggttgagtatcctttatttgaaatgcttgggacttagaagtgttttggattttagaatgtttgcatatcttggtgatgagaaaccagtctaaacaggaaattcatttatttttcatctatcttcatgaaggtaattttgtgtattcgttttgtgcgtgaaacaaagattgcgttaagactgagggatggagtttttcacttgtgtcagccctcaagtttcaggttagagaacacctctaatttttgttattagcgatggtcaacctgtactgtcttgttttaaaataaatgattttggaaaagggaaaaatttgttttaatttgaacatttggtagatttcaacagttgaacactctggtcctggtgaaacagctacattgtctggtgtatacaccctggaggtcatggtcatacaccaggaagatataagacatggacacacccaaggtgttcaggagcggaggtttaatagacagaagaggagagaaagagaagcagctgtctctatagacagaggggtctccaaggggaaaggactggctggcagccgatgtgctggattttctagcccagtttgaggaggctgtgtctgatttacatagggttcacagattggtttgatcagctatgacatttacatagtgtgtgaggaaggttggttgccccaccctaatttttttttttttttttttttgagaaggggcgttgctctgtcccccaggctggagtgcagtggtgggatctcggctcactgcaacctccacctctcaggttcaaggaattctgcctcagcctcctgagtaactgggaatacaggcgcgtgccaccacaccaaactaattttgtatttttagtagaaatggggtttcaccatgttggtcaggccattatggaactcctgacctagtgatcctcccgcctcccaaagttgctgggattacaggggtgagccacgacatccagaggccccaccctaaggttattttgcatattgggctgtgccagttgatcggagccatcttgtctgctcattattgtacacatggctggcagagaagggacaatggagctgccatcttgaacatgtctagtccctgttcctgccggccttcacctgtgcaagcttccagcttgcttgtctatgtctgcaactcgactttacaggccgccatttgttggtaaatgatttggggctgctagtcatgaaaaagagccttatggaggactcccacacccttactctctgcctgagtaatttcttcttaactcctgtatcactggggttttctttttaatagatgtgagcttgtgaaatgagtttggtgtttgtccctttttcttggagtagaacttctaaaatctttggaatctccaaagtgttgtctctttatatgctagtgttgactggaaagaggaagacatgattatgagagacaggactagctggatttcctaggctgactaagaattcctaagtctatctggggaaggtgactgcgcccacctttaaacatggggcttgtaactcagctcacacctgaccaatcaggtaataaagagaagtcattaaaataccaattaggctaaaagcaggaggtaaagaaatagtcaagtcatctatcgcctgagagtacactggggagggacaatgatcgggatataaactcaggcatttgaatcggcagtggcaaacccctttgagtcccctcccgttgtataggagctctgttttcactctgttaaataatcttgcaactgcacacctttctggtctgtgtttgttctggctcaagctgaggtttccctcgccttccaccactgctgaatgccgccattgcagacccaccattgacttccacccctccagatctggcagggtatccactgcacttctgatccagggaggcgcccattgccgctcccgatcaggctagaggcttgctactgttcctgcgtggctaagtgcctgggtttgtcctaatcgagctgaaaactagtggctgggttccacggttctcttctgtgacccatggcttctaatagacttataacactcactgcatggcccaaggttccattccttagaaactgtgaagccaagaaccccaggtgagagaatggaaggcttgctgccatctttggagcagcctgccaccatcttggcagctctaagaacaaagacccaccgctaacagagagttgggatgctcagccccacggggcagtttctaggaaagaagagtgagtggctgaaggtcaagttgaccgccggtgaccagaatattatttaatcatgcctatttaatgacgtgtccttagacagacaagaagacaggcttcagagagcttctagatagctgaacatgtagtttcctggagggtggtgtgcacataaaagcagacatcaagaaactttaatgccaaatgtaaggtagtttgttttgttttgaaaggagtttctgcatttaagtgtgtcaagaattttcacatattaaaaatactccaactgaacctaaaaactagactttataaacattataacttagatgtttatactggaacaggaattaaaagaaattaaagagtgtgtaagcaaaaactcagttgtatgtaagaaaacccaatttcccctgaggaagagaaagagctggagtactttaaaaagtaactgcctgtttttctgtggctagtgagccttatttcttctccttttcaaggcattgtgaagaccctggttctctagctgtgcagctgcaaggtcactagacagataaacttaaatcgcaaaacatgtttttccttggaaagtaagaaatgatgtaatgcatgtctcagttaattgaaaaactgcctttgtttctcacttctgtaatgcttccccatgcacagatctccccccaccccaagaaatgcttaaaaggtaacttaactctttgttcaaggctcagtcctttggatgtcaatccgactgggccggagtacctaagtaataaatatcctcctgaaccccattggtttctctgattccttacaaaatcccgcaacaatacctaaacgattccatgattcattaatattgcacaagaagttttattctagagtgataatggtttcttcatgttaactgggtaagaacaaggtatttaaaaacaaaggaaaatcgatatgtcagcatgaatcctaagtgtatgtttggtttgcgggaatgatcttcagtggaatttttgtcagaaatatttattctaaaaaataagtcttttgatttagaattttctgtctctgaggtattttgtatcttcataaagacaaaggcagtatctcagtttctgtgtatctatttgagggaggctgcttcatacccttttagactcggcattctaggaggaagaaataagaaaaacaaacatcatttcagacttttctgtcatccaaaagtaataaaacacaattgtggtcttttatatatcactggctgtagataaaaattagagcttccaagaacagtctagtgctcaccagtatgcttttatatttgggtgtatatgtgcataaaataatgacatttgggcaaagaagctttgtcgttacttattttaaagttacagtgcttaaaaatgccttgtaatattaaataaggagcttggatatttctagtcctgcttccaagtgttagctatgggtgaacttgtttcaggctatgaggctggattagggcgtcttgtagctaatgatgtattctgctcagcccagtactagtgtcatgagcagacagactgacaatcaaaactgatagattttcttctgcacatacttttaacacagattctatcccttgtgcgaagccccagattttcttcagctgttcacactctcattggcctgttccaactcaatcttcacattacagtgcacaagggctttggattcctcaagcacaacaggattgtaggaggcaagctccttaatttgaaccataaccttctgagtgaaaggtgtcgtccaaaacgcctgagagaccaggcatttggtacacgcctccaaacaccaaaggtattggaagccacgccttttcattagcccaaaccacatcacaaagaggcagtatggatgtgacgagtccaatggctgggccattgactgatgaaataataggcttcttaccctaaatgagagtattcacaaagttttcgctagtgtccactcttttaatgctttccctttttctatcatttcttaaatgcttcacaaagaacacaaaatcaaggccacagcaaagacactgtcagctacgctgagtagcaggagcttgctgtcattggcagcagccctattcagagtaccctgaatttctttcattacttctgtatttagggagttattctctgttgatctagttaatagcaggatctgagtgaagccatctttcttcctcaccacagtatctcagtatctgtcggcactttgttagctttgtgctgaaacgcaccctcttgacaaaaggctggtttcttctgtcatcaataagctttctttttttcttttttttctttttttttttttttttgagatggagtttctggagtttcactcttgtttcccaggatggagtgcaatggtgcaatcttggctcaccgcaatctctgcctcacgggttccagctattctcctccctcagcctcccgggtagttgggattacaggcatgtgacaccatgcccagctaattttgtatttttagtagagacggagtttctgcatgttggtcaggagggtcttgaactcccgacctcaggtgatctacctgcctcagtctcccaaagtgctgggattacaggagagagccaccacacccagcctgtcatcaacaacctttcttttcccacctctcactcttggtacggatgtttgcatgtttgttgctccatgggctattaatggatcgattaatagcaatgtactttcttccttgttagctgagcctgtggccctggcagcagtcactgggccagacatctgaggcattagtgggtagatctggggtctgttctccatcccagcctttttttccctggggtctgataaagctctgcctggcttctctgctgccaccttgagcaccactgtgtcctgctgatgtggctcaacagggtccagtttttcaggttcctgaaagccacccactgtgttcctggtgttactggggctctgaggtgcaagcaaattcaactgatagttgaatttactagctccatattctttggattggagagagattaagctgtgtttctccccaaagttctggctggcagcagacaactggctgtttttggacttgtggtctttgctaatcgctagcatcttaaaagagctcttagaaaagttggttttggtaaggctggagatttcttttttggcattgtttgaagaagttctacctattctggccagtatgttgtctttctgtttttcagtgtgggatgtgttaaaatcgtgaatatattgcccacagttcatgaggtgtggccctggttcccaagtgtcatccttgttgtcatagcctttccaccaaaccaaataatctgtcttccctttcttgtcttgtcaacagtcgtttcaacctcaaactcctgggaaaccatggatgggtggacagggttggggcaggtgctgtgccaggtggccaacactttgtttcagttgtgtccccacatagccaccacttctgcctccactgctccaccaggcgctgggcacgtatgagcctctcctgcttttgtggccactggtggggaagaagttgtgtggagaaactgcctttggctctccacacttactccctggtgggccagctcgggcttggggccatggtcccatgatgcagggctaggcagatgcctcaggtaagagcagctggatccccagctcctggtctcgggtgtcatgcagaaagcgtcctacctgcttgttactattcccttttgtggttgctgtgacaattacatttaagaaagttataacacttttaaagtcacactagtttaccttcagtagcatacaaaagccccactccttaatagctcagaccccgtcatgtcagttattaagttcacagaattacaccttgatgcattttatgtccaaaaacataagctggtgatagccttttaatataatactgttgtaaatcatgtagagaacaaatagtggagttgcacattgttaaaagctttgatagctttcataattggccatatatttatctttaccttaatctttattcagacagctgtatagtgtcctttcatttcaccctgaagtactccataaagcatttctcgaagggtaatctagtggtaacaaacttctccagcttttatctgggaatgtcataatttctccctcacactgatgcagcttgtttggacataagatttctgtttgacagtttatcattacagcacttgcaatatgttagcccactgctttctggcctctgaggtgtctgataagaaacgtgctggtgattgggaggccggggcgggtggatcacaatgtcaggagttcgaggccagtctggccaacatggtgtaaccctggtctctactaagaatacaaaaattgccaggcttagtggcaggcacctgtaatcccagctactcgggaggctgaggcaggagaatcacttgaaaccggaaggcgaaggttgcagtgagccaagatcgcaccactgcactctagcctgggagaaagagcataactccatctcaaaaaaaaaaaaaaagaaatcctctgattatcaatgcgggtctttagttcatgactagtgacttctcttgctgctttcaagattctccttgtctttgttttagacagtttaattagcatgtatctttgtgtgtgtttgagtttatcttacttggaatttcttgagcttcttggtgtttatttatttcctaaaatttgtgacattcttgacaactgtttcgttagatactctgtttctttctctcttctctttgaacttccaaaatgtgtaagtttgtctgcttgatggtgtcccacaggttcctgggctgtgttcacttttctttattattttttctttctcttactgacttgataattttaactgccttttctttaggtatgctttttccccccttctgtctgctcaaatctgaatagaaaaatgagaaaggaaaatgctctggcccttttaatccctggaaagttgcttcagcaggaggaggaagctcctgcaaaatggttggggaatgtaacaatgactgcccacctttgtcgggaccatcttaatcagaagcggcaatcagtgcacaagtcctcctgagatttggaggacagggttctttctgtccatcctggctcttgcaggctgctccagaagtgtttgcaaggcagcatatcacagtggtagttgatggagcgtasgtggctgctgttgagccaagctatgaaattgatcaaatttaattgtagtttactatccaagtcttcttttgaaagctgtaaaccttgagatagactgtagggttccaaaataattgtatcacacaattctgccaactgcacctattgtctagttggagagacagattcatggtgctctgtagttcattgttgccctcttcccagaaccctgtatcctcttccttctaacctctgtgtctttacacctaaagtgagacttgcataaatttcatataggtgaatccattttttaaaaatgcattttgccagtctgtgccttttcacacagagcatacatttcaagttattacaagcaagtaatggtttactccgacatttacctacttattttctgcctgttctctatattatttgatcctcattatatacttgatcctcactatatatttgatcctcactatatatttgatcctcactatattattacttgatgctcattttaaaaatttgttttttaaaaaaaaatgtgcttattcccttttctgtatattttatattttttattaattatatttgggacttcagttaatattctaaacttaaaatagcctactttgagtaatactaacttgtttgaataatatgaagtttagtttcaacagtatataaatatgctgcttttgtacttttccatccttcctaatctatgttattgtctcagattatatctgtacacagtgtccattaaaatggatttgtaattgttttatgtaatagctgcctaccagaagtacaatagtaatagttacttttcccagttgttataatagtaatagcagctttctttacaatgttaattcttcctgtggcttaaaattactgtccaatgtcctttcattttaacttgatggcttccttctagcaatccttgtagagcaggggtagtaacgcattccgttagcttttctgtatctaggcatttttgcttgaagtatttttgcttgaagtatcattttgccagattcagatttcgtgtttgatagcttttttctattaacattttgttatcgctttctggcttctgtattttccatgctttctgagctgtttgttgttaatcagtacacccttctacataacaaatggcttccattctgaggtgtctgttgtcagtcaagactcccttctgcatgacaaattgcttctccctttctgtttttacagttgtcttggttcttgactgactataattttcttggtgtggctggctgtttttgactatgttcttgttggagatttttacccttcttgagtttggacattcagatatttcatcaagtttgggaattttcagctatttatgtcttcagatattctttctgcctcttctccttctgcacttatgggacacccatattgcatgcattggtctgcttcatggcgttctgtgtacttgttaggtttttcccactttttcaaattcttctttttttctgttctcacactgggttatttcaattttcatttcttcagacttaatctttacctgctgttatatactcctttaatgaactgttcatttgcatcattgtgcttttttatctctagatattccatattttcttctataatttgtctcattgatactctcgtgttcttttatcatttgtctgctgtttttttctttaggcttaactctttttttttttttttttttttttttttttttttttttttttttttgagacagagtctctctctgtcacccaggctggagtgcaagggcgcggtctctgctcactgcaagctattcctcccgtgttcaagcgattctcctgcctcagcctcttgagtaggtgggattacaggcatacaccaccacgccttgctaatttttgtattttttgtagagacggggtttcactgtgttacccaggatggtctcgatctcctgacctcgtgatccacctgcttcggcctaccaaactgctgggattataggcatgagccaccatgcccagccaaaactttggtttttttatagtctttgtgtataaagttcaggacattttcagtttctgtttttcacttcacattggtcatattttcctgtttgtttttgtgtgttttgttgtttttttgtagaaaactatatttgaaatgttgcagtgtgttaactctggaagtcttcatttctccaaggtgtcctcttagttattgaaggcttagcttgcattgcaacagtgttttaattgagtgtaatataaaaactatcagtttttacaactggatctgtattaacacacccctttaatacttagggagactgtttacaattctgcctcagccttcagttttttctcacattgaagctatagttaagcctgagggctaacacttagagttttacatgttttttgagaatgtttcctgtcatgagcatgtgcatgattttctaaattctttagtatatttaactgctttcaaatattctgatttctccaaaagaaagatctctccagcttttgccctctttttcaggttgtctgttttatgggttaatcatatactttgctcccagcaacttaaatatttgtgactaatgcctggcattttcaaccatgagtgagttctgagttaggcaaaacagagatatgtgtgtttcaccaattctttatgtaactcctagacagactagaaataaaacacaataaattagcacctaaggtcttctttactccttctagaatcaggggtcagggcctcacattgagaatgtggattgcattttcgaaggcttcagctgtgcctgggaggtggtatggtaacaccacaagactttcctaccattttaaaaattatctctcttggctcagtgtttgcttggttgatataaattgttgatttccagggtcctgtcagttttgggttgatgtgctgtttctttggagggtttgaaagtgtctgtcctgtagctttgctttcagtttaatttatgaagcactgattgttttccgatctcagagttcatttttatttaggagatttacacttttgtgccttaaaaattttccttaaaataattaagtagtatattaacctcctaatttgggttcctagatgttaggtttttgttttagtggatatggtatgaaactttttctttgctttgtttttaagtaagattatcgattccatataaaatgcatgaggcaggatttgtttgttataaagtacagtttggttttatataggagagtcacaaaatacttcgttgccagggtgactttcaagtaaatgtctaaatgaacaaacaagggaataattatgtaagtatgcagcaggatcaacaagtatgaagatccctggcataagcctacttagcttgttagaaaaatagcaaggtcggtgtggctgaggcaggatgaaaaaggagaacaattatagatgaagagctcgtagagataacggacagtccatgtgatagctttatataggtcatgttttatataggtcaatagatattactttagattttactctaagcctggttcataactggaagtgggattggtaaggttgttactggcatctagtggtgagaggctggaagtctgctaaatatccttaaatctagagtctcagacacctttaggaatttaacacagttggactgtctctccagaaaattgtgaagaaaaggcatacatgtggaattctttgatactatagtttgaagatttctgagcccaacctgtgggtttcataaataggagggacttttataagcccttgaaaagttcagttgattaaagtttgagtggggtggaggagagagagagagaggggagagagaagagaagacagaagagagagagaaaaagagattctgggtttgtcttccaaaattaatgactcagtaagtatggaatggaatctgaggatctgtatgtcttcgaggttctcaaatgatgttaatgctgttggtctgataatcacgtttgagaatcattgatacaatcagacatatctttagccatgttgcatttccatgagttgcttgctccaatgcacggttcattgaaagtgattctggggaggctaaaaaagatatacagaagcttaattcatagcacctttgtatagtatctagagggtgtttccaggcatttccgagagaggttgttaaaaatatgtcctgcaaaataagaggcttatattttattgattgatgcttacctttgacatgatccaccccgacccctgattcacagtaaatattagaagatctaagaaatcatacattaacaaacttgaacaataaatagtaagtagtaatattcctagcctactaggtaacaatttgaggattagctccctgacaagtattttaaactcattcattctgtgttgctagccaaatgctaaaatgggggttaccttgtattttactattgatgtatatacctcctattaaagatagatcagtgttggaattattttgttgttgttcataagatacattttgtttttatttcagaactgttcgtcagttggcacaggagcagttctttttaatgtgcaccagatgttgcatgggacacaggcctctgcttttcttcattactttactctttaccatactgggggtgagaagttttcaaatgaacttatcaatataatgcattcttaacatgagagacattcagaaagttactacgatagcttttattgtatttagaacaggcataattaataaatgcagtattataattttttactatttgtagattggctttttgtttttttacagttcttgggaaaaatacactacgtcttggaaaaatatatagtaggtctatagatgtactatatatttattttatgtatatagtacgtctgtaggaaaaatatagtacatctttgtcattgatatgaaatattgccaattttaatttttctgggtttaaaaaaattatatggactctgagtgtagacttgtgaattcatgttgttttaatttaatatttcagagcacagcaagagagaagggtaaatattcaggtgattatttcacacttttacggcaccttctcaattatgcttacaatggcaatattaacatacccaatgctgaagttcttcttgtcagtgaaattgattggctcaaaaggattagggtaagttgaatagtatttagtttattatgtcatgaccaaatcagctgtcttattaaaaggaggtttgtagtcttttatttagtctctatttttatttgacaacttaggagaataaattctcaaaatgcctctgagaataaatacaaacaaaatgtgtacttttcactagtgaattggtaacttagattcatagaaacaaacatagctagttttgttcaatgtgttttacttttcttgaaacttggaatgctgataattctgtttctttcactttggtgcttcttggccttttttggggaaattatcacatttgaagactttttaaaaaatcgaatttgagagattcgtatttacattgaaccatctgatatcttacttcacaaagttctatgagagtatatttctaaagtgtatggctttgggcttcaggttagctgcttctagtagattataaagcttacttacggagcacggtttttgaaccctggtattgacgttgtgtacccagataattccttttggggaggagctttgctgtgcattgtaggatgttaagcagcatttcgggcctcttccactcagtgctgtagtaacctcctttcctcgtggttgtaaatcccaaatatgtttgtgtaagcaaaattgcttgcatttactgttctagagagttctcaaaaagaaataggaaaccacttgaacagtttggggaagttgtatagaagatctcatttccttccagctctctgttctcctaactccttgtccttttctatctccatgttgtgagttgggcctataatatttttccttttgcaggataatgttaaaaacacaggtgaaacaggtgtcgaagagccaatactggaaggccaccttggggtaacaaaagagttattggcctttcaaacttctgagaaaaagtatcactttggttgtgaaaaaggaggtgctaatctcattaaagtaagtacttttttttttctttttttgagatggagtcttgctctgtggcccagactggagtgcagtggtgccgtctcagctcaccgcagcctccacctcccgggttcaagtgattctcgtgcctcagccacccaaatagctgggattacaggcatgtgtcaccacacctggctaatttttctatttttggtagagacctggctaatttttgtatttttggtagagacctggtttcaccatgttggccaggctggtgttgacctcctgacctcaagtgatccgttcacctccgcctcctaaagtgggtgagccgccgcacccagcctctttaaggtaagttctgaattttgttactgaacttcttatcatgacctcataaatgttagcaaatctgtctgattgacctctgtataatgtctttgagacataatcttgatattttttcttttttcttgtcccacttctcttttaaaaaggatctctgaagaggttacagtaactttaaaacgtgtgcctcactttaagagattttgtaaagtaattacaaatcagagttacaataaagtggtatgaaaagtcagtaagcagcattgaggtgattttcatgttgaataaatctcaatttttcttgactagatttctaaatgagagaaatttctgtcttgcaaaacttcattttttatacactatttcttggtgagcttctttatatgtcatgcaattcaagaaaaagaatataactttgatgcattctgttcctgtttgaaatgaatttgtttctgtttatatctgattaaagaaataaatttatttagaatgtcacttttctttggtataaaattgtttaaatcacttcaaaaaatctaatctggaaaactgattacatttattaattgtactcgggtttttttgtggggttttgttttgagatataatgagatatttaattatgtcagataattactaaagtattccctttgaagaaacatattgttcctaacctatattttctactaataacatgtaatgtctttttctaacttactaggaattaattgatgatttcatctttcccgcatccaaagtttacctgcagtatttaagaagtggagaactaccagctgagcaggctattccagtctgtagttcaccygttaccatcaatgccggttttgagctacttgtagcattagctattggctgtgtgaggaatctcaaacagatagtagactgtttgactgaaatgtattacatgggcacagcaattactagtgagtattttaaattataaagctgttttgttcattaataatacttcactgtaaaattttatttggtgttttagaaaaaattaacttgtgatggactttttttgatccaatgagtttaacattttttagctgtcagttatacaattaaaaccactttagtcagagaacattaattcagaaaaatttttagctgtgtcttttaaatgctccttatagtttgtttagatgagttttatttaatcatatgtgaaataaaaccaaaacttcagagtaacaggaaggcaaatttaatgccataaaaagtttatatttaaaatgtatgtattgaaaagattttcataatcctaacactgaagttgcttaatgttattttagttgaattctaaggaaggtatggttttaaagatcacagtgtgagaagagaatatttgagtgtattttactaagttctaaatgcctacatcagtcccacaaagtgagtacctatgttcagatcttacatagaactgaaactcagagtgggaggtggtataagtaaaataacagataataatataaaatttagttcatttcaaggaaaaacccaaggcttaaaaatataattaataacagcattcattataaatctttaataaatatgaatttatctttgcttatgtctttctctgggtgaggacgttttcaatcacattgtaggagtttctagctaaactccctgcttagaaggtcagatgtttttttgtcgctttgaatctgcatagagagaagagtttcttcttttgagacgaagtctcactcttgttccccagtctggaatgcgatggcgccatctcagctcactgcaacctccgcctcccgggttcaagcagttctcttacctcagccacccaagtaggtgggattacaggcgactgtcaccacacctggctaatttttgtatttttagagagacagggtttcaccatgttggccaggctggtctagaactcctgacctcaggtgatccacccatcttggcctcccaaagcgctgagattacatgtgtgagtaactacttgagattacatgtgtgagtcactcttttttaaaaagtttcttttttaaaaacgcttcttttgttaatttatttagctaatgtatttatgtggtaagtgtagtttcaaaagagtttattttttagaaacacttgtttatggccgggcgcggtggctcacgcctgtaatcccagcactttgggaggccgaggcgggcggatcacgaggtcaggagatcgagaccatcccggctaaaacggtgaaaccccgtctctactaaaaatacaaaaaattagccgggcgtagtggcgggcgcctgtagtcccagctacttgggaggctgaggcaggagaatggcgtgaacccgggaggcggagcttgcagtgagccgagattgcgccactgcactccagcctgggcgacagagagagactccgtctcaaaaaaaaaaaaaaaaaaaaaaaaaagaaacacttgtttattttactaaagtttatacctggtaaatatgtattttcaaatacaaaagaggatacatgttaacagttattaacttcctacaggttttatgtttccagtccagagattatctctgtctatgcatttatatgtatgtatagctattcgttttgtacaaatgagaatgtacaaaatacaatattgttaattttgttttgtactttgtgacacacctgtcagcacatgaaggtctgtataattctgttttttagctacataacttgcagttcaatgtgctccagtttatgtaattcatctctgatggtgattgatgtttaagttgttttggttttatgcaagtaagagagggatttatagttctcacagtgatttgaaatacaccatcccattgactttatctcacaataaaactggatattggtaaagcaattatcactatttactaaggaaggaaacagatatttacgtgaaggttatacttttttaagaatcagaaccacgacttgacaaagtcaagtttgtaatgtatacatactttcattataaataaaacaaagtggtcctatatgcaattaaaagtgagaaaaccatagtattttgtttatatagagttctgaccacagtgaattcaatacacttaggtacagaagtttatttttttgttgttgtttttgtttttgagagggagtcttggccttgttgccaggctggagtgcagtggcacgatatcggctcactgcaacctccacctcccgagttcaagcagttctcctgcctcagccttcctagtagcagggactacaggtgcatgccaccacacccagctaatttttgtatttttagtacagacatggtttcaccatgttggccaggctggtctcaaactgctgaccccgtgatctgcccgccttggcctcccaaagtgctgcaattacagtcgtgagccaccatgcccggctagaagtttttaattagtaaaataataatggttaacactaagcctgtgtttaacacatggaaatttaatgctataccatcttgtttttttgagacagagtctgtctctgtcgcccaggctggagtcactgcaacctttgtctcatgggttcaagcgattctcctgactcagcctcccaagtagctggaatgacaggcacatgccaccgtgttcagctaacttttgtattttcactagagacagggtttcaccatgttggtcaggctggtcttgaactcctgaactcaggtgatctgcctgccttggcttcccaaactgctgggatgacaggcatgaggcacggcactggccaatattacatcatcttatatgactcttaaaactgttacagaagcagtatcattaaaaacatcaacttaacaaggtctgtagttaaaatctgtatggtggcttatgttgttggtgtcaaaatttaaagtactgtttcaaagtggctgtggtggtgaaggaggtgttgctattattaatttgttagcctgaaaatggtgaacagaatcactgttttcatagtataagcatcttttctcttttcaactcagcttgtgaagcacttactgagtgggaatatctgccccctgttggaccccgcccaccaaaaggatttgtgggactcaaaaatgctggtgctacgtgttacatgaactctgtgatccagcagctatacatgattccttctatcaggaacagtattcttgcaattgaaggcacaggtagtgatttacacgatgatatgttcggggatgagaagcaggacagtgaggtaaattttaatactgttttctttgaagagtctgatagcagatgctgttgttctccctcagattactatactttcatgggatgttatggggactacattttgatgatacagacagaatctctgagatactatgtctggcatacttgtagtactcactatgtaatagacttaaaactccagttgataattaaacactgtttttttgtttgtctccaaagcacagttaatataatcgcattttgtgtgacatggtaaatgtaatttggtatttgaaaaatgatgaatctatttatttttaataattacattttcattgccttgttttttaaaatctgttatttcatttctttcactttttatattgtctgtgtttcataagctgtacttatttttaggattctctatttttctcaaattagagctctttctgctaaggaaacaaatttgtttctcagctaatgcttcacggacctgttaacaatattagttaacagttgcagtcaggctgcctatgaaatgtatccagttgaaaataaagcagtaaaaaagttaggttttagtggcagatcacatatttaagatgcaggtcttaaatacatgtatatggaaaatttgaagttttggtcatattttggctgggcatgtggctcacgcctataatcccagcactttgggaggtcaaggcgggcagatcacctgaggtggggagtttgagaccaccctgaccaacatagcgaaaccccgattttactaaaaacacaaaaattagccaggcgtggtggcacatgcctgtaatcccagctactcaggaggctgaggccagagaatcacttgaactcaggaggcagaagttgcagtgagctgagattgtgccactgtactgcagcctgggtgacagagtgagactccatctgaaaagaaaaaaaaatttcggtcatgtttatacttagactgtttatcttttacttttttgcatatatgttgataggaactaaatgcagaaacaaaaattgtaactgcaggaaatggttctccaatttctacatatcttcccttcagtgatcagaaatagtttgagtttcagattgtagtgtatcatttatggagattacaaacacttgctgccgcctttcaagatctaataaatcacaccatccaggcattcctatctgggtaactatacttacagtagaatctccatgtgggttgttgaccaataccaggttaagagccactactgaaaggaaattggaaattaagtcctacttttatagcccatgttacccatagggtgttgaatttaaaacagatagggatggcaaatcatactgacaagaagtaagtgaggccaacagaacataaactttcagattaggtcacccacctttgtgcttggttgcttgtgctttatgttgtctcagcactgtactatggcatgcatgtgtctgcctactttttctatgcaatgagcttctccagggcaggaactgggtattatttatttctgtatcacaaataccagatacagagcaaagcatatagaaacatgttagatatttgtaaagtagctgtattttgctctgtagctacaatgagattatgacctatggagcttctgtatatgctcccgtaccttccacagctactcttaataactttatttattgttaataattgtgataacattatgtaaattacttcatgaatctggaaaatgcattatgctcacaagaaaatactgagtcctaggaagaccaagtaacttattcccctgaagttacttacggcagagcactcatttgtctttactgctgtatacttgaccaaactttactatattacactacctctaatgtatttttttaactattcttttatgataacttatctgtgaaatcttttatcataacccatctgtgaaatgagcactaatattaaaaattaagtgctttggaagtaagaaatataaaaaagtgcataacatttcatttactaacttctggtatttgtttcagcttctttcgttatactgttaaagttagattagctcatcaataatgtcttttggtctctagagtaatgttgatccccgagatgatgtatttggatatcctcatcaatttgaagacaagccagcattaagtaagacagaagataggaaagagtataatattggtgtcctaagacaccttcaggtcatctttggtcatttagctgcttcccaactacaatactatgtacccagaggattttggaaacagttcaggtaaattatgggtgggtgatcatttaagtttcataaaaacctcaatacagtaaacttctaaaatgtagcttagaatacataattagttttatatttaatatttaaactgtactaatattctaattatccttcttggtcatagttttgttttattttcccaatagaatgttttattatcccaatagaaagaagtaaaatttgtcacagtaaagaaaggcactgtgttctttaatctcttaagatgtaatttacttcttcattttggaagacatcaattatataaaagcagccaggcacggtggctcacgcctgtaatcccagcccttttggaggccaaggctggcggatcacctgaggtcaggagttcaagaccagcctgaccaacatggagaaaccccatctctaccaaaactacaaaatttgccgggtgtggtggcgcatgcctgtaatctcagctactcggaaggctgaggcaggagaatcgcttgaacccaggaggtagaggttgcagtgagccaagattgtgccattgcactccagcctgagcaacaagaggaaactcaatcttaataaaaaatgatataaaagcaaaatactaaaacagtcatccccttgcttaaacagctctctgctgaagcaaatgtcaaatatattgttttatctatatagatttttttatatatccctaacatttttctttaagaagatgatcatggtacattatcacatataataaaaattactttataatcttgggaaacatggcaaaactttgtctctacaaaaaaatgcaaaaattaagcatggtaatatgaacctgtagtctcagctcctttagtgagtggaatatcatttcattcactaacttttgttcttagtttctttcaacttctttcattataagttagattagtgcattaatgatatcttttggtctctggagcagtgttgatccctgaggtgatgtatcataatcaccttgaagaccagcattactcataaagaaatgaacattttcaccactagaaaggaagtcccccttcctagtctggcaacaaaaaatatatgtgtattattatatatctttatatactgtatatattatatataattataactttatatttttatatatataggtatatttttctttacaaatttgtaaagtgatgattccctaacatcctccaaaagtgaccaataaaatttggcctctttttaggtttggaaaacctcaattaggccagctgcagtggctcacactagtagccccatcactttgggaggccaaggcaaacagatcacttgagcccatgagttcaagaccaccctgggcaacatggcaataccccatctctactaaaaatgcaaaaacttagctgggcgtggtggcctgtgccagtagtcccagctacctgggacgctgaggcaggaggatcacctcaaccgtaatggagccactggcctccagcctcagcaacagagggagaccctatctcaaaaaaaaaaacaaagaaagagctcagttacatcttgaacttgtcttttttgtttgtttgtttcacctattttatcaaggcctactttgtgttatacatgctactaaacactgtagcacaactttttactatatactgtaatacatgctcttcctaatgtgtagaaaaatgctgctgcccctcataagaatttagagttctttcaacaagatacttccttgatagctcagagataggaaaggaaagggctcttctgatttctgagctgctttttctgttgcacttatggcagccacccttatatgtattagcatatcactttgattccttttgaaagtcacaaacttacagtacactgactccccattatatctctcagtataaatttctgtattctgtagctgagctgtaagcctagattataagtacgatatgcatatataattcttcttttcctctttcagttatgtaacttcacacgtgccttgctcccctttttacctgtttcaactgtttttttctttccctagcgtatgctttctttacctcgacttttttctgcaatctagtcaacaattctgttcctgttcttccaatttactataacacttttagatttgtcttcaaatctttcacttaataatatatgtgtgataactgaatacacagttacataattatatacattatagaggaatttcatacacacatatatagatatatatcgttttgcttctttataatctgtatttaaatgtattaagctataatgtgtttgtacttaaatatgtatgtttttgtcctctcagtgattctctccaaataagtgtggagctcacaatttgtcctaaaacatttgtgttacacaaactgtagacacatatgttcctattacatttttttcttttgtggtaaagttctcataaaattcaacattttaaccatttaatagtgtacaattcagtgctttttggtacattcagaatttttgtgaaaatatcactaccatttggttccaggacattttcctcaccaaaaaaagaggttccctgctcattaaagaatcattcagcccacttttctcttcttcctaccccgacaacaaaaaattacttttctctctatataggtttgcatatttttgatatttcttgtaatttaatcacagcatatatggcctttctgtctagcttctaatgttaaatatggtgtgtttaaggtatgtccattttgtaacatgtatcggcactttgttcattttatggctgaattatatttcattgtatgactagaccatgttttatttatccattgattaactttggatggtttccgtctttgagctattgtgaatagtgcctctgtgaaaattcatgaacaagtttgtgtgtggatccatgtttcatttctttttggagtagacctagaaatgcggttactgggtcatgtggtaattctatgtctaattttttgtggagccaccaaattggtttccaaagcccctgtagaattttacattttcttttttttttttttttccttgagaagtagtctcactctgttacccaggctggagtacagtggtgcaatctcagttcacagcagcctttacatcccgggttcaagcaaccgtcctgcctcagcctccctgcctcagctcctgagtagctgggactgcaggagtgctccatcagcactccaccacagctgatttttgtattttcagtagagacagggtttttagtagagatgagatttggccatattggccaggctggtctcaaactccagacctcggatgatctgccgaccttggcctcccaaagtgctggtattataggtgtgagccactggccctggcccagacatttacattttctgtcagcaaattatgaaggttacagtttctctacatctgtcaacacttgctgtttccttacttttagtatatccatcttgaaatatgtgaagtgtatcttattttgaatttgatttgcatttccctaatgactgttagtactattgagcattttgcatgtacttattagcaatttctgtacttttttgaggaaatgtctgttgaagtacttttctcattttttgattgccttttgttgttgcattgtaagacttctttgtatcttttttgcgtatttgtgatattaggcccttaaagataaattatttagaaatattttctcccatctgtggattatcctctcagtatatttatagtacactttatgcttaagaggttttttctttttttttttttttcacagtatcactctgtcacccaggctggattgcagtggtgcaatcttggctcactgcaacctctgcctcccagattcaagcaattcttctgcctcagcctcccaagtggctaagactaccggcctgtgccaccccacccagctaatttttgtgtttttagtagagacggagttttaccacattggccaggctggtcttgaactcctgacctcagatgattcgcctgccttggcctcccaaagtgctgggattacaggcgtgagccacagcacccaggcaagagttttaaattttgatgaaatcatacttatctttttttttcttttcattttcaggctcctcctgtgatttactatttctatcgtggcagaatgtgcataacataaaaattcacccttttaatagattttagttgtccaggtgactggcattatatacctttacgccactatatccgaaggttttgcatctttttttgtttgtttgtttgtttgtttggagacggagtctcgctctcttgctgtgctgcagtgcagtaacgtgatctcagttcactgcaacctccacctcccgggttcaagcaattttcctgcctcagcctaccgagtagctgggattacaggtgcctgccaccacgcccagctaatttttgtatttttagtagagacagggtttcaccatgttggccagggtggtctagaactcctaacttcaggtgatctacctcgctctgcctctcaaagtgctgggattacaggctgagccaccgtgccctgccagtttttcttcttttaaattgaaactttatattcattaataatagctccctcatatccccatattgattttgaggtgctgatttggaaactttgttgaattattttatcatagtgatgtatacttgtgtgtaatcgttaggatttcaatttggatgctttttgtttcttatttctttaatgattgtctaggagaattactgtgtcaaatagaagtggtaaaagtgcatatctttgagttgttcctggtcttagaggaaaagctcttagtctttcatcattaaaaccttgtcttagacaagcttgtccaacctgccttatttcattgttatgttttgttttcttttaggctaaaagcagcctgaagccatgggtttttagtttctgtgtctagtgataagattaaacgagggtgaggaaggaactttactggcctatcaagaaacagaaactcagaacccatgagtgtattctctcccttggacaatcctgccttagaccatatttaaatattgactcagtatgaatcaaagctaaacataataaataaaattttataagtttaaagggaaaatttatgacattggatttggcagtgatttgtttgattacatcaaaagtacaggcagcagaagaaaaagtagataaagaataaaagtcatattctgatatccagtgaaaatatctcttagtagttactgggatatacatttattctcatgagaaaggaaacttgtgaagaaatttctaaattctgtcaaaagttttggcagaaaggtagttaaacacagggacacatgtaattgcaagaaagaatacaagcaggaaatggtatatgtagtagtcttatttttctttcctagtttgtttaaatttctatgagtattgaaaataaaaataacattaaggggtaattatgcatggttttagtatgtttgacaattatatatggagaaaagtaaatgcttattatttggctgtgaagcttctgtatcttaatggaagtggtaaaatattaacactgtgataatgtaattcataaagcaattgtatataatttatacatatattctgtatatgtatttacatacatatatatttgtgtgtgtttatgtaaaattacacagacatagacagctaaacgtacatacagaaataagtacaagtaaaacctagagaaatgtaatttaagattttggcttgtaccaataatagtatcccaattgtgatactgtgttacatagttttgcaagatgctattgctggggaaattggataaaagatatctttattaaaatacagaaacagagaaaacagcatctctgttatttcttaaaactccatgtgattctacaattatctcaacttttttaaaaaaaaaatccaagcttggaaaaagaaaataggaaatcactaaccaagaaaagttgaaagaaccatcccaagtaactctggaagacagtgtattgagtaggtactgtaaagctaaataaaaagaactgtacagaagtactaatctctgcaattctatttccaagtgttaccaattctggaactactttagatgtttattagaggtgaacaaatctagcacagataataacagccaggattgtaatttttgtaaagataagttacaggtaagggaaggtaggtggcttgagtgaacagtggtatgtagttgtagtcatgtttattttaaactacatacgtggtgtgatatgtatgtatgcttcttggtggttgtgtttttgttggtttgtttgtttgtttgtttgttttgagacagagtcttgctctgtagcctggtctggaatgcagtggtgcaatcttggctcactgcaacctccacctcacaggttcaagcgattctcctgcttcagcctcccaaatagctgggatcgcaggcaaccatcaccatgcccagctaatttttttttgttatttttagtagagatggggtttcaccatgttggccagttggtctcggactcctgacatcaagtgatctgcccccatcagccccctaaagtgctgtgattacagcttgagctgagccaccatgcgtcttgtatatatgttttaagtttagacacatacatacagataggcgtagcaatagagatatgtgtgtgtgagcattgatgtggtatatacacatatatttccaagttctgtgcactgagaatgtctaaaaataatgaccccaataatgtaggtgtctaacggttggtacctagagcttaatttgtacatagttatctaggcagttggtatctagagcttaatttgtacataggtatctagcagttggtatctagagtttaatttgtaagtaccattttctgatgaaaaggaaccagacctgcctggaaagttggtgtgttcccaggcaggagcagacgactatgagcatattggcctagatgcaagccattaaggaaattgtcaaaaaagaaaagaaataataccaagtcagcataggagccaactgaaaagctctcgtgtttaatattgaaacaattttaggaaaaagataaataataatagtattagattataatacttagcataaaataaatgctcatactgatagaagcaaataactgaataaataaatgaaggaaatagagtaacaccattagagcatcacagtaataactgatgcaagaaagattcactgattaccaaaattagtggggaatagttgaacggtaaacagtatattttcttttcttttcttttcttttcttttcttttcttttcttttcttttctatttgaaatggagtttcactcttgttgcccaggctgaaatgcaatggtgtgatctcgactcaccacaacctccacttcccaggttcaagcgattctcctgcatcagcctcccaggtagctgggattataggcgtctgccaccacgcccagctaattttttgtgtttttagtagagacagggtttcaccatgttggtgaggctggtctcgaactccagaccctgggtgatccaccagcctcggcctcccaaagcgctgggattacaggcatgagccaccatgccaggccagtaaacggtatattttcatataggaattattaacctgttttgtaccttaaaactaggggagcagccaggtatggtggcttatgcctgtaatcccagcactttgggaggccaaggtgcgcggatcacttgagcccaggagttgaacactagcctggctaacatggtgaaacctccatctctcctaaaaatacagaaattagctgggcatggtgatgcatacctgtagtcccagctactcaggaagctaagggaagaggattgcttgaacccaataagttgaggctgtggtgagctgtgattatatcactgcactccagcctggacaatagggcaagatcctatcttaaaaaaaaaacaaaaatgaaaaagaaaaaaaaaggaaagaaaaaaatacagtggagaaaatagtaaattaaacccaaaacaagcaaagatttttcagaagtactagaaaccaatgaagttggaaaaaaaaaaaaaaaaaaagaagtgatagagaaagaaactttagagtagtgctaaaaatgaaaacaatgtgtttttacttcttgtcagcttgaagtaatttggacttaatttgcctcctttggtgaaacaattttttaaaaatatacagataaagtacattaaactatggcttcaacacattaggcatcagacaaaaaaggaatattattcttgagataggaaacaaatgagagccctgcagtagccttagttagtctacagtgtagggtgggacagtgaatcagaccaatggaattcctgacttaaggaaacattgtggagaatccaaggagactaaaggatctaaggtttgtaatagtgcatcagagagctgcattaattctagtaatttttatttctccttgaatattcaagagagaactaagcactacatgtaaatcgggaaacaaattggggtaaggaaagaaacacatgaaagaattagagggagcagtctaaattctcacagaacaggaaaaatagctgttcctcccagccacattagaaaaactgttagttcacagggtatagagtatctagaagagccttgttcggtaccaaggaatacttattcctatactatgcactgtttttggctacctaaagtgtgaacaggaaaatcaaactacgtctcaaaccaagctagagaaagtttaaaagagtacagaatatcaagcattgaataaggtaaaattcaaaatatctctatctagtcaaagattatcaggcatgcaaagaagcaggaacatatgacctaccatgtgaagaatcaacaaataggtggacctgacctagaactgactcagatgttaaacgataaaaacttttaaaagtttttgtaatgtatattcatatgttcaaaaagttagagataagcaaaattacaacaaagctctgcagatgaagacttaaaagagatgaaaaatacgctaaggctgggcgcggtcatggctcatgcctctaatcacagcactttgggcggctgagaccggtggatcacctgaggtcaggagtttgagaccaacctggccaacatggttaaacccatatctacaaaaaatagaaaactagccaggtgtggtggtgcatgcttgtaatctcagctacttgggaggctgaggcaggagaatcgattgaagccaggaggtggagtttgcaatgagccgaaaccacgccattgtactccagcttgggcaatgagtgaaagtccatctcaaaaagaaaagaaaaagacgctaaatgagattaacagctgataacacactgcagaagaaaagatctattaaatgtattcattataaaacacaagggtaaaatgattttctaaaacaaaagagtatcactgagctgtgggacaaccttagatgatctaattaatttccccaaaacaggagaaggaaatcaaaaaaaaaaaaaaaggcattagaagatatgatggcctaaaactaaataaaaagtttttattaagattcttcaagaactactttgcttgatagcaaaatatgacaaacatttaaaaatactgaaactacagaccacatttctggtgttagatgcacggtttctaaaaataattttggaagttgaagtgaacaatgttaaagacaatacctgatgacaaaggagaatatattttaggaaagcttagttggtttaaatcaattaatatacttacattaaacaaactaaaaaggaaacttatatgatgacttcagtagatgtaagaaaacatttgacaaaatagattttcctgataaacatcagcacaactaataatgaaagaaaacctgataaaaggcatctgcagacagcctacagctatcatgttgaatgcaaattcattattgtgagtggaaaaaaaaagacaggaatggtggatatcgtgtgattgtattagtattaaaattatagaaaatggaaatattctaattggcagaaagcacaaagtggttgcttgagatgggaagaatgggatggcaggggcaaaatggagaggttaaaaaggaaaatcatttgagtgttggatacattcattatcttgactgaggtgattttacaaggggtgtgtgtatgtgtgttgttataatttatcgtttatgcttctgtttactgtatatgaacactctttaccgaaacaaacaaaaaaaccaacaacattgaaaactaattgcagcttctgaatgctgaacactgaaaaaaaactgcagagatcaaagaaggtaaaaattgatagaaaaaaactcacaacgatttttttttcccacaagaccatgcagataccatactatccctttaatgaaagatgaaatattgctaacatgtcagttcttcccaaattgatttataaacctatgttttctatcaggatatttacatatattaatttaccaattattagcatgaaaggaaagaggacaaggaaagctaaaacaatttgggaaaggaaatgatccaaattggagaacttccactgcgtgatttcaagactgccattaaagccacaaaaattaaaacatggcattaataaaaggataggcacaaagattaataccatgtgtagctttggaaaataatgtatactaatatgactaatgtcccagatcatttaatgaaaagacttcgcatttttcccatcttggggagagaatgcaaagtcttcacttttagtgatttgggacaactggacattcatatcctttcccctaaagtgaacctcaacctgtgccttatacaaatttaatgcaaaatgaaactcagacctagaatgtgagaatattgaagaaaaaccttttgtcactttgaattgttatcaaacaatatttagatgataattcataaatgttgatacgtgtgacttcatcaaaaggaaagccatatactcttccaaagacgacattaggaaaatgaaaaggcatagcatgggaaaaatatttgcaaaatacatacaaaataaagaattttcctagctcaatattaaaaagtacataattaaaattcttaaaatatttgaaaacttaaccaaagaagataaatggtataaaactgtgttcaacatcattattcattaggggtttttatgttaaaaccacaacagatacaactacacccctgtttttttctggtgctggtttggatcaggagtacatgatactcagccgttactgataaaattttccaaagttgtgatcctttgggaaactgccagtttcttacaaacttattcataaacttaatgtacaactaagcaggctgactcctggatatttatcaaaatgaactgaggactaagatagagcctgtctgtaggtatttatagcagctttatcagcagtgctaaattgcttgtgtcccagcaattttgggaacaacttttgtcccttgaatggctaatagataagtaaattctggtacattcatatggtgaaatacaacacggcaaagaaaaaggattaagctattgacacactgagctgagttaaaggttcacattcattgtgctaaaggaaagcctcaaatctacatctaacatatagaagcctgacaaagatgctgcaagaaaattatagaccagtaatccattatgaacatggatgcaaaattccacaacaaaatactagcaaacccaatttagcagcatgttaaaagaatattatatcatgaccaagtggggtttattctaagaatatgtgcatgattcaacaagtgaaactaatcagtgtaatacaccactttaataaatgagcaaaaaatagcacattgtcatctcaattgagatggaggaaacatttaacagaactgcctttcatgataaaaacatgcagtgaatacagaacagaaggaaactgcctcagcttaataaaagccatgtataaaaaactctgagcaagcatatttgtaatataaagcttttactctaagataacgaacaaggcaaagctgcccacttataccaccgctgtttaatataatactggcagtcctacccagcacagttaggcaagaaaaaagaagaggcatccacattggaaaaggagcagaaaaattatctctgtttacacatgctgtgatgttacatgtataaatttctgaagatactcctacgaaaactgttggagtaaataattgaattaggcaaagtagcagaatgcaaagtctcacaaatatcagttgcatttctatacaataacagtaaacagtcccaaaaagaaagtatgaaaacatttatatagccatcaaaaaataaaatacttaggtattaatttaaccaaggtggtgaaagatttatattgctctgccatataagatgtgcttgcttccggttccctgtccaccatgattaagtttcctaaggcctatcagtcttgcttccttacagccatgtggaaccgagtcacttaaacttttctgtataaattacccagtttcagtacttaacagcagtgtgaagacagactaatatgaccaaaagatttgaataaatgttttttcaagaaacatacaaatggctaagaggtacatataaaaatgttcaatattactaatcataaaggcaatgcacaacaaaactgtattgaaataccattttagatgtattataatgaccattataaaaatagtaattgctggtgaggctgtgaaaaaattgaaacccttgtgtactaagggtgggattgtaaaatggtacagccactgttgaaaacatatagtgcttcctcaaaaagttaaaagtagaagtacagccgggtgtggtggctcatgcttgtaatctcagcactttgggaggtggaggcggacaatcacctgaggtcgagttcgagaccagccggaaaccccatctctactaaaaatgcaaaaattagctgggcgtggtggcatacacctataatctcagctattcaggaggctggggcaggagaatcacttgaacttgggaaacagaggttgcagtgagccaagattgcaccactgctctctggctttgatgacacagcaagactctgtctcaaaaataaatcaataaaagtagaattaccatatgctccagcaatttctcttatttccctggtgggtataaacccaaaggaattgaaagcagggtctcaaaagaggtagtgtacactcggtagttagtgacattcacagttgataaatgtaaaaatatttttagtttgtatcatctgataaattgataaatctatatacatattatgaaatgttattcaccattgaaggaaattctgtaatatgctacaacatagatgagccttgaggactttatgctaagtgaaatgatccaagtacaaaaacacaaattctgtatgatcccacttacatgaggttgtatttataggtaccaaatgaatgctgattttcagaggttgtcaataagaagtttttaggggttgtttaatgggtataatttcagttttgcaagatgaagagaggtctgagatggaatggtgtaatggtagtacagcagccatcatgaatgttcttaattccactaaactttacacttaaatgatttaaaaagtaaatgttgtgttgtatttattttaccacagtaatattaattaaaaacaaaagaataaagccacattccagttcatcagtattcttaaagggtggccttaaagttgaatgaatactccagatgtggtaccagatttctctttatgtattagtgaagcctaacacattagcattttacccctttattagttacattgtcctgttgacttgtactgacaaactaaaatctcctggttttataaagaatcctacttgttctgtgctcctctctctttaatttgctgtcatacttctaaattatcgattacatttttcctgattaaatttaatgtcttttttaaaaaggataaaaagtaaattatgtaaactctaccacaataataaaaaggatggaaacactaaatctatatgctttcctgtatgtaatattctagaaaaggctacttcagatttatgaagaacagatcagtggttgccaggaattaatagcaggagattcatttggcttacaaagtgctactattaggaaatttaggaaggtacttaagagattgtttgatactccaattgtggtggttacacagctggctgccatttgtaaaactcacatcctatggcttcaacagagtagcttctattgtatgtgaattttattgtatgtattaatatttaaaatttatttttaaatttataacaatttttttaattgtgaaagttcaccgcaaagaaaaacacagtgtaccaccttagcaagttcaaaatattcccataccttttgctaaaaatgacattttctgatgcttattattaggaaaatattgttagatgttctcaatagcttccagaataacctctttcagcagcattagttctcattttgtatacttatcattggtattttcttaggattggttcaccttttatgcctatttagattactgaaaatatgtttactctagaacggggaaacctttcacttttcacttggaaaaattgctttgatgaacaatggtaactaagtggtaggatcttttcactatatcaccagaaataagcagaataaagttttaacgcagtagttatagcatccacataagcattaggttctttctcatgtaaatgtcattttttacttgaattgaaagtgcttgaatatactgtgctttatgaagcaaacattattctaaacctactatccagcttagtcacaccatttataactttttgacactgtagtatcattattactgtaagcacttcgattgtgttgcatctgcaaacaatgtgcgtttctcctttctatgtggcttaaactctcagcttatgtttgtcattgttatttttgttgttataaaatatggatattctaggcatgtattacataactcattttgtttcctttccttcttaggctttggggtgaacctgttaatctccgtgaacaacatgatgccttagagttttttaattctttggtggatagtttagatgaagctttaaaakctttaggacacccggctatactaagtaaagtcctaggaggctcctttgctgatcagaagatctgccaaggctgcccacataggtaagtgctaattatgtttttaatgtatacttcgtgttgttttttttttaataatagtgtaaatctttcattagtacttatataaaagcagagtgtaccaaaagcctaggactatgaatgaattaaattcatatgcatactacactattctgatttttttcttcccaggaacatttggttagtacttcattacttcctcaattcattcttgtttgctttgtcttatcctgtgtcttaaaatggcattttccataaatctacacttattctttaaatagacattttctttttatgttctaactagcaatcagaatatttagatggaacttccaaagataattggcaagactggagtagtaacccattattcatggtttcagtttccacctcatcgttcactttagaaggccgaagcaggtggatcacgaggtcaggagattgagacgatcctggccaacatggtgaaaccccatctctacaaaaatgcaaaaattagctgagtgtggtggcatgtgcctgtaatcccagctactcttcaaaaaaaaaaattaagtggaagactccagaaataaacaatttataagttttaaactgtgccccattctaaataatgtgatcaaatttggggctctcctgctttgtccttctcaggatgtaaatcatccctttttccagcatatccatactgtctctgtgcctgttatctacttagttgctgtctcagttgtcagattgattgtcaaagatatcacacaacttagttcaaatacctcttattttacttagtaatattctggtaattcagatgcgccaaagaaaaggctaaaagcggctgctaatctattcctgtgcatcatttataaattaaacataatcacacttaagtatgtatgtttaggaagaaaacagaatatacatagtatacagagttcaatgctatctgaggttttagccatctcttggattttgaaacatctccgaaggaagtaacatttaaatgacttaaattactctcaattcttactattcttgagaagtgttacatatgcttgcacatcaaaccacttagcaagatttgacaagacaggaaacagtaaaaatatcagtagcataaataaaatatttattctaactaaacttgttattagcatccaagacttctatattataaggcattgggggttgttttgttttgttctgttttttgagatagagtctcactctgtcacccaggttggaatgcaaggacacaatcacagctcattgcagcctcaaccttccaagctcaagtagtcctctcacctcagcttcctaagtagctagcactgcagtcacatgccataacacccagctaaatttcgtatttcttgtagaattagggtttcaccatgtttcccaggctggactcgaactccaggttcaagctttcctcctgcctcagcctcccaaagtgctgggattacaggcatgagccactacaccttgccagagtatcacttttaattgtaggatcttttaattattttattctctaagatagccttatacttctctatggggtggttcctgatcaaaagcaacttgcataagtcatttataaatgtaatttcatttttgtgactgtcttgtttttcctgaataaatcaaaagtttccaactgtgagaaactggccagtggtggtagctcacacctacaatcccagcactttgggacaccagcactggcagatcacttgatgtcaggagttcaagaccagcttgaccagtatagtaaaaccccatttctactaaaaatacaaaaaacttatctgggcatggtggcaggcttctgtaatcccagctactcaggaggctgaggcagtaaaattgcttgaagccgggaggcagaagttgcagtgagctgagatcgcaccactatgctctagactgtgcaagagagtgagatactgtttagacattttgaaaatattggttagatgaatggatttgatggttgacgtgcctgccccatctcattttctgagtttgtagaaaattaccataatctgtgatgctgactcagtcccacattatttactctctactccacttatttatttatttatttatttaagacagggtctcactatgtttccctggctgaagtatagtgattattcaaaagtgtgatcatagcacacaacagcttcaaactcctggcctcaagtgaccctctcctacatcagccttttgagtagctggcactacagacaaatgccaccccacacctggctctctgcttatgtttacgactttatagacaagaacaccagaggcatttaagcatgataagtgtttgaacttacacattaggaaagtgtttatgacagaaattgagggacacttaaaaataaagttcattaatggtttagtataggctttttttagagcttgattaattcttatttttacctcgtcatgaattactgtttaaacagataatatgtatcatagtgtgatagaacataaagaacttaagaggtaaggccaaacaagctggttttcaaagcatcattccacctaataaactgtatcaaattattctttttgacttccctactcaaccccattgtcttagctttaaagtagggatggatatgtacctctaacagggcttttatcaaggtaaagatgagctataatctgtgtaaggaatctaatacagtgcccagtacaaaataagcaactgataaaagatattacttattaataacattgtatgattaatatacttgacatgatgtgttaaatactgcatatgtgtttttcatcaagttcacagttaaggaaaagatgtattcattattacttttgaaacggagtcttgttctgtctcccagacactcgagtgcagtggtgcaatctcagctcactgcaacttctgcctcctgggttcaagtgattcacctgcctcagcctcccaagtagctgggattacaggcatgtgccaccatacctggctaatttttatatatatatatttttagtagagatgggatttcaccatgatgggcaagctggtcatgaactcctgacttgtggcgatccgcctgctttggcctcccaaagtgctgagattacaggcatgagccacggcacccagaaggataagatttagaaaccaggctgggcacgatggctcacacatgtaatcctagcatttggggaggatgaggcagaaggatcacttgaccccaggagttgaaggacagcatagtcaagagcaagaacccatctctacaaaaaacaaaacaaaaaacaaaaaaaacttgcctgggcatgttggtacccacttgtaggcctagccactagggaggctgaggtgggaggatcaccaaaggcagcagtccccaaccttccagcacaagggaccagttttatggaagatcatttttttcacagactgaggatggggggtagttttggggtgattcaggtgtcttacatttactgtgccctttatttctgttattattacattataatatataatgaaataattatacatctcaccataatgaccataatgtagaatcagtgggagccctgagcttgttttcctgcagctatatggtcccatctggaggcagtgggagacagtaacagattatcacgctttagattcttacaaggagtgcacaacctacatcactcacatgtgtagttcatagtagggttcttgctcttttgagaatcgaatgctgtccctgatctgacaagagatgaagctctggtggtaatgcaagccatggggagtggtttaaatacagatgaagcttcaccagcttgcctaccactcactggctgctgtgcagcccagttcccaataggacacatatcagtactggctggggatccctggcataagcccaggagttcaaggctacagtgagctgattgtgccactgcacgccagcctgagaaaaaccctgtctctaaaagattaaaaaaaaaaaaactaaacctatagaatacattcttttaatttgtttcattaataatatctttaggtatgaatgtgaagaatcttttacaactttgaatgtggatattagaaatcatcaaaatcttcttgactctttggaacagtatatcaaaggagatttattggaaggtgcaaatgcatatcattgtgaaaaatgtgataaaaaggtatttttttttacttttgaaaaataatgattgcattgaacagaataggaggacattggagttgtttatgctcatcttcaaaattaacttctgctttatctctgctgttacagtggtagcagagaggtggtcaacatgataactggtttaaagcaaaataacattgagaaaatacagtgcgtggcagactaggaaaaacagaacatttttattgggtgaataattttgaaagtcatagaatcttacaagtttttccatctctgccctgaaatcaattgcaattgaatgcttcaatcttgaagagttggtagtagaaaacattattttcttactctagtttcctcttgaagtagggaagcttgctaattttattgggttacatcagattttcacaaccacgtgtagtttcactaacagatctcatttttttgaattttttttttatttcagacggagtcttgcactgtcatccaggttggagtgcaatggtgtgatctcggctcactgcaacctctgcctcctggttcaagcaattctcccacctcagcctcccaactagctgagattacaggcacctgccagcacgccaggctaattttttgtgtttttagtagaggcagggtttcactatgttggccaggcttgtcctgaactcctgacctcatgatctgtctgccttggcctcccaaagtgctgggaatacaggcgtgagccactgcacccagcccagatttcattttttgggcctagccagctaatttttatctctggcacttagtttgggagatggaatgataacatgtcttttaagatattatatattaaaaaatgtatgtgttttccttgaccttcaaaacccctcaccttcaagctgcctacatggttttgaacttatgcaccacttagattgtggtttgtttataaagccatactgcctgttacccacacttctgacagttgggactatttcttctcaccctttctgctactcttaatccacatgttttaaaataattatacataggtagtacctttttataagacagtgaggattaaattcattaatatgtgtgcagcacttagtgtattacctggtttttaagtgctataaatattagctgctattaaaattgcttatcatatgtcttcagtttactcacagcaaattctgttcattagcataaaagaaaacatcagaggagtaacacagtcaagtaatagtggccatatggaactacatagccatcagtgtctttatcagtaatgttttccagtttgcaagaaatgaaggacctttcatatccacagcttctgcaaacaccatttcctctaaacatgtatgaaaaatatttgaaaacaaaaaataacagtactaccataaaaagtaatataaattcaaaagccattacagtgtaataaccatctacatagcatacttaatacattgtattaagtaggttatgtagagatggtttaaactatacaggaggatgtctgtagatgatatgtaaatactgctccattttaaatcagaaacttgagcagacacagattttgatatttatgggggtcctagagccagtcccctacagataccaaaggatgagtatatttatatatttttagctttggtaagtaaggattctttaagtcagttatgacataattaccctgatggtatttatttttatttactcatctgcttataaataaatttaaatagactgtaaactttaaaattaacatgaaattgttttagtttctgttctagttacaagagaacatttgtttatattctctgtttattataggttgacacagtaaagcgcctgctaattaaaaaattgcctcgggttcttgctatccaactcaaacgatttgactatgactgggaaagagaatgtgcaattaaattcaatgattattttgaatttcctcgagagctggatatgggaccttacacagtagcaggtgttgcaaacctggaaagggataatgtaaactcagaaaatgagttgattgaacagaaagagcagtctgacaatgaaactgcaggaggcacaaagtacagacttgtaggagtgcttgtacacagtggtcaagcaagcggtgggcattattattcttacatcattcaaaggaatggtaaagatgatcagacagatcactggtataaatttgatgatggagatgtaacagaatgcaaaatggatgatgatgaagaaatgaaaaatcagtgttttggtggagagtacatgggagaagtatttgatcacatgatgaagcgcatgtcatataggcgacagaagaggtggtggaatgcttacatacttttttatgaacaaatggatatgatagatgaagatgatgagatgataagatacatatcagagctaactattgcaagaccccatcagatcattatgtcaccagccattgagagaagtgtacggaaacaaaatgtgaaatttatgcataaccgattgcaatatagtttagagtattttcagtttgtgaaaaaactgcttacatgtaatggtgtttatttaaaccctgctccaggtaagctttgaaagtagcttcttctaataaagaatagtttttatttggcttctaggataccttacagggcatcaaatgtgtttcacctttttcttcagttttcttttattttttcatagaatctttaacctcattttatatgaatgtgttggcttttttggtatagttattttaaaatgaaaaaattatgatatctgtacctttgaacagtgattcttaatatatggaaatatagaaaagcatttgttgtagtaattactattttttactcaagaattagtttgaaatatgggttagggaaggggtaagataatcactaagaataactaagattttttaacatagagtttgaagataaaaatgtttttaaccatatatatactttttatttaaagggcaggattatttgttgcctgaagcagaagaaattactatgattagtattcagcttgctgctagattcctctttaccactggatttcacaccaagaaaatagttcgtggtcctgccagtgactggtacatggttttggatttcattcttatagtacttatagttgtttggttctttattttttcctgttttattttttcctaaccatgaaaatatcatttcaaatttaaaatatagaataaaaatcttggcagtagtcatgagataaattaaatgtgcctttatttaaaaactggctcctagtcctgtgaatttgtatcatatctgagtctatttcatcatttaattattttatttttactagatgaaattctcacttatagttaaaaaggtagatgatttttaggtcaggtgtggtggcttatacctgtaatcccaacacttcaagaggccaaggtggcaggacttgaggccaggaatttaagaccagcttgggcaacatagtgaaacctcgtctcaacaaaaagttaaattacctcagtgtggtgactcacacctgtagtcctagcactttaggatccacctaatccaccacaggctgggatgggtagatcactttaggcctggagtttgaggctagcctaggcaacatagcaagatatcttgtatacaaaaaaaaaaaaaattaaaataattagctagtagcttgttcacgtagagccagctacttgggaggctgaggcagtagtatcatttgagcccaggagtttgaagctgaagttagctgtaattgcaccactacatttatttcagcttggtcagtagagactctgcctctttaaaaattaaaaaaagacaattttaaaatagctgtatagttttaagttactattaattataaaagtacggaatacattataatgccttgatttaacaactcttagcattgctcacgttgaaagatattaaagaaatgttacttcactggggagagtttgatcatggatttgcagagagctacatatatttcgtatttcattcctttttttgactctgtgggactaaagtcacacagctttatcaatctgatatttgtactaaaaccaactgaccgttaattggagagaacatctcagatcgttgtttggttcataaaaatctgtttcttccatgtaccaagcaaaataaacacatcactaaaatttgacgttcatagatgtttctgttttaggtatgatgcactgtgcgttcttctccgtcacagcaaaaatgtacgtttttggtttactcataatgtcctttttaatgtatcaaatcgcttctctgaataccttctggagtgcccyagtgcagaagtgaggggtgcatttgcaaaacttatagtgtttattgcacacttttccttgcaagatgggtcttgtccttctccttttgcatctccaggaccttctagtcaggtaattgcatggctttttttttttttaagcaattaaatacttagaagtaaattctgtttctgcaaattcatattagcaaatttatgttcctctctttgatgtattcaccataaacaaattcatacgtatgttatgacacttgtgagttcgtaaaattatttcatggtaatagtgattgctgggcattctgaaaaagaagggaaattccttttgtgtattcaattatttagttatttagtaaatccttaagtttgacatttttaagatttatttttataatggctaaaggcttttcagtgaaacactgtaacatgaaattgacattagtgataatgtaaataaataatccacttaaattcttctgttgaagttgccagggctttttgtttgtttgtttgtttgttttacagttacagtaacatacaagatctacaatgaagtctagccgagctcttcattctctctctcaaagagcaactatatttaataattttctttctgaaagatttgctccgtataggaacataaccttttgtatgcaaataaaagctgtttctgcatcttgatgctgataaaataatatttcatttttcacaggcatgtgataacttgagcttgagtgaccacttactaagagccacactaaatctcttgagaagggaagtttcagagcatggacatcatttacagcaatattttaatttgtttgtaatgtatgccaatttaggtaagaatttttcacaactatattaatgattgtttcaatttcaaatattaaatgggaagcacattttaatcaagtgattacatgtaatttgttctgaagtagaagcaatataccatattcatattcttaaaatgcattgcaaattttctgtgtaactttaatggcatttctcatattatatggtaatttatgcacttgttttatttctctggtaatctttaagatcacatactttgtctgattgatgttatctcttaacattgctttttgaaaaatactggcttcctggtcataccccacactatctgaatcagaattcctagggcttggataaggaatccatatttctaaaggaccccaagtgcttgtgttgcttatcaggtttaagaattatttctttaaagaatttgacatgtacatatgttttattaaaataaactaaattgaaattaataataatgcaaatttataatccactttaattcttctgttgatattaatattaacatcaattaagaaatgtgattttcagtatatctttcttaaggtagcctgctttttctcacatcaacctatttatttcttcttttgagtgcctctagaatgcttacccaaaaaattctgtttggcttattccattgtgttttgatggttttttaaaatatttgccttactccccagctaggtagcagaattcttgcaatgagtggggattgcatagaacaactcagtcattgttgaatgcatggatagattgccaggaatccacatcaaaaatcattatagtgttttcaatgttgttttatgttgtttttattgtgtggaaagaagagtaaatttattacagatgtagttatccaatttgaatatcagcaattcaggtgttagtacaacaatatttcaaaattaataatttattgatataattaaaatttattgactagttaaaattttagtgttagtaataagtatttgatcacattttttgaagatttgactcaattagcacatacacttttatatctatgatatttgtgatttttaaaagttaaattttataactgtgtatctatattacacttttatatctgtggtatttgtgatttttaaaagttattcagctaacttttaaaaatcacaaatatcttactacctaaagttaagttctgtagtcatgcattcttctaatgaaagtgttatatgtgttattaatctttaacttgagcaggaagaacattttatcagttattcttccttctctgatcatctctgtgttttctctttctctgccttgcctgactacatatgagattcctggatacttgtaatagagtaagaagcagatattacacaaacataaatgaagtcacttttatattttaaatataaaagtattaagtttatgcattcacaaaaatcctattttatactattttattttagatattggctgctcatatacaacacattgatggtttataatacaacttaatgataattttccctgccaagaattagtgtagatttatgactcttaagtcattagggcagtatgttttaggttttagaagtttttggatttcagaaaaatgagacaatgcgtttgccacacgtcgtgtgagattcccagtaaggcctcaggcagtaccctacaatcaaacatgctaatatttctgtgatgaataattaatatttcctttaagggtggaagaagcagcttgccaggagaaaggggttggttaggattttttaaacagagtggttggtgcatgcaggcttagtattgacataactttgcttcttagacacagtgtgaggtattcagtgtgactttatacagtgaagaatacagaatagcaggactgatttccaggattctctaattatgctactctgattttgtaaagtgttctggacattatcaggagggcatgaatggaccactagaggatcacaagaagcttaacttaaaaacatcacactgtctataacgtagaatggcttacgatagaccaagataagaaagtattaaaaattatcaatagaaaaaaattgcggctgctttatattagggaaactggcagtatggaagacaggtatgaacagatgcaggagctctttatgagttagaatcagcaggagttggtaatttgatatttgagaaagcggagcaggaaagagatgttaagcctacatccagcatgtgacttgatgaactgagaaaatagtagtgccattttctgatagaggaaaaaggagttgtgtgagcagattgcattttaaaaacatatgggatacctatataaagaaatccagtagtgggatacatatgtccagaatttggaatcatctaaaatcatttggatacatctattactatagatgtagttacaaaaaacaagccacgtaagggaatgtcctagaatggaaactttttctagaacagtttttatggctcattttatttagtttctgtcttactttgttttatttttatttatctattttatttttctgagatagtgtctcgcttagtcgcccaggctggagtgcagtggcacagtctcctctcactgcaacgtccgcctcctggattcaagcaattctcctgcctcagcctcccaagaagctcggattacaggcaccaaccaccacatcccagctaatttttgtatttatagtagagatggggtttcaccatgttgaaaaggctggtctcgaactccagacctcaggtgatccacccgccttggccttgcaaagtgctgggattacaggtgtaagccactattcccagctagtttctgtcttactttcttatgatgaaagttattctttagctagggccttccagcttctctaggccctagaaagtatacatttcccttagtacctaggctaattggaatgccatagtcatgatcattatttcagggttacggtactgtatcttatttaattatatcagtgtattttctgttctgtcagcattctgcctgtattgtttctattctaagcaaagagaatgagcttttagtaatataacttacaaagagctataataattaatttttaattattgcagtacttaccctcttagtttttttttctacatattatttttctgtccttttttataggtgtggcagaaaaaacacagcttctgaaattgaatgtacctgctacctttatgcttgtgtctttagacgaaggaccaggtcctccaatcaaatatcagtatgctgaattaggcaagttatattcagtagtgtctcagctgattcgttgttgcaatgtgtcatcaacaatgcagtcttcaatcaatggtaaagtagcatgttccatttcttttacagcagtttaaaaataatgctagctttatgtagcacttgataaaaagtagctctgaagatttataaaaatgaaattagtctgaaggcctatgttctagaatattatatttcttaagttttagctttttcatatgtttaatagggagtttattttttaaatgtaggatactgtgatatcttatgaaatgcttagtgtaaaaatgataaactttgtctttagtgtcagcatttatattttgcattttatcatcttggtatatacctgaccatttaggtgaatttttaatttaatttaaaatcagattgtattttttaagttaagaagtttattattataattttgtgaggaattctattggtttttcattgataacaaatctgttctaggtaatccccctctccccaatcctttcggtgaccttaatttatcacagcctataatgccaattcagcagaatgtgttagacattttatttgtgagaacaagttatgtgaagaaaattattgaagactgcagtaactcagaggataccatcaaattacttcgcttttgctcttgggagaatcctcagttctcatctactgtcctcagcgaacttctctggcaggtgaaagaaaaataaacatttatatatctgtaattctattcattttttaaaaatacataattcactatctcttacctatttgtaggttgcatattcatatacctatgaacttcggccatatttagatctacttttccaaattttactgattgaggactcctggcagactcacaggtgaatacccttttgccaccagaataattagaatttcccaagttcttgaaatgactggaattgtcatttgccatacacattttttatctttgatactccgcttaatgttgtctttaaaaacatatgaagaaaaattgccacttacttgcattctttttttttttaattatactttcagttctagggtacatctgcacaacatgcaggtttgatacataggtatacatgtgccatgttggtttactgcacccatcaacttgacacttacattagctatttctcctaatgctattccacccccgcccccaccccccgacaggccctggtgtgtgatgttccccgccctgtgtccaagtgatctcattgctcaattcccacttatgagtgagaacatgcagtgtttggttttttgtccttgtgacagtctcctcagaatgatagtttccagcttcatccatgtgcctgcaaaggacatgaactcatacttttttatggcttcacaatattccatggtgtgtatgtgccacattttctttatccagcctgtcattgatggatacttgggttggttccaagtctttgctcttgtgaatagtgcctcagtaaacaaacatgtgcatgtgtctttatagtagcatgatttataatcctttgggtatatacgcagtaatgggatcagttggtcaaatggtatttctagttctagatccttgaggaattgccacagtcttctacaatggttgaactaatttacactctcaacaacagtgtaaaaccgttcctattcctccacaacctcaccagcatctgttgtttattgacattttaagaatcaccattctgactggtgtgagatggtatctcattgtggttttgatttacatttctctaatcatcagcttttttccatgtgtctgttgcctgcatagatgtcttcttttgagaagtgttgttcatatcttttgcccacttcttgatggggttatttgtttttttttcttgtaaatttctttgagttctttgtagattctggatattaggcctttgtcagatgggtagattgcaaaaattttctcccattctgtaggttgcctgttcactatgatggtagtttcttttgccatgtagaagctctttactttacatttgtctattttggcttttgttgccattgcttttgatgttttagtcgtgaagaccttgcccatcctatctcctgaatggtattgcctaggttttcttctagggttttcatggttttaggtctaacatttaagtctttaatccatcttgaattaatctttgtataaggtgtaaggaagggatccagtttcagctttctacatatggctagccagttttcccagcaccacttattaaatagggaatccttcccccattgcttgtttttctcaggtttgtcaaagatcagatagttgtagaagtgtggggttatttctgaggcctctattctgttccattggtctatatatctgttttggtaccagtaccatgctgttttggttactgtagccttgtagtatactttgaagtcaagtaacgtgatgcctccagctttgttcttttggcttaggattgtcttggcaatgcaggctcttctttggttccatactaactttgaagtagttttttccaattctgtgaagaaagttattggtagcctgatggggatggcattgaatctatagataaccttgggcagtatggccatttacatgatattgattcttcctatccatgagcatggaatgttcttccatttgtttgtgtcctcttttatttcattgagcagtggtttgtagttctccttgaagaggtccttcacatcccttgtaagttgtattcctatgtattttattgtttgaagtgattgtgaatgggaattcattcatgatttggctctctgttattggtgtataggaatgcttgtgatttttggcacattgattttttatgctgagacgttgctgaagttgcttatcagcttgaggttttgggctgagacaatggggttttctaaatatatagtcatgtcatctgcaaacagggacaatttgacttcctcatttcctaattgaatatcctttatttctttctctttcctgattgccctggccagaacgtccaacactatactgaacaggaatggtgagacagggcatcgctgtgttgtaccggttttcaaagggaatgcttccagtttttgcccattcagtatgatattggctgtgggtttgttataaatagctcttattttgaaatacattccatcaatacctagtttattgagagtttttagcatgaagggctactgaattttgttgaaggccttttctgcatctattgagataatcatgtggtttttttcattggttttgtttatgtgatggattatgtttattgatttgcatatgttgaaccaagcttgcatcccagggatgaagcccacctgatcatgatggataagcttttggatgtgctgctggatttggtttgccagtattttcttgaggattcctgcatcaatgttcaccagggatattggtctaaaattctctttttttattgtgactctgccaggctttggtatcaggatgatgctggcctcgtnnnnnnnnnnnnnnnnnnnnnnnnnnnnnnnnnnnnnnnnnnnnnnnnnnnnnnnnnnnnnnnnnnnnnnnnnnnnnnnnnnnnnnnnnnnnnnnnnnnnnnnnnnnnnnnnnnnnnnnnnnnnnnnnnnnnnnnnnnnnnnnnnnnnnnnnnnnnnnnnnnnnnnnnnnnnnnnnnnnnnnnnnnnnnnnnnnnnnnnnnnnnnnnnnnnnnnnnnnnnnnnnnnnnnnnnnnnnnnnnnnnnnnnnnnnnnnnnnnnnnnnnnnnnnnnnnnnnnnnnnnnnnnnnnnnnnnnnnnnnnnnnnnnnnnnnnnnnnnnnnnnnnnnnnnnnnnnnnnnnnnnnnnnnnnnnnnnnnnnnnnnnnnnnnnnnnnnnnnnnnnnnnnnnnnnnnnnnnnnnnnnnnnnnnnnnnnnnnnnnnnnnnnnnnnnnnnnnnnnnnnnnnnnnnnnnnnnnnnnnnnnnnnnnnnnnnnnnnnnnnnnnnnnnnnnnnnnnnnnnnnnnnnnnnnnnnnnnnnnnnnnnnnnnnnnnnnnnnnnnnnnnnnnnnnnnnnnnnnnnnnnnnnnnnnnnnnnnnnnnnnnnnnnnnnnnnnnnnnnnnnnnnnnnnnnnnnnnnnnnnnnnnnnnnnnnnnnnnnnnnnnnnnnnnnnnnnnnnnnnnnnnnnnnnnnnnnnnnnnnnnnnnnnnnnnnnnnnnnnnnnnnnnnnnnnnnnnnnnnnnnnnnnnnnnnnnnnnnnnnnnnnnnnnnnnnnnnnnnnnnnnnnnnnnnnnnnnnnnnnnnnnnnnnnnnnnnnnnnnnnnnnnnnnnnnnnnnnnnnnnnnnnnnnnnnnnnnnnnnnnnnnnnnnnnnnnnnnnnnnnnnnnnnnnnnnnnnnnnnnnnnnnnnnnnnnnnnnnnnnnnnnnnnnnnnnnnnnnnnnnnnnnnnnnnnnnnnnnnnnnnnnnnnnnnnnnnnnnnnnnnnnnnnnnnnnnnnnnnnnnnnnnnnnnnnnnnnnnnnnnnnnnnnnnnnnnnnnnnnnnnnnnnnnnnnnnnnnnnnnnnnnnnnnnnnnnnnnnnnnnnnnnnnnnnnnnnnnnnnnnnnnnnnnnnnnnnnnnnnnnnnnnnnnnnnnnnnnnnnnnnnnnnnnnnnnnnnnnnnnnnnnnnnnnnnnnnnnnnnnnnnnnnnnnnnnnnnnnnnnnnnnnnnnnnnnnnnnnnnnnnnnnnnnnnnnnnnnnnnnnnnnnnnnnnnnnnnnnnnnnnnnnnnnnnnnnnnnnnnnnnnnnnnnnnnnnnnnnnnnnnnnnnnnnnnnnnnnnnnnnnnnnnnnnnnnnnnnnnnnnnnnnnnnnnnnnnnnnnnnnnnnnnnnnnnnnnnnnnnnnnnnnnnnnnnnnnnnnnnnnnnnnnnnnnnnnnnnnnnnnnnnnnnnnnnnnnnnnnnnnnnnnnnnnnnnnnnnnnnnnnnnnnnnnnnnnnnnnnnnnnnnnnnnnnnnnnnnnnnnnnnnnnnnnnnnnnnnnnnnnnnnnnnnnnnnnnnnnnnnnnnnnnnnnnnnnnnnnnnnnnnnnnnnnnnnnnnnnnnnnnnnnnnnnnnnnnnnnnnnnnnnnnnnnnnnnnnnnnnnnnnnnnnnnnnnnnnnnnnnnnnnnnnnnnnnnngagatgggtctcctgaatgcagcacaccgatgggtcttgactctttatccaatttgctggtctgtgtcttttatttggggcatttagcccatttacatttaaggttaatattgttatgtgtggwtttgatcctgtcattatgatgttagctggttattttgccagttaactgatgcagtttcttcacagccttgatgatctttacaatttggcatgtttttgcagtggctgataccgcttgttcctttccatgtttagtgcttccttcaggagctcttgtaaggcaggcctggtggtgacaaaatctctcagcctttgcttgtctgtraaggattttatttctccttcacttatgaagcttagtttgtctggatatgaaattctgggttgaaaattcttttctttaagaacattgaatactggccccactctcttctggcttgtagggtttctgctgagaaagccattgttgttagtctgatgggcttccctttgtggttaactcgacctttctctctggcttcccttaacattttttccttcattttacccttggtgaatctgacaattatgttcttggggttgctgttcttgaggagtatctttgtggtgttctctgtatttcctgaatttgaatgttggctggacttgctcggttggcaaagttctcctggataatatcctgtagagtgttttacaacttggttccattctccccatcactttcaggtacaccaatcaaacgtagatttggtcttttcacatagtcccatatttcttggaggcattgtttgtttctttttactcttttttctctaaacttttcttcttgttttatttctttcatttgatcttcagtcacggatactctttcttccacttgatccaagtggctattcaagcttgtgcacgtgtcccaaagttctcgtgccatggttttcagcttcattagttcatttaaggttttcactgtttattctagttagccattcgtctaaccttttttcaaggtttttagcttccttgcgatggtttcgaacatgctcccttagctcggagtagtttgttattaccaaccttctgaagcctacctctgtcaactcatcaaagtcattctctgtccaactttgttccgttgctggcgaggagttgcaatcctttggaggagaagaggcgctctgatttttagagtgttcagcttttctgctctggttactccccatctttgtggttttatctacctttggtctctgatgttagtgacctacagatggggtgttggtgttggatgtcctttttgttgatgttgatgctattcctttctgttattattttccttctaacagtcaggtccctcagctgcaggtcagttggactttgctggaggtccctccagacgctgtttgcctgggtatcgccagtggaagctgcagaattgcaaatattgcagaacagcaaatattgctgcctgatccttcctctggaagcttcatcccagaggggcacccgcctatatgaggtgtctgttggcccctactaggaggtgtctcccagttaggctacctggcggtcagggacccacttgaggaggcaaactgtccattctcagagctcaaacactgtgttggtagaaccacagctctcttcagagctgtcagacagggatgtttaagtctgcagaagttatctgctgccttgtgttcagctaagccctgcccgcagaggtggagtctagaggcagcagaccttgctgagctgcggtgggcggaagcagttcaggcttcccagctgctttgtttacctactcaagcctcagcaatggtggatgcccattccccagccaggctgctgccttgcagttcgatctcagactgctgcactagcagtgagcaaggctctgtggatgtgggacccaccgagccaggcatgggagagaatctccttgtctgctggttgctaagaccttgagaagagcgcagtatttgggcggaagtatcccttttttccaggtacagtctgtcacagcttcccttggctaagaaagggaaatccctggacaccttgagcttcccaggtgaggtgacgccctgcccttcttcggatcaccctccgtgggctgcacccactctccaaccagtcccagtgagatgaaccaggtacttaagttggaaatgtagaaatcacccatcttctgcatcaatcacagtgggagctgcagaccagagctgttcctatttctccatcacattcttttctcttaatgttccactttcatccttaatattaggttttgtcttccatttactgtttttatttttttaaggaacccagtaaggcttttgatacctccttaagttctgttaatattttaggattatgatgtactttttctagaattagttacaataggtaacacttaatccatcgcctctaagtagttgtattagtatataagaaatcggagtggtaatttttcagaactgagattatgctactaacaggtctataaacatacccctagaattctcaattgtgttctcttcagtaaaatcagtctaagaattatactgtagaattagttgcctaattctgcctgaaaattctaacttttctcctcgtgagaattttaatatagcttgttttaggaacacacacaaacatacacacacacagaaacacacctattagacataataataagcaaaagaacccgaaaacaaatgtattataaagctgcagaacacagtgcttaaaggtaaatcattgtaatcttgaattttagagaaccgaaaatattagatttcaacaattaaaattctcaagttgtgattcagtccagcatcaagcagatcaaataatgtaaaagtggcattagatgggtaatgttttatattagatctcatttgttttaatgggttccaatttttatttaaaatttttactgtgtttgaaagaatttttagacaaatattgtttgctatgtgattttattttatttttttgagactccttcttgctttgtcatctggctggagtgcagtggcacaatctcagctcactgcaacctccgtctcccggattcaagtgattctcctgcctcagcctccctagtagctgggactacaggtgcaygccaccacgcccagctaatttttttgtattttagtagagacggggtttcaccatgttggccagggtggtgttgatctcctgacctcgtgatccacctgcctgggcatcccatagtgttggaattacatgcatgagccactgcacccagccagctatgtacatcttgtagttactataaggctaaatcacatttttagccttcttatcttatccaaggaagtgattttagtaaaggtacacatgttggattaatgtggaaaatagtagacttttgtacaaaattaatattgtccttacaaacataagcttgaagtgttttgtataatgaacattgagtttattcagtaaacagtattcaacagatatatatatcaacatctgctgtgtgccaagcagtgttattatcacttcattataaactgtaagagaataagaaaatggaatatgatacatcacaagtgttgcaggaagcatatccatgttattttttgtctgaaatgattagatttcaaaagttgccctttccaaacaaaagttgtattataaatgtctctgaagctaacaaaaaaaacctaacatctgacctggaatataaaaatactttgttaagtaagatacatggtatagagaaaagaaatttcaagttatttttctgtgtaggtaatgacacaaaagaaagaaagcatatatttgtttgtaacttttttttgagacagagttttgctcttgttgcccaggctggattgcagtggggtgatctccgctcactgcaacctcagcctcccaagtagctgggattacgcacatgcaccaccatgcctggctaatttttgcatttttagtagagacagggtttcaccatgttggtcaggctggtctcaagctcctgacttcaggtgatccacccagctttgcctcccaaagtgctggtattacaggtgtgagccaccgcgcccagccttcgtttgcaattttttaaattgactattaaggagaaacagggaagagttggctatgtaaatatgttgcagttaggcagtcctgaaataaaataattgatcattagcaaatcaggcagattttatcattgtcagtgaaaattgctttatgcgtcatgtatgtgttttcacagtatcagaattcaagttaattttatactgccaatttatatcattgttccataatcagtaagtttttttcaactaaagaagtcttaaaagactaatagctttagtaaagtaatgtggtgaactggacatggtggtgtgtttctgtaatcccaactacttgggaggctgaagtgaaagtattccttgtattctggttttgaggctacagtgagccacaaactacaatcatgccactgcagtccagcctgggacacagagcaagaattctatctcttaaaaaaaaaagaaagaaagaaaggaaaagaaatatgaaaaattatgtggcatcattgtccttaatttgctcttagtaatttttgtgagcagctggttagcaatctaagtgagattcctatgtctgactaagtcagattgctaaccagctgctcaagttgccagatctgtaatatttggcaagctatttgtgctgtctgtacttgttttctcatttgttaaaatgttcctaattttaatttgttcctacctacttaggaaagtaactctaatgttaattagattatatgattacatcaaaaaagtactaaatggcacataattaggaactcaaatgttagctactattggatattacaaagttttacatctgcttctgttttagaattcataatgcacttaaaggaattccagatgacagagatgggctgttcgatacaatacagcgctcgaagaatcactatcaaaaacgagcatatcagtgcataaaatgtatggtagctctatttagcagttgtcctgttgcttaccagatcttacaggtgagggtttttctcttataaatttgtagaaacctctgtcacaagtaaggaaatgatcgtgaaatttttgtattagcattttaagctgatactgaaaatcattctraattctaaatagttttatttttttctaaagggtaacggagatcttaaaagaaaatggacctgggcagtggaatggctaggagatgaacttgaaagaagaccatatactggcaatcctcagtatagttacaacaattggtctcctccagtacaaagcaatgaaacagcaaatggttatttcttagaaagatcacatagtgctaggatgacacttgcaaaagcttgtgaactctgtccagaagaggtaaaaaaaaaaaaggctaccaatggacagcagatggaaatgggaaaaagaaaagtatttttttaatgtgtaggcccatgtttattaatattgtgcttaaaaaaatcatgtgcagttttgtttgctttagtggttagcttgatttgtttgatcttaagttaacaaaggagtttccttttggaaaaaatttctgtgaaattgtctaaaaatcacatacctgagagaattcagatattcttttgtttgttttttgtctttgtttgcttttgctttttctttttttttttgagtctcaccctattgcccaggctgctgcagcagcgtgatctcggctcactgcaacccccacctctcaggttcaagaaattcttctgcctcagcctcccgagtagctgggattacaggcagccaccaccatgcctggctaatttttgtatttttaatagagacaggatttcaccatgttggccaggctggtctcaaatcttgaccttaagtgatccacctgcctggcctcccaaagtgctgagattataagcatgagccactgcacccggcctgttttcttatattttaaattatttgcagtaaatgcaaagatgttaaagaggccagctttgtgcattttttaaaagtttattctaaatgaaggaaattaaatataaatttgaagttacttttataatctaatgcttaatctctttaaatatttaaaattaggagccagatgaccaggatgccccagatgagcatgagccctctccatcagaagatgccccattatatcctcattcacctgcctctcagtatcaacaggtaaaaaggatttttcatttttatcccccaaacccattttgatgcttkacttaaaaggtcttcaattattattttcttaaatattttgaaagtccaaactttctctgtacctggctgatatttaaaactggataaactgttccaaaccaacatggagtgaagatggatccactgtgactgtaaagtaataaattatctagaacagctttgacaagatgatcagtagagtgttagttgaaatgacgtcatgttttattttgccattgtgatatgttctttgtaaccaggtactacccccttttgctatttgctatggttaataaaattgtgtgatatttcagtaattgttgaagaaatgtgaaagcaaaagtatctgagattcagtggcagtaaaaattcagtttgactggctttaatagatggttaactgaaaaaatataacttcggaaaaatataaataaactttctgataagttcttttgcaaaacaggtatatttgggaaaagattctgggaagattagccgcaaatgtggctaatgcagtcattttaaggccatggttcttaaatttaatgtacatcataatcatgtaaatgcactgattgagaacagcaattgcagggtccagaaattgtcactctacagggctatcgtggggctcaagaattggccttttttttttctttttttgagagagtctcaccctgtcaccagtctagagtgcagtggtgcaatcacagctcactgtaacctccgcctctggggttcaggcaattctgcctcagcctcccgagtagctggactataggaacgcaccatcacgcccagctaatttttgtatttttagtagaggtggagtttcaccatgttggccaggatggactcaatctcttgaccttgtgatctgcccgccttggccccccaaaatgctgggattataggcgtgagccactgcacctggccaacaattgtcacttcttataaatttccaagtgttgctgctctggggaaaacacatggaaaacctttctgcttagcacaataattggccatccaagacttttttattttagacctagtctgactctgttgcccaagctggagtgcagtggcctgatctcggctcactgcaacctccacctcccargttcaagccattctcctgcctcagcctcccaagtagctaggactacaggcttgcatcactttgcccagctaagtttttcatttttagtagagacagggtttcactgtgttggccaggctagtcttgaactcctgaacttgtgatccgcccaccttggcctcccaaaatgctgggattacaggtatgagtcactgcacctggccaagactcttgggtacattctctagggaggtgaaatgaatttttatcagaagctgacacatttatgtgtgtgcactttctcaaaacactttattcatatggtacttcttctcttcaaatataaaaatcagattgtaagttctttttttttttttaaagatccaggtttaaaaatgtctactttttgaccaaccttaccccatggttttaaatttttaattgttaatatttgaaaagtgttacaatgctggtctctttcaccctcttagaataatcatgtacatggacagccatatacaggaccagcagcacatcacttgaacaaccctcagaaaacaggccaacgaacacaagaaaattatgaaggcaatgaagaagtatcctcacctcagatgaaggatcagtgaaaagcaataattaactgcttcctttatgactatgcactaaggtcttatagtccaaactttctctgtgtctggctagtattgaaaactagataaactgctccaaaccaacatggagtaaagagcatattcactggtttatttgcagtaatttgcaatttgtcagtgtataagacacatgcagggtgaagtgtacagagttttgtaacaaatgactggtcctaatctgtaaatgagaaaggtatatatactatgttaatgtctgactgttaattcttaagcaagaaactttttttgatgaaaacaagtcagatctacacagtcacacaattattttttgttgtgttcactacattgtgcaattgatattgcctgctttgagcagtttggtcaacttaccaacttccccccaaaaaagggaacataaaagagcccatctttgtcagtttacaccaatagtttcttgttaatccttctttcctggatatataaggctggtggtaacttttgaattatatggttgatgtggaaaattggcagtgtaacatttctagatacttttcattacctttttattctggtatataggctaaccactttaaagctattcttatgctgtaacagttagcatggcttcacactgtttgtgtagccaagaggacagaattacatgaatgacagtgcccagagtgacagctgtatattgctcagagcttttatttcttatacctagaataaatataaaatgggggaaaaatgtgacagacaagcagtttttcattgcacacatattcttcacatttaatgtttgatagttcaatttcttgagctgaagaatatcaaagtatcgataatacgaattttaaaatattaaaaccaatacacaaaattttcctatgtcagaatgtggtggagcataatagattgtatttggtgtgcttgcgattttttttttccatagaatttattaagtgaagtttctaaaactttgcttctcctgatcccggtgaagtgtacatcataagaatccatagtactttgaagtaccattgcaccaagatgtctgactgaattcatagtcacacttttatttgaaagaaagaattgttgtagttttttttcattattctaaaactcttgttgttagatacaagatttaattaagatctaagctcctgcttatttaatgtaattctaaggtaccattttagaaaaaacatttgttttaagattccaagaaacctgtgagttaatactatatttaaaagagaattggtaaattttgaatgtgtgtaatattttggaacctgtttaaaaaccaaatatacctgcaaatagatacagcctatcctatactatttaaatgtttggctgttttgttttatagaaattattttgctgaattcacaaataaaatttaagaagacttttgtcctgtggtgtgtttttgtttcttgttactctcttgtagtattcttaaggactacgcatttaaattaattatttgcatggcatgcgttggcatgacactgaattcagcatttcagacacattgagtttttatgcataaaaaaattggcccttggcctttcattaaggacctaaaaaaagaaaaaaaaattaagatattggccttgtaaaaaaattttctagcttaatcatttttgtgcttttggcacatttttacatagttgattcttgttattcacagttataaagtcaccatgaataccaaattagcaaatgttgaactattttatacaatcaatatttaaaatgcttatactctcccaaactaccactctgtaacctgtgtaatatgttcatttgatgtaatatctctttgcccattgttggacacagtagaccctggaatgtgttgcttagtatgaagaaatgcaattcatttgtccaaattggttataatatctttttttatatatagcattttaagcgttatcactgacctctgcgaatacagtcgtcaggatccattaatgccctggcagggctactgccattggtccattgtaatccagctatgttaagggccttcctattcaggccatagttatttgcagtctgtgtctctcttctcacctggaaatgtatcttgggattttgttcctcacagagtacaagaggaatatgtctagattcaccccatctgcattactgctgcatctctgtaaggtgaccacctcaagcaaatccaccaggatatcaacttgctggttctagtcacctccccatcgtcctggagagggtccttcgggtggatgtcaacatacccttctttaacataccccttaaattccaccttgtactttccaaagggctgtgtcacatactggcatatgcttaatagttcagttttccattgtccctgtggccaagccgtcagtcactactcatgaattggcaagaattcaaacaaatgcagtgtttaaaaaaaaattgtaaattttttaatactcataagaaaacaacatgcagttcaaccattcaactaatttgtttattctatcttcaatcggtcttttcatttctagtctctatgaaagcctgccaacaggacattgttcacccaccttgaaactgccatctgtaaaccaagcaggtctttcttcgtcagtagggagctattcaaagggtattgcccatgcaaaagtagcatgcagtagttcctgaagtggttccaaacttgatcataggaaaaaagagactacctgctctttaacatgattagcacctccttgcactttcctggtaacatgtccgtctataaatccattttgcatgttattttggacctcttctgagcacttcctcattagaatgttttcttaattcacgcaacacattataggtgtttcagattttaagattatggtcttcagtctcagaagcaggcaagacaagctagtaattagcttgtcaaggcgaactacaccaatgcaaggcaagctattaagtatctctcaaatggcacatattatatcatggcatccaggaatttcctggtccaaaattcccagctattgctgcagagtggcatgtgcagttgtttgtttgtttaaccatagtttcagtctgcctaataacctgcaagcacttccaaaatcagattgtggatcataacgccccaaaatattgagagagagcactttttgaaattcagacatggcctgccttagtgcaatttcttaattaaagaaaccccactctctttttttaagttgatgcattataattgtacatatttatgaggttcaaatgatattttgatacatgtagacaataatgaccaaatcactaattggtatattggtgtattggtaattggtatgttagtcacttcatacatgtatcatttatttgtgttgagcacattccaaatctaatcttgcagttatgtggaaatataattattcatacctatagtctccctcctatactatcaaacgttaggacctattccttctaatgctatttgtacccattaactaactcatctcttcccctgcctagtgttcttcccagcctgtggtaatctttctactctctaccttcatgagatcaactttttatttcccatctatgaatgaaaacattcctggattttttcaattaatgtcccttcaatgaaacttcttttgggtagtgttctggaaaggagctagaaatattttcggatgtgtaataggaatccccaaaatcctattcaaccaaatgctgggcttcctgtttgcttaggagtacgtaatgacagaaattcattctaggtcacctatgaagtgtcacagtgtctctttccaggtgtttctaagaatttcaccatttgggtgcatctctggatttatgatctctccttgttggtcatgtgaatcaacatatataagtctgtgttagattgctcttcagtttcagttttaacatgtcatcttcagtatgttgtagtagtacattgaagaactgcatcaagcccaaatctctcataaccaagttatgatagtaatcttatggcaaaatattaatagttaatgtcatttgggatcttttccacatgcagttgactcttgtaagattgagacaaagaaaaacatttgcaagatgaatgcatatcactatcctatagtctctttgttgtactgtggaaaggaatgtcgacactattgatggtatatgcagcactacgttattctagatttgtttccatgaaccaactctttttctcctaggtcacaaaaagcttactctagataatttgtcagtactagtcctttcgtttctaattaaattagttaaagtgttttttgtttggggttttattgttgttgtccacaaagtatcctacgctgtttcaacaatttttatgagcataggtagttctagttgttcctattttaatgtattcaatcaagtctggactgagggcaaatttcatgccttctattttactataagaagtagcatagggtgagtgcagtggctcatgcccataattccagcacttcgagagactaaggcaggtagattgcttgagcccagaagttggagaccagcatgggaaacatggcaaaactgcatttctacaaaaaacacaattagccaggtgtggtgacaggtgcctgtcatctcagctactggaggctgaagtgagagaatcatctgaacccaggaggtaaaggctgcagtgacccattatcacgccactgctctacaacttggatgacagagccagactggagagaggttggagaagctggataggcctgtaccatcacagacaaaccacatcacaaagtttcttcatctcaaattttcttgcagatattcaccttaaattaatcactgttggatcccctatcctctcaactgtagtccccaccaggtcttggaatcacagtgcatggtgttcccatgtcattgaatcccagaaaaatacttaccctctgcacatttgatgtatatatatgtgctttgggtccccagtctggaatcaaatcagtatgtcctgaccctatgccaatcttcatcttgattcatctgtccatcagataattacccagacaattcaaaggcaagtttcttattgttatcttttactcctggctttttaaatacttggaaactgagataaatcgtgcagatttatttagggccccttttcctttccttttctgtgaatatctcttttctgtgaatcagtctgtgaatgaatgtctccctccttttgctttttccctttcctatgaatcttctgagtacctgtaaggcctataaaaggaatctgagacaacatatccaatatgacttctaggactgtttcttagttttgattcagtaaggctataggatatatcgataaaaagggacccccaccccaataagacagcatttgctggtagctggataaggggtcttactcagtagatgaatatccagatcatcttgaggccagtgcaggattgcatgcccatgagtatatcacttgtcatagatggaaggaaaacgacttctcatggtaatcaaactttacagtggcttttatccagaagctagctttctcctggaaatcacgtacagccctctgttgttcataccaagctgtgaatcttatatcaatcaaaacacagtcttctgtttaatagcattccgaaccaaatgcactgctcttaggagaagtttgttgctcttacaatccatttagtaaagattcttcagaaagctgacaataccagtccacaaaataataaaacccttttgcactctatacttgcttacttcttgtagcttattggttctacccttcttctacttggagtgttgcacttgatcttagtcaagaggctgaaaagtgattacctagacaattggtttggtgatgtgtagtcctagatgtgttagctgttgtgttgatacaattttcccttttctttttttcttttttttttctttttttttttttttgagatgaagtctctttctgttgcccaggctggagtgcagtggcatgatctcagctcactgcaacgtccacctcctgggttcaaatgattctcctgcctcagcctcctgagtagttgggattacaggcacatgcccacacccagctaattttttttgtgtatttagtagagacaaagttttaccatgttggtcaggctggtgttgaactcctgacctcgtgatctgcctgcctccgccttccaaagtgctggggttacaggcatgaaccactgtgcccggcccaattttcccctttcatagtagtcctcaggctatcagtcaaagctgagactgaaatgtaaagatacctgaaatctgagcttggcccagtattagaatttgccccaacgctcttttacttttttttttttttagctattacagacaacaataaccaagggattgtatatttagcttacttgtctttttgtatttccttatgtacccagtaagccacacctgtttttagtgcatttaaaataatgaggttggcacactgactctcacataatcccagcaccaagagaggctgaggtgggcagattacctgagcccaagcatttgagagcagcctcgacaacatagcaacaccctatctctacaaaaaataaaacattagccaggtagggtagtgcaggcctgttttacctgctactgttttgggagactgagtcagaaggttgacttaagccctagaggtcacagctgcagtgagccatgattgcagtactgcattccatcttcaacagtagagtgagaccctgtctccaaaaaattaataaaataaaacaaaattaattaattaaaaataaaataatgagaagtacaattgtcatggtttattgtctattcatcattctactaaatgctaagattagcaatgctatgggtcccagacaaaacttgaaatacttttctaactccatgttcaagaacatcattttttcaaatgaaatgtgttttagaattaaagccaggcagctttagtttggcttctattagtctttttatggcaagaagtaactttcttgctgaaagctgcaaattaaaggtagtaagtttggaaacagttccaaaactatgttatttcttcttgtgtaccttcatcttttaaccatatcattataaacattctcagtgtttagcatcatactaaatcaaacttaactgctcctgctttctagtacctctctgtactagaagcaagaacataggtaactaaattagttaatagtgcttttccattgtatgcagaactaccatagatttcctttgactttccttcttaccctcatctgaaatcaatatgactaaagacaattaagaaaacccacaatttgtggccattatgctaaagctagcatacagtgaagtgttaagagtagtaggagctctattattagcaataggagctctgttg

SEQ ID NO: 93221 - DNA, 110782 bp, Homo sapiens
  misc_feature (1)...(110782): n = A,T,C or G
ttttgttttgttttgttttgtttcgctttagagacggagtctcactctgttgccgaggctggagtgcagtggcactatctcggctcactgcaaccttcgcctcctgggttcaagcaattcttgtgccttggcctccccagtagctgggattacaggtgcgtgccaccatacccggctaatttttgtattttttttttagtagagatggggtttcaccatgtgcccaggctggtcttgaactcctgacctcaggtgatccgcctgcctcggcctcccaaaatgctgggattgtaggcaagaatggttatcttggtaggcaagtcagaatctttgcctcacaatgatcatttaaatacattcagaacccccaaactgctaatatggttttatttatttatttattcattcatttgtttattcatttatttatttaggcctgaatcttacacagagaatttatatatagatattagctacatatactttgaatatgctatacatcgatattagcacctcacgtactttgcaattaagcttctgtaatgtcatgtgatttgtttttggaaaggaatagtggacaggagagtacaatttataatagtagcataactctttgtcctggtggtggaggtgggacgaggtggtgatatttaacctagattaaagaccaggaagggaggaattgcatctgccaaagtttcctccaacagcgatcagtagccctaagtacaaagaagccagatttagccttctgttgtttggcaaaacctcactcagagctttactccctcagacctttctgagtttaaccacagacatgatctttgctgtgctgagaaacttgtgtctacctggcctgtagggagtgtaaactagattaatacagattaacagactctgaacttaaaaaaaaaaatcactcctaagggtgtccttctaatttcaaaatatcaactcctaagaggtcagcagaatttggagatttgggtccttataagaatagctggtgctcttttcttgttcatgtctcaaaacaaagctgttgagagaactgctgcgatgaatcaaaccagaggagtttgtcatgctccccacagagagcccaggacatttgcctgatgtatggtgctgagctccaccttcagaggaactctctcttttttttttttttaaataactattattagcttgacaagaaaaaaaaagtgcccaacagttttagtgttaatcttggtgctctatggtgcattagcagagatatgaacaattaaatgaagacaaagaaaataaaaataaagtctgattaacttttgctcattttgtctttgaggctcttcaaaattgctttgaatgctatggtttgcagaaaaagggtgagcatgatggctgtcctatatgtatgtaatgattttaatatgaatccttgtgtctggactctttccatgcttcactaattttggggaattctatttaggtggactgttttcacaaaccacactagaaacttgcaaccacatttgtcccatttttctggggttggggaaaccaatgggaaaagccaaaaagttgtgattaggacacaggtaaagtggctgtggtgccatggaagagtgtgggatgatgatgagatcatacccaagagatacctagataaagttgacatggccttcatcctagttgggctcatcatctagtggaagaaataggcttgtaaattaaaaccatttcaaaggggttctatagaggtatgtaaaagcctagactagaggaaggaaaaacagaaccaaacagaaccaaagcatctcatttttgctctcagcaaacaccacagagaccatcagaggagaaactggagagttcaataccatatttgaacaattcttttggctcatagttgcctaatcatcgtggtgaatatcaaggaagatgactatattttccagttgcttagcagccataatgtgctgagctggataaaccatgtctggcccatagggtgacactgatgtgtttccaagtcatcttgtctattgacattaggtagcacccttcatttcacttcacatccaagaagaataaaacccatgattttctataaaacaagattctaaatcttaagaataaccaatttcagatgatgtgaaagtttcattctgccattttggaatggccacccagagcttaatttgtgcagtgttgaaaaatattagtggacatcttactactcacatctgtttgggatataaacttttttttttgagatggagtttcgctcttgtcgcccaagctggagtgcaatggtgcaatctccgctcactgtaacctccgcttcctgggttcaagtgattctccagcagctgggattacagatgcgccaccaccatgcctggctaatttttgtatttttagtagagatgaggtttcaccatgttggccaggatggtctcgatctcttgacctcaggtgatccacccgcctcagcctcccaaagtgctgggattacaggcatgagccaccaagcccagccaggacataaacttttatttcatatctgtactctgttaatattctacttattttctcagttacccatataaccattgtaacagctctctgtcagaacacaaagcctgtatattttaatttttatagtggtcacgaagtcattactcatagttcacgttcaaggtaataccaaatgcaaacatattccagcaacttaaattataattacaaaataaaatttttatttgcctttattaactacctgaaggggaacacatggtctacattgtagcaatagttcaaaaaaatctctgctgtttcagttatctattgctgctgtaacatctaaaacacaatggcttaaaataacagcttggtgtgcacctatggtcccagcccctcgggaggctgaggtggaaggatggcttgagcccgggaggtggaggttgcaatgagctaagatagcgctactacactccagcctgggtgacagagtgagatcctctctcaaaacaaaagcaaaaccaaataaaccccaccaaaatagtcactcaattcctttgctcacagttttgcaatttgtgcagagcttggtggagactactagtctgctcaatgtttctagtgctgagatagcttcctaaggaggatcttctccctagacagcctcacttgcgtggctgccaagttggtgctgggtgacatccaggttactgttggggctgttggtgctcagtgcttgtattagtccacttgggctaccataacagacttgggctgtcataacagataataccatagactaggtagcttaaatgacagaaattagttttctcacagttctagaggctggagggatctcttcttgggttgcaagtggctgtcttctcactctgtgttcacatgatctctttgtgtgagtggggagagagggagagagggagagatggggagggagggagggggagagagagagagagcgagcgagctctctagcgtccctttgtctcttgtttcttttcacagaagcactaattccatcaggagggccaccctcatgactttacctaaatctgatcacctcccaaaggcctcatctccaaatatcatcacattgggggttagaatctcaacatatgaattttggggagacacactcagtccataatagggctccttcatgtggctatgttgggctttcacagcatggcagtcttcatacatggtatctgggttcaccagggtgcaaaagacaaatctgccaggtattctaaaggcttcagcccagaactacctactgttctgtaaatgcctacacattttactggttatagcaggtcatgaggcctgtccagattcacggggaaggaactacataagggtgtgaatgctgagaggcatggctcacacgcatcaccaaaatgacattttgccattccccctttcctatcccatttatttccctcatatgccacagtggcttttacacatttctctctaactcccccttctgtcccccaacacacataccatcaccaccactagtcatagcccatcaacctcctgtccccctttattcccaattctgtatcatttaaatccaaaaggaccttgcactgacagaaacagaacgaacaaagccagaatccttttgttgtggaggaggaagggagtagccatatatgctgtcacatcattaataatgtttatcccttgacccttgattaatgaaggccctttgccaggggaagcaatgcttaaagtccatatcccttttcagcgtcacagatgcctagctgcacagaggtggctggttctaaagacttctataaaaacagctgagatgcaaacaagcacagctactagaacctcttttatttcttccaagaaasagacctgtactgaagggtgtatggaagacagagagtggggacagggagaaggagaagaagggggaggaggaggagcaggaggaagaggaaggggaaaagcaagagggagggagggaaggaggaagggagagagagagagaaaggaagaggaaaaatagagaccatatacaasataaaaacatggacataaagcatgcaaatttccttcactgtattcagtctccagtaattctctttaccagtcttattaaaaatattttttaggctgagcgcggtggatcacatctgtaatcccagcactttgggaggctgaggtgggcggatcacctgaggtcaggagttcgagaccagcctggccaacatggcaaaatcccgtctctactaaaaatacaaaaattagccggcacagtggtgggtgcctataatcccagctacttggtaggctgacgcaggaaaatcgcttgagcctggtggcgggtgggagcggcggaggtttgtagtgagccgagatcgtgccactgcactccagcctgggcgcagagtgagactgttctcaaaaaaaaagagggtatcagggtacattatctccacatgctgataagttgttacataagtcccaccaattcacaatttaatatcatatactctacccactcaaattttcagtctttcaaagcacattaacaaagttatcaggaaaatgggactagcacaaccaaagatgttacagactgcacacaattttgacacggatagcaacgtgaccaaggagtggttttcttcaggaaacaattctactaaaaaaacccatgaaaataaaagtaatttaaaattttcaagacacattaaatgcatgactgtggctctatattgccatttagtatgcgctgtactgtaggaaataaaataccctctccctagggaatgttaaactgacttcgaagacagtgaaagcctcccattattcactatttcagtgtttcctggttgtaccaaacaacaaacaagtgaattatttcaccttttaaaagctacactttaaaaatgggataaagtgggattccctccttcctaaaaatgtttcagccaggcacaggctcacgcctgtaatcccagtactttgggaggtcaaggtgggcggattacctgaggtcgggagttcgagaccagcctgaccaagatggagaaaccccatctctactaaaaatacaaaattagctgggtgtggtggcacatgcctgtaatcccagctacttgggaggctgaagcaggagaatcgcttgaacccggcaggcggaggttgccgtaagcagaattcgcgccactacactccagcctgggcaacaagagggaaactctgtctcaaaaaaaaaaaaaaaaaaaaagtttctacagctactaaaaaacttgcatttaaaaatagttgataaaaatattccttatcaaaatagttgataaaaatattcctctgaggccaagtgcagttgctcacacctgtcatcccagcactttgggaggctgaagcgggaggatcgcttgatcccaggagttcaagaccaggctgggcaacataggaagaccccgcctccacacacacacagaaaccccacaaaaattagctgggcttggtggcacacacctgtggtcccagctacctgggaggctgaggtaagtgaatcgcttgagcccaggggttccagggtgcagagagctatgattgtgctactggactccagcctcggccgagcgacaccctgtctgtttctttccttttctctctctctctagctctggatcgtacaagaagggagacaaggaccactgacaagatatggtatgtgatactaatcagatttggcttctttctgtcctgcttcaccagaggctggactctccttgtttcagtttctccgctttccacagataaatcttttgtttcccggatagccacttggcctgtttgccctttgctcccatttttccttgtttgcttctttgtctgaaaatttatgctgtcctgctgcctccgctgggcttcgtttccacctttgctggaggagatttagctgacaacctcacagatcttccccgccccttctgccgagctgatctttctcttggaaatcttacccgcagggaagggckagtgtccgtgcctgcctgcctgcctgctgcagcccgcgcaaagctgagcggccagggcgctgctgttcctttaaagtattattaaaaataatatttcagcttttaagtaactccttgagtttgaatcaaaagctggaagaacctcctgggctctatgagcacctctgaatatgtctgactctacattctagaggcttcaatrtatttataattttggctcatagattctccacatcttttcagcttcaattcttgcttttcccagaaacaattttcaagcaggagagaatattgattggacttgattttctcagtttgggcagaggtttgcagacactttgcaggttgccagacccttcgtccagccacctgtcagctgggggtcatatggtatagaaagcagtcatttctatgcaaggtactgcttgggcctgcctccctcaaaggggtaggggatgcgggctggacaaagggctcgtgatcaagtaaagcactgtgatgacagctgctatttctatatctccctagacttgtcttctaaattaaaccttgactcctcccttccaagctggagccactgctaactactgggagagccttagcagataaagtctcatgcctccaggcgtttgtgcatcccattttctctgcagagtagaatctcccttctacttttgtgctcctggggacgtcctactcttcttccccagttggctctaaggttatcacatcggtgaagtgtttcattatcactttttagaagaaactgagtcttttagagaagttaagtgactttctgcattcatactcatactcaagaaaatctaactccacaataaccaaaaataaaaagtagaaaaaaacccacaagtgatgagaaaaaaaaaaatcaaaagttataaaaaataaatgaaaaaatgaaattaaaggaaaaaagattttttaaaaaagtaaaaaaaagaaaagaaatctaactccagagctctgacacaaaatgccttaggtgttattctcaatgagagaaaagggacgtgaatctttaagtgattaagtgaatctttaagtaaatctgtcgtactagtgtttcaggcggctcaaacaccacacgctcccgactacggcggaatggagagaatgtgcgcatgctcggcgggaatctgcgcatgctcggmgggaatctgcgcatgctcggagagaatctgcgcawgctcggcsggaatctgcgcgagctcggcgggaatctgcgcaagctcggcgggaatctgcgcatgctcagagttccggggcacggtttccccgcccctttcaggcctagcaggaaacgaagcggctctttccgctatctgccgcttgtccaccggaagcgagttrcgacacggcaggttcccgcccggaagaagcgaccaaagcgcctgaggaccggcaacatggtgcggtcggggaataaggtataaagaaagccatggacttgggctttacccggactrgggatccggagagggtggttcggaagcaggaatcgtgggatcgcggtcwagacaaagaatggggcaagaraagatcatggtggtgggctcagtcaggagggccgggaccgagggatgcgctatgagaaaagctggagatttggggctccaagacctgaatttgagcctcgctgactccacctcttccattacccacccatcccatccctcttctccctctctacctgctctttgtctcacctgcctccccacccgcctcccctctctctctctttatcccattccactccctagccccacttcctctattacttccgagcctgggttcttaagatctctatgagaatgaaaattagctgtgataaagcaactatcccacagggcttgttgtaaaacttaagagagggactatctgtgactaaaataacttaaactgtaaagcgtcgtattattagctttataataacgtagtatcccgcatttattgaaagcccactctgtgagggacggatctaaaccttttattcttatctcatttaatcttcacaaccccttgaagtgaaaactatttatccccattttgcaagtgggaaaaccgaggaataaagaactgtgggcttttcctggtgaaatccggatttgaatccaagctgtctggtttcagggccctggagaacccctgtgttgctagaaatctatgaccattggtgtcccagatcagtaacagaaattacaatgaattttaaagtgattttttttttcaacataaaagagtggtagttgtctctgaagggtcactagagggagatgtggttccagggattaatgaatttattcaatacagataaacaagatacgagtttgagcaactgatccctagttccctcaactcctcattgagaaatgttgattaaaacgatcatgaacttttaataatgccactcacctccttttttcgtcctctttcagctgctgaaaactttgtagctctagtggaggagctgtttgttgcagatgaactggaagtaaaattctaacagcctgtattgcttcggtatagaaatgaagagttgctatgctacccrgkttctctttctcagttttcttactgctgccagataggaactcagaaatatagaccattctgcttccagacaataagttccatatttgaaaccctttgatggcacttactggatacctaattcatgacaaaagtgctttagtcctctagagttttctggtttaaaagtagcttttgtgggtgtgtatcaaataagtgcagcagcatattttgtgactcttaagtttttttaggttatcatgccccaggcattgaaactgggatgtgcattttactgttctcaraggaattttgtggtttattagcacgttttttttttcaaataatctaattttacttcagaaatctcttagtgcattgtgttgtttgtaaactagtgaaaaataatcttttcttttcatgtgttgcctgagatataaccacatttagaaatcatctataacttccctgataggaattcattcaggtttttaaaacatttctagggtcaagagatcacttaaaaaagagtagtttctttattgatcacttctaaatgttattttttatccctcgtatggagtcgcatcagtctccctgtaacttccatctgttgatcccgttgtctttcttggcagaccaatccttttatacaacagttgtcaaatatctggggggaggccagacacggtggcctatacctgtaatcctagcactttgggaggcggaggtgggaggattgcttaagccaaggagtttgagaccagcctgggcaacacagtgagaccccaactctacaaaaaaaatttaagaattagctgggcatggtggggtgcaactgtggtcccagctatttggaaggctgaggtagcgggatcacttgagcccgggagatggaggcagtagtgagccatgatcatgccactgtactccagcctgggtgacagtgagaccatgtctcaaaaaaaaggaaaaaaaaatggtggggaggaaaactgttatgttccctttaatcttctcatctgacttaaatatctagttatttccaactgttctttacatcatgtattcttcagattcttccctaagctgctcatttcatgttcatttgtaattaattttcctggtaagatgttagcccagaactgctcacagtttgtttgatcggtacaaagcactgcgagactatcagtcagagtcaaggaatgtgaactccagaaaggaccttaaacctcatctagtccaacagtttcctaccttttagtattattaacagtgagattaagtgacattcccaaggactcagaactaatgggtaggagagatgggactagatcccaggtctcccgattgctattatcttttttcaccagaagacccttcttttctcttcttgaattcactacactgttgatacagaccaacatatttaggcgatgaagtaagataggtgtggggaatgtggtgcaaaagacatttcacgttgttgattgattttataattcacactgaaattgtgagttgccatcaatccaggtctcttccagcttgtgttcaggtaaaatttggaagccaggtataaataactttacatgtattccttttaggttatgtttctcttattttcttagtctcctacatacgtgattgctatgtaatggcttgtgccttagcttatgtgattccgtctgtcacttacttgttcacatgattgactcctactcattaagactcacccaaggaartccacattcaggaagccttttctgccccttcaccgctctggtatcccctccaccagtcttgagtggatgctcctcctgtgtctctcagtgcccagtgcatacttctatcatggaacattgttctggtattatttgttatctgtctgtgtcctctactagaatagatttggtgtctttattttagatcatcagtttacaaactgactcaaattgtcagggtatacctsttagcatatatatagattctagcagtcacttcttgtgacaaaaatgcttcataacaaattatgccccraatcagtgacttacagtgaaagcatctgttctcatgtttgtaggtctgcaggtcagctgcagtttgtctgatgtatattgggcataaatgggtttaactctggcctgcaggttggcatcatatgtactcatcatgggtttattctggggcttaggccaaagaagtggcagctatctggagcatgttcctctcctggtagaaacttctgtagcttttagaaagtatcaggactatttaagggttttccatagtgaaaatktatatgtcttacacacattcttatgtagaacacatccctttttcacacctttcctaaatactgatacaggttcatgaatacaataagcaagggacattcttmcagtcttttcttacgasttattttctcaaacactctttggaactttgtttccaggcagctgttgtgctgtgtatggacgtgggctttaccatgagtaactccattcctggtatagaatccccatttgaacaagcaaagaaggtgataaccatgtttgtacagcgacaggtaagtttcagattgacactgagcttgtaacccatgtttgaactgcttgttgcctctacctactaatgcaagataccagcctccttatagtgtccagcccctctgtttggggggattctggggagtttccttacatgtactcacatacaacttcacctaccactagagtctgatattttttcttccctcgttttggccccttcactagatattacagtttttatcggaaacaagaggcagtaaaaagtaatgtttaaaagcacaatctctagagacagatggcttgggtttgtatccttgctctgccatgtcatttactaaccttctgatgttgaacaagtccctcaacttgtttgtgactagttcagttatcttttgctgtgtaataaactaccccaaaatgtagtgtctcaagtaacattttaaaaattcatcattcatggttctgtgggatgactgggttgctcagttgggtgattctctattgaggcctcttacgcagttgcaatcagatggcagctggggctggagtcacccaaaggctcaactggaccagatgtccaaaatggctcactcacatggctggaagacgatgctttctagtggctgtgagctcagttggggctgtccgttagaatctctacatgtggtttctgtatagtttcwattytcacatgaagcagctggttctaaggagtatcccaagaatgggttttctatgagaccctgcctatgtggcttcttaagacctatttttagaagccccagaaagtcatttctgttttctgttagtcaagcaagacactaaggttaggtcacatttaagggaggagaattagactccctctcttgataaaaagagtagcctgcaaatacaaggagagaaagaacggatggtggctatcttggaggttagctactacagtgcctcagtgtcccatgtgtaaaatgagaataatgatacctgtcacatagggtagttttgaagaataaaagaattaatgtagataaagtgcttagaatagtgcttggaatattgtaaacactatgtaagcatcagctgtttttatttctgccccttctacttggtatgactgccacttttgctaagtccatgagttcctgcttctttcattgwctactgctgctcctcctggacacttctgtttcttctgtgtgtttacacttccgttgggcactagtacttcccacctgtcattctagatttttaaaaatcttgatgacctggagtccttgaggtgttgtgtcaaggaaggtgctctaaccctgttcttggttatagttgtgttggtggaattcaagtagtgtggctgtcccctggtatgctgttagagaaggtaagtagacatgagcagggcaggagagagggcccccgagaatgttgggcatttgtgaagccatggttaggcaattagaaatccgtccctctgaagtgatgagcagggcaagggaggggccccaaagctgtcaggttatcatcgaggggaagacaggcgggcataaaactatcactgtaaggtaataagtggccatgattggtgtcaggaattacaggaatcttaacagacagaaaacacctggagttagcaagctataatccttaaggtttcgagcatgcgcagtaaaagagcaagatggtgaactttaactggtataaaagctgcctctgggggcgctcgaccaataatgccgagttgccgctactgagcatgcgcatgactagtaaccacactacgcatgcggccccctcttaagcmgtagcagggctagtgcgcatgcgttgrttaattcgggctgctcaagggaggaacaaaggagactggaagcccgggaaaagatggcgccggtggttggggggcggggcggtctaaaaactaaacaaagaagggcgcagggcacttgatttttcacgtggccctcttggttctcttccaagtgtactctgctttctccagtaaactctcactttgcttaaaataaatttttcctcctgctttaaaccttgcttatgtctgtcgtttcaattgtttacttcgagaagaccaagaaccgagattactgcggagtcgccactccggagtttctctggataactgccgacttacaccccagtaacaagagtataggtgtttttttgtttgtttgtttttgttgtagagagaaagagtcagaatcaggaagtcagaatcaggaacttagtgccagtcccatactacattcagaatttcctcccctcccatgactgagattttgtctagggcaagattaccttgccttaagatggatrcttgtctaggcggcagatacctgcccagccagtatgctacgcatgcttgaatccagcagcaggcacccagacaccgttagtccatgtacaactgggaattgttgtgttgtttacagactaaaggattaaacagaccctacaaaaatgaagaatgacagaattccattatctctccatacagcactcttccccatcaatgtaaaaaggcttatgttaataattagacaggactgtcttttgtgtcagatactattttttgtttttatatttcattatgaaatatttcataaaataggcaaatatggagaatatacaggtaaccaattttcccattgtcttatgctgtaaatcctaatgtttcatatttgtttgattttttttttaataaagtgttacagataaacctggaggcccttccttaccctttttttctcttctccttttctcaggattttggtagttattaccatgtatattttatacttggacataagtatatattcataaatacttagtattgtataaagctgtcaaaagtgtaaatggttttatatgctacatgtaattctgcagcatatcttttatcaacttattttagatctattcatgttgatacgtgttgcacaaatttattcatttttactggagtatgatatttcgttgtataaatattctgcaatgtatttttgcattctcctgtttgatagtttgcttccagtttttgccctatcataaacagtgctgaagtgtaaacttcctatctgtacataatttttctagggtatactgtatatgcctgcccctgaaattgctgggatataggctatcctgcacttttttttttaacctctggaaaatttaaaccttagacattccataaagacatactaaaatcttttcacattacccatttttggttctctcattgagaattagagtttgatttcgctggaaatcatcaagaacacttactaccctcctatttccacacctcaacttctgctgaaatgaagggtgagacttatrgtcaatgaaaaacatctgttcagaacctaagaattgtcattgtctgtaagtctcatgtttcatcccgcccaatactatatggccccagggacctgccatagggaggtctggttgtcctgctccctgaaggttaggtattttattgcttccagattgttctaatatggttttcagccatctgacatttttttctaggtgtttgctgagaacaaggatgagattgctttagtcctgtttggtacagatggcactgacaatcccctttctggtggggatcagtatcagaacatcacagtgcacagacatctgatgctaccagattttgatttgctggaggacattgaaagcaaaatccaaccaggttctcaacaggctgactgtatcctttttctgccagagaagactttaagaaatttcctttattctgggaatcgtacagcagtttgatgagacacccccagagtttcagctatgagtatatgggtatattttgctctgaggagggggaggtaatgtgttaatagggtttaatgtgaaattaatcagtttaaaacagtgcctgggctcccagccctccactcacttccctgttctctgcatgggtgatactgagaggttgggaggcataggaagggggaagatcctagggagtatatgtgagcattgactatatgcagagggttttagtggtgctcgttagaaatgtttggaggcggatagaaaatatttttagaagagcatcctcccaatgttctctcctttttttctggatggaagatgtttttgtgccagaaatcagattgatacccaaagtgagatttccagtttactccacaggtcccctaattttaagggatcatcactcttgttctttttctaatcagttagtagtgctattcctgatcactgggaagtgctgttgtgttaggagtgacttgcaaatgctacattatggttcgcttcatatttaagaatggactgtggccaccaanaatgggttctagatactattaaatgacataatttttggttaaatgaatgcaatgtgttagattaccttttgtttatatttcttggttgtttttggcagaatatatagtttgatatatagaatgtatgaatatatgttagtgaactttggaagaagggcactcaggcaagtactttaagtcatcacatagttsagtgtccacaatttccagcacggtggacttcattggaaagagttgcgtgttcacatgaagagactgtttggtgatatccctrtccttaactagctgagtcctggatgcactaatcgtgagcatggatgtgattcaacatgaaacaatgtaagtgttccaaggaagagagctggaagagaatctttttgcaaaaattgtatgggttaatgtattgaatgtattttgtgattcattgttaatcaagctgcatgtttgtgtgacaagagaaacattttatagaattgaatggttcagtccaacctctctgttttttaaaagttytaaaaggggaagggctgtactcggtgattatttctctggaagaaataaaacatttggcttatttcagtttacttcctattagacttaagctgattaccaggaattttaaaaaacactaagtggtataagccatatgtcattgatattaagtgcatggtaactctggccaacttcccttttttgttgtgtgtgtgtatgttttttgttgtttttttttttttgagttggggtcttgttctgtcacccagactagwgtgcagtggtgccaatatagctcacagcaacctcagcttgatctcctgggctcargagatccttgcatctcagcctcctgagtagctgggactacaggtgcacacccaagtccagctaattttaaaatttttatttttgcagagacggtctcactattttgcccaggttttctcagactcttggcttcaagcagtcctcctatcttggcctcccaaagtgttaggattacaggcatgaaccaccatgcctggcctgcttcctaattcagtatttatttaattattgtgccttggaagtgtatctctggagacatatatgtgcatgtacacatacctcttgcctgtcaggaaaatcatttgcactaaaatcccagacctaaatctgtgtaatcatttctcaatctctgtacatcctctgccaaatcttgccacacaaaatctgtgcatggagtcagagcaggatatttagaaagtgaacctgagcaaggctgaagttagagtatgctgggagaattctttgtttacattctgcctatgtggaggctgggaagggatattttttcatcacatttgagttcggaatccagaaacataacatttccataatacccagacattttggccaagatgttcaaagtataaagtgtatcagggttgattatgaatttaataagaacttaattggactrctagaatgtaatcacatttattaactctagatccatttctaagcttctctcctcagtgaccaagtgtatttgaatttgtasaaaaataattcaggagaatgatttcttaatatgataactctctcttttagaggaaagaagtttgagaagaggcatattgaaatattcactgacctcagcagccgattcagcaaaagtcagctggatattataattcatagcttgaagaaatgtgacatctccctgcaattcttgtaagatcctaagaataatgcatgtagacaaatcctatgatttcctaatatagtgaatgggccctctgtatagagtacttggtttatgggaattttcgctttctgctccaaggctgaatctgtcagatgactgactactcagcaaacatttgctggttactctctgtgttctaggaactgttctgagtggtcgtgacaaaaagatgaaagtcagtgatccagaagaattgagcttagtggcagatcattgtttagtgttcttagactcaaagaattgaggattagaagaaccctttgaggatattcaatttgtctccttcctgcatagaaggctttacccaaacaattagcagattgatggatttttttttttcttaaacagctctagagaactgtgtcctatacagagtgcatgttttagggtagacaggaatgccaacttgggaatcattctaaatacataacatgtttatgtttaactcttttcagatccaaaagttgtggacacatatataaaatttaatttgcttctgttaattcagagatggagtataaaacttcaggggaaaaatatgtatttcacaatttattagggagagaattcctcctcaaaaagtaacttgaatattccctccgggatttactttctctgtgttatatccctaacaaaaatttcttttcactacactaacccttcttgctgcatttgaaacatattttttcttgtcctatttttggtgaaagttgagtgatggtatagaatgttgaattattaatcttctgggaatactcgtttttcaaattgagagctatgccaagaagcctctaggttagagtggtaagcctttggcttcataaaatgcctgcctgggggtattaagaacttgttttgcatgtgtgagtagtcttctcttaagactacagagcvacatctcctttctgtacgactgtggaaaaagagttcagaataacccatcaaaccaatacttgttaagatggtacttcagagaaattaagtgcttttaagtgacacttcttactgagttgaggtttttctcagtacttcagaagcccagcacagcttctggtcctttttcataatctcaggatgcctttacatgttagaagcagactgcatttcagtgaatgtcattcgaaagagctactctttttttccatgagcaatacagaaaagtgcagaagaggaagcatagcctttgcttctatttgctttttatttggttgtatttttttcttggtaatatgctttcttcctgtgctacaaacctccagcatacaaagtagagttcatagttttactgtttggtgtattccatgtacagctgattgttgtaattggactaaaaaaataccagcagctcagagaagccctgtgttctgtttttaatttatttttaatttttttttttagaaacgtcttctgtagtggcatagttatagctcactgcagcctaaaactcttgggttcaagtgaacctcctaccggagccttctgtatagctgagactatagatgcatgttaccacacccagcagtttttagtttttcttggttgttgtttgtttttgagatggagtctcgcactgttgcccaggctggagtgcagtggtgcaatctcggctcactgcaacctccgcctcccaggctcaagcagttctcctatctcagcctccctagtagctgggatttcaggtgtgtgccaccacgcccggctaatatttgtatttttagtagagatggggttttaccatgttggccaggctggtcttgaactccggacctcaagtgatccacctgcctcgccctcccaaagtgctgggattacaggcgtgagccactgtgcctggcacagtttttagtttcttctactgactactgaggaagcttatttctgatctaacgcagaatagacagaacagttattatttctttttccaggataacttcctttctcttcacttttacgacatttgtccttttctggttattgctttgaaaacaggagtaacctgatgcaaaccctgtgtctcacactttcctccctggaaactttttacctgataaatgcaggacatgcaaattacatcatgctgtatttgctaagtatatgaagaaaaattgtaaacagccttattttaagtgtagcaaataaaatgagaaatcaccttaaaaacaaatttatttctcacagttctggaggccgggaagtccaagatcacagcactaacagatttggtgtctgctgagagatctttgctctcaagatggtgccttattgctgtgtcatcccatgtcaaaagggctaacactgttctcacgtggtggaaggacataaaaggcaaaaatggcaaaaagcctctcccttcaaccattttttttaaggtcgctaattccatttatgagttccccaccctcaggacttcattacctcctaaagggcctctgtcttaatagtatcatattggtgattaggtttcaaaataatgattttgggggacacgtgtagaccattacagtgtggaagaggccagtcggagagagtgaagccagcataaaggcaaatgaaggtaaaatagagacagagagagtaatccttgccacagttgagaccctgggtctggacttcctaaggccttgtgccaccctgccctttcagttacttggttatgtagtagccagtgattttccccttttacaaaccaaagaggtttcagtcacttgaaactgggagaatattggctaaggtaggtaagagtcgtttgacagatgagaaatttgaaacttgraaaggttgactgatgtgctcattttctcatagctgatgagttacagttacaggattagaacactaactactgttgatctttcttaatagcttgcctttctcacttggcaaggaagatggaagtggggacagaggagatggcccctttcgcttaggtggccatgggccttcctttccactaaaaggaattaccgaacagcaaaaagaaggtcttgagatagtgaaaatggtgatgatatctttagaaggtgaagatgggttggatgaaatttattcattcaggtaagaattgaaaacattgatgggaatttttaattgtacccacgtaaatttctcttttgattagaggtctcccaaatgtttcctttttctgggccactctctaattagtcattgcttaatattctgagttttattaaagaaatagtacacccacccttaatcaccctttttaaagtttgtgttcttggcacatgtttctcatttatttccaggacctgtgtcagtgaagttcaggaatatatagataccatgagaaattaacaagtcaaattgcaaaagatgaaatagtagatttcttcattatgccaagcttgggatacattttttgggcccttttttttttacacatctacaaaaaacattattaattatagaaagtggtctcagatctgagatagtcagtatcttcttatcatcctattaaggttttagaaagtagcatactatggtatagtgattttttttttaaacttttgatcacaaagcagtttgattgagtgaaaaaaaaaaaaacctgcaatgtaaagagttcatagcctacttactttacgtgggcgttggaaaggcaaaatgatttaagaaaagtgaattccttgaagtaccgtataacaataaagcaaactgctttttcaaccatccagctagagactatggaagagaccatctcctttatccatcttattcttggttggaattggacatacatgcattttgagcaaagaacctaagaagaatcggtggcatctagaatagtgtgtgtcctatggggttcaatttggtaaaagtggcaatagagtactttacatagcagtatggcttgggtggttcaaattctcaggggtaatactgcttgatattcttgaattatttccagcttatcagtctgtacacaaaatactggctgtttaagcacattgaagtagtgattgaacaactagaatttttttaagtagctacagtgtatatctccttaatattttttctmaacgaccatttttaatatttctgatgagctataattgacaaaaattatgttctgattttctaaatacagacagccttgaaaaatgataggtaaatttaggaaacagaattgcccacgggattgccctaggaatcagtgaggaatcctgtgaggtgaagtttcttggcgtaatgtgttcttgtcacaatatttacagatatgtgttcctaagttgtttctctttcaaattttggaataaatgccttaagctaaacatattacccatgatatcacaaagaaaaattaggctggacacggtggcttatgcttgtaattccagcactttgggaggctgaggtgggcagatcacttgaggtcaggagttcgagaccagcccagccagcgtggcgaaaccccgtctctactaaaaataaaaaaattagctgggcatggtggtgcatgcctgtagtcctagctacttgagaggctgaggcaagtgaatcacttgaacctaggaggcggaggttgcaatgagccaagatcatgccactgcactccagcctgggtgacagagcgagactccrtctcaaaaagaaaagaaaaattagaggccaatatagattactctttaaaaagtgtttttgtttgttttttaaatttttctgtagcatatcagatagggaaattactgactatgcattgttttagcatttcgacgctactttgattttaggtctgccatgaaggtgtagaccagaactttgccatccagtacagtagccattagctacatgtggctatttaaattcaagttagttaaaattaaatacattttaaaattgagtcccttagtcatattatctgtgtttgaagtgtctattgggctagcatggttagaaatagaacattaccatcattgcagaaagttgtactggacagcactggactagattatctccatatagatcttaggaagagaacttgacatctacctgaggagattgagctctactgcagaactgagtcagttgttcttagattttttttgagacagggtctagctctgtcatccaggctggaatgcagtgacgtgatctcagctcactgcaacctctgcctcccaggttctagcaattctcatgcctcagcctcccaagtagctgggattacaggcatgcgacaccaygcccagctactcagatcttatatattggatgcccgtctttagaattttccctgaaatagaatctaaatctcatggtgattttaggccatgaggtttatattctgtttgactagtaatgttgtatgagacacgttagacctggttcagacccattcattcctcagcaaatccaaagccattgtgcaccataggctttggaagctgggtgtcaggtaagatatctactattcgttgtaaattatttctgaaaattggagtctcttgcgacctgtctgtccataactctgtggataatgtaaaataattctctttaccactttgtagatctgttttttatctgtaccaaggagttcagccagaaagtctggactgtatgctttgagtgtattttgtcattaatttctttgctgcttattttagtgaataccacaaattccacctatctcctatcatcttccctgttgtgtttgattatgggccagatgaaaatatgattgattttcacttttgtttaaatgaagcagcactccacaacactgtttgcacctctccccagcttttcccaccagtaagaaacctagagttaacgtgctttaccttgagactaaatatgaactaaattcctttattccttggatagtctttaactctcactattatatacatataaaaatgtgtatctttaatattcagaattggaattaatgaattatagagttgtaaacagtgatgataattataggatggtgccctccctttgatactctagaacagaggttcttttttttttccttttttcttttttttttttgagacaaagtttcattcttgttggccaggctggagtgcaatggcgcgatctcagctcaccgcaacctccgcctcccaggttcaagtgattctcctacctcagcctccctagtagctgggattacagccatgcgccaccacacctggctaattttgtatttttactagagatggggtttctccatgttggtcaggctgatcttgagctcccgacctcaggtgatccgcctgccttggcctcccaaagtgctaggattacaggtgtaagtcactatgccggccctgagcagaagttcttatcctcaggtccgtggttttcagggagttggtagtgaatcctttatattgtgtgcagactcattcatgaatgtgcttttatcacatcctcaaaggtgtgctggtcctgaaaaaatgttaagaacctctggcagagttgaaataaagtattgaataagaggaaaatagagctgttcattttcacctgttagtaaagtaattcagctcctcttcccttctaagccaactcactcttgccctggctatatctcccaacttgtggttgttgttttccggccatctcctgctgtttctctctttataattaacattagctcacttctcattgtagaaaatcaaatgcatcatccagcacaagttaacatttaaaaattgttgctttcattttrtatttttctttattaagtgagagtctgagaaaactgtgcgtcttcaagaaaattgagaggcattccattcactggccctgccgactgaccattggctccaatttgtctataaggattgcagcctataaatcggtaagtggcaggtacacrtttttaacagaaatgttaccaggcagataaatatgtgtatataaggarcagacaattcatgtgtgtgttactcggaaccataattactgcttttctagttgttctccctgctcatttaatctctgtttagctttttgtgtaaaaggcaggctaggagaggaagtttaaagaattgtctataatagagtttgatttcctyctcttttactttctctccattggtaattgattgttaatcataagttctaggcctgtctcttttttttaaaagaaagaaaatgaaatgcattaagctgtgttattgtagtatcatagcagaaatgtagataatgcaccaaagttaagttcagttttggagctcagtgacacctaattcaattatgaatgatctgatagtaacaacatctgtgaaatgtaaaaaaatgttttgttactgtaaaattgcattttataatatatgtacatttatatacaatagcacactttaaaaaatgagttgcttttggtgattatttgatgaaattctagtttgagtaggaatctgatgcgtgccttcatataagcctccttgcctttttcctttaagtgttcaaaataaataggaacattttagacatataaaataaatatacaaaaacatgtttttatgtatttagtttttttctttgtatattaaagaacttaattccaaaatacatgatatatctgtgagaaccttggggcagttctttatttatttcagcttccatcaaagcctagaatagtgtccctaggaatgtgaatatagtctccctcctcttttattttggcctgcttttcaaatttctttgttgatttctgacacagatatattgcttcttttttttttttctattggaaactatgataaaatgtatagtcctctttttattaaacagtctggctgggtgcagtgactcatgcctgtaattccagcactttcagaggctgaggtgagcagatcactttaggccaggagttcgaaaccagcctggtcaacctgtctctactaaaaacacaaaaatagccaggcatggtgatgtgcgtctgtagtcccagctacttgggtgtctgaggcatgagtatcacttaatcccgggaggcggaggttgcagtgagccaggattgcaccactgcactccaaactgagcgatagagcaagactctgtctcaaaaaataaaaataaataaataaaaatattagacagtctgaggttttgtatagaaagtgtgaatgtaaatatttgtggattacttttgggagaaaatgaaatgtagagaaggttatccagtatattttgtcatgaaataaactaaaattttcataataggcatgagcaaacaaaataatggagctagagtaattgttctggatttttgtctgtgccagagagtgtattaggttttcatcttctatcaattggaatcctaactttccttgttttccctttgtgttttggaatgtaagattctacaggagagagttaaaaagacttggacagttgtggatgcaaaaaccctaaaaaaagaagatatacaaaaagaaacagtttattgcttaaatgatgatgatgaaactgaagttttaaaagaggatattattcaaggtatgtcagtaagrgttttcactgttgcctaaaagacattttcttcaacatgatgtgatgcaggctggggtttgtattattctttgtttaaagttatttctttgagttatagaaatataacagtttgaaaggataatgagaccctaggtcctttagctcatttgttgggtcttaggcaggttgcttctcaggagtacacttgggtgttccatctctgtgagttttaaatgtcttaagtgatagtactcaatacttggctttattttaaagtttgaaactcactagctaggagcatgtttaatatggttgaactaaggtttttttgtttgttttatttttgactttcatggtgattattcttctaagggccaacttcaggttttatgtcctaccagatatgcttccttaatttaggggctgaaaattatttgtatttattatattgcttcatattaaataggattttttaaaagttgtactcctatgttatacccatttggattgaatagtgtgtctagatggcatctttatccagaggacttagaaactagctgaggatatctgtatgttcaagacctaaaattattaagataccaaatgatggttaagatagaaacaagagtccttagataaatgttttgccaggctattcactacccagtatagttttgatttgcaagtcttgaaaagaattcttttcctctgtgacactgtatttcatcttacagtgtatatatttgtgtgtgttggaggagggggttgtttaaaggtggtggtggttatgattccttcctttctcctgatggattatatgtagaatataattaataccctacaatttctaccagttcttgaattcaattctgtagcatagaacatgaattttggaatcaaacctgggttagaatcatggttccatcattggttaatcatttgatcctagtataatgactggctcatagtaggaagaatagcatgattaaagccacaagacctggaaagtagggggacttctcagagatactaagtagtccacttgggttggtgtattgagcatatacaggttagtacttgagggtarcatctaatggacagcctgcattttctcttttaatcatcagcgaccatcttataaagcaggcackctttgttatttccattttatagataagggaactgaggctgaaagacactcgttcacatattcaaagccmcacagttctcaactagcaggacttggatctaggcctgtactgcttcagagtctgtgcctgcattctattctgaatttggactgagtaatgaagggctttggataataggctaagagtttatgcataaccttgaaaacaacgtggagccacttacagttttgaggaagagaatgtcactggggctatattttaagaagattaatatgacaactggttgtaggatggattggaaggagaaggatctagtgataaggatggatgccagttcttttggttgtcagcaaggaaggcatccctggttatcttaggcaaaaaggaaatttattgctggggcaatggagagggaagagttaaaaactgcttgggttcaaagagcgtagaagtgcatcttttctcctgtcctccagtttccagcccctaatcagctagaggtttttgctttttgttttttgttttttcttgaactaagggaccagtatacacatgtgggcaaaggaatctggttaaatgttgtagtctattgtaagtatacaatgtacaaaagttggagttatatgccatttcagtagatgaaccagaaaacatgaaacagttttagttagaatgttcattacaagttacacaattcacacgattcaagtaagatgatgactgatgacagagattaagacaaacatttggtttaggtaccagtcttaatcatgtgccatacatttccctgttaattttttgttggaaagtttggttttgtcactagctttttaaaaaagacatacatggaaatamaaatgtgtttctattttgagacggagtcttgctctgtcgcccagactggagtacagtggtgtgatctcagctcactgcaacctccacctcccaggttcaagtgattctcctgcctcagcctcctgagtagctgggactacaggcgcgtgccaccatgcctggctaatttttttttgtatttttagtagagacagagtttcactgtgttagccaggatggtctcaatctcctgaccttgtgatccacctgcctcggcctccccaagtgctaggattacaggtgtgagccactgtgcctggcctaaaagtgtgtttctttttaataaaataaatgtcatcaacagactaacaggaacaaataaacactagatcacagaatctgtccctggatatgaaagttttattgtgtcttggggtaaagatgcatgtgcttttcctttgcatttgtccaaggccagaatccttggattttgatgctccttcttcccacaaaacatagaagatactgtgtattgaaagggtgtgatttttcatagaatataggctacagaacagggctggacttttttttttttttttttaagaagccgagagcctatgtttatataaatatcctatgtaattaaaaagaaaaatacagttaaatcccagaaataaaagaaatttaaatatagaaaaatatataacttatcaattgaatgtttccaaacagaagagttttagcttctgtcaggcattgcatatctccagcatacgtttttgagaacattttgttctgaaaatttcctgttggcatttttctctgtgggtctctaggtttctgaataatgtgttcttatgtttacaaatcatgctgtactttagtcaaccatggtttatctttggaggataactagtacgttaacatttgccagattttttcttttaggctgggtaatcattgagctaactagattgcaaaatatgctactttaaaaaatgtaattagattttaatcatctctatattgtatgtgtggtttgtgtatctgctgctgctttttcaccattgatcacaaggggcagtcatctgattccagggaatagaagatggaggcttgctctggcgtgtgcgtgtgttgttaatgtatgcatggaactaatttcagcttgtagaaaatgaggccccatatgcttaacagatgctcttctcttttyctccagggttccgctatggaagtgatatagttcctttctctaaagtggatgaggaacaaatgaaatataaatcggaggggaagtgcttctctgttttgggattttgtaaatcttctcaggtatgattgtgaacaaactaaatgagctttttcctagctgttatttgaaatggtatgcttttgattggtcattttatttataaggtatatttatttcacttttaatttttctaaaatgtagtctgggggttaatgttgccatggtatgtattttatacattgggaaactgaggttcagagccgttaagtaaatctatatgagcatagcaaactaaaaatacaggatggtttttgaatggggaatggaagcggagatgaggggtatttgaattatgtgggcctaaccctcatccctttgaggttcagtcttcttgagctggtattatggtgaaagtgctcataatgtctcaactctagaggtgggagggcataaaaatgcatgagaaacattgcccaatacagcacattgcatgttcttgaaaataaaccgcaggctccagatttcatagatcagacaaagttgatcttggtagataagtgcaggtggttatgattttcagaactcttcaatactcattttctaatctggtattagtagagctgtcttgacccctcttgatactgtgctagataagttaattgaatttaagggggtggggggagagacatgcagtacttatttttgatttaatttctctttctttcaacccttcccctctaagtcttcactcaagcctctactgttcatcagtgcctcagtgttactcttaggaggaaatgcaaaccacttagctttgtttttaggagacttcatcatctgatctttgttaatctctgtaatctaatttttcacctttcctctcacacagtggcactgtactactccaagagcagttctccaaatgtaccatgcttttacagcactccagacttctaytgatactgttttctctgcctggaacgcttgtgcccagacttttctcttagttcctatttgtccttttaagtctcgacttaggtgtcaccgtttgcagaaaccttccctgatccctcatgaccaggcttggtgccctccttatgtgctcttaaagcaccatgtaaccctggaccataatactacactgcagttaatttcatatttatctattgaagctcctcaagggcaagattatgttttgttcactgttgtgtttacagtgctcagataatcttgaacgcatgctgggtgctcagatatttgttgtgttgtattgaattaaacttcaggtaataaggtgtttttagtatctgaatgtttttcagtaagaggattttgaatggaatttcttggcaatgtgtgtcatggttatacatgttacttattttggatcaaaagcaattsttttcctctcttgtaggttcagagaagattcttcatgggaaatcaagttctaaaggtctttgcagcaagagatgatgaggtgagttggcagcaggtctttgaggtagtgctacagaattgaattgtaagtctatgaaagcaagttgtttggggcttttatagtttaaaatgacatgaattcttgcaataggagtggggaaatccactgatgtttaactgaaaatggagatgtggtaaatggatttgtgttagcatgagcacaagacccgaggacatggagaccaaggaagtattaaaaacattttgaaccactgcatttaggaatgggaatttcacagtcaaatgttaaggagggttggggtcaggttgacattttgtgttgtcataagcatcctggatgtgcacttcagtgactcactagactgcttttgtcattgaggaaatgtgtcttttctctattcctctctcttggtactcttcctgcctccccaagatactctgttttcaggctggtttttctctagctaacagcctatgactgctgcattctatactcacatctgccctttctgtaaatatttactgtttgatctccaagttagaactaactttgttggagatactgattttaactggaagattgcaatctactatctgtttaaggcagctcaagcaggtttccaagttcctgaagtatttgcatttgtaattaataaactggatgtagaaggcttgtttggggtgggggtagggtggtggtataactagtatagttctctttttctcctcacttctggaaggtagctggttgctgatatagtggatgggtatgccattattatctcagaacagttaagggaagaaaatgtttggcttctaccctgttctgaatgaattattagagcacaatattagcatacatgaatcttcaaatttgagaatcctacttcatggatttctcttgaatcaaatcctgttgggaatcatggaagtctagtatatactgtcaaaccacaacttagctgaagttttattttgttttgtttttttaagagacaagatctcatatgtttcccaggctggcctggaacctctgggctcaagcgattctcctacctctgtttcccagatagctgggactataggtgtgcgccaccattccttgcttctgctgaagttttaacttccacttactgtctctttatgcaaagaacattctgatcacttcatgagacttgctgggtatgcagtgaggaatcacaaagttgtgttgagacacacrtgttgggtaatgatgtaggcttgctagctaagggcagccttgtggattgtgtaattcaaatctggccttatacaacactaatttctgtatatcataggatcactttgagataactcaagaaaaacagatttatctcctaatggcaaagggatactctctagtgtcagtttttgaggtagtcaaaaaatgataatatctaattggagcttctgagataagcaagggagtaaggaaacaatgtcatatgaggacttccagtaaaacaaaacaaaagaatgcctggagaagacttgtgtaggtaggcaggggtgtaggagggatggcagacataatagcactcttcatgcrtttggagaattatcttgtagaatagaaattaaactctgcttcgtatcagaggggtgaactggaaacagcaggtggtgctttttgttcaagatgaagaattattttgtcaacaaggatwactgtccccactggattgttttcttgtaagatgatcagatccccatttctgtaagtttacaataaaagtctttatcaccactagtcagatgtacatgtggattgttaaactagatgaatactgttgttttttagctcaaatattctgattctttggataattccctctttaaaaagttttctctggtcattagcatataattttttgtattgagaatctatactttcatgtgctgatttgcactgtgtgtagaaaacaaggagggaaaagaaaggaaggaaatggagctttagttaagttatacacagctgtagtactgtttcaccatgtagcagtcattcacagccccatccttccttcttgtttttttttttgttttttttttttgagacggagtttggctttttgtagcccatgctggagtacagtggtacgttctcggttcactgtaacccctgcctcccgggttcaagtgattctcctgtctcagcctcccgagtagctgggattacagatgcctgccacaacgcccggctaatttttgtattttttgtagagawgggggtttcacgatgttggctaggctggtcttgaactcctgacctcaggtgatccacccccccccctcctcggcctcccaaagtgttgggattacagttgtgagccaccgtgcccagccccttccttcttttaaacatcctaattggtcctgtcaaagacatataaataaaaacttcaaacaaattggaagtaatctcttcctcasattctcattgtgcttatctagccctttcttatgggacttaactattagaacatacatgtttcatatttgctacatatctcatttctgctaataaagaatgtattaggtaagtgaggtcaaggacttggctttgttttttcacagggctcaagacagtgcctggcaaagaacaggcactgagtaaagtagcctttgaattgaactgaaaaagtaatgattctgttatgaaatctgtacaggattctaatggccaggtcttggggtcatagkttttttgtttgtttgtttgttttgtttttacaacagcatggctgggaggtcataggtttttaactttgataaggttaaccgtgatagtgagagaagtacatagtgtttggggagtttctgcagagagagagagagagctgactaaggtaaatctggaatggagagggtatcaatttactaagcctagagaaaaggttagaagctggagagccagagattagtaaaggggcattctagctaggaggtaatggtatgagcaaaggccaagtatgagacctgcccccagtcagtgatcagctcagtgatgccagaatagaggaacgactggaagggagtgacgtgatgagctctgggaacagaggtggctgtcagggaagagatggatttgagagacagtatagaggtagaattggtagtttcgtgaacacttaaaaggtgagggatgaggcccagcactttgagaggccaaggtaggtggatcacttgaggtcaggagttcgagaccagtctgggcaacatggcaaaaccccatctctactaaaaatacaaaaagttagctgggcatggtggcgcgtgcctataattccagctactcgggaggctgaggcacaaacattgcttgaacgggggacacagaagctgcagtgagccgagattgtgccactgcactccagcctgggggacagagtgagactctgtctcaaaaaaaaaaaagtgaaggatgagaatggtgcggtggcattatcaaagaccggggtttccagtgtggttgattaggcaatgatgttaatggaaatagggaatccaggaggagaatgagggggaaagatagtaagtttaggttttagtcttgtcgtggtgaatgtgaacagttcatactgaacagtttgagataactgaagatgccatgtcagatatccaccagctagcaggcagtctaagtctagatcttaggagagttttaaaaatgaatgtacaggcctggtgcggtggctcacgcctgtaatcccagcactttgggaggccgaggcaggcggatcacctgaagttgggagtttgagaccagcctgaccaacatggagaaacctcgtctctactaaaaatacaaaattagccgggcgtggtggcacatacttgtaatcccagctacttgggaggctgaggcaggaagatcgcttgaacctgggaggtggaggttgcggtgagctgagatcacgccattgcattccagcctgggcaacaagagcgaaactgtgtctcaaaaaaaaaaaaaaaagaaaagaaataaaagaatgtacagatttttgattcatcaactcatgggactggatgaaataatccccaagtagaattttagagtgagaggaggagggaaaggtctaaagtagaatttacaaattggtggagaaaagagaataatcaggggagaatgttgtttttgaagccatgaaggagaaagtatatagagacagtggaatggtgagatgctactgtcaaacaaaaaaatcgagaaccaaggagttggcaattagaaggtgatgggtgacttcagaggataatttcattaaggaagtgggggcagtagctggactagactgaagaataataatgcactaagcagtggaaacagcatgcctattattttaagaaattcagaggtaaagacaggaaagatactgatagcaatttgtggagagggaaggacaaacaaaagatttgtttaggagggctgayatgagtttatttttagggtaaagataaaaatttagagaaggaaggttgaagcagtaagacggatttagttaatgaggttaagtcccagaagagctacagtaaatgtaatcaaaagcaaatgtgtgcacttcgtccttcaagtcagggggcaccctaaaaaatgtaaaatagaaagaaagtgataacagtcttaaagtattgagttctgttgtgaaaactctcacatgttgaatatgtgttaatacatccatctttcttaccaggcagctgcagttgcactttcctccctgattcatgctttggatgacttagacatggtggccatagttcgatatgcttatgacaaaagagctaatcctcaagtcggcgtggcttttcctcatatcaagcataactatgaggtaaaacccaaagtcttaatgttattttttttcttcagttcctttattctaagcagtgtttctcagctgttaatgttcatgacaattacttggggatcttgttaaaatgcagatcctcattgtgtagttctggggcagggcccagattctctgtttctctcgagaaatgctgatactggtctgtgaaccacactttcggttggaggaaaaagtatacgttataaaaataatataagaatcttttaattataaagtatcataagaatctttttattaagtattatgaaaatcgttttagattaaaagaataatcaataaaggttcaccatggccttttcttggttctcatccttcttgacttattggaaccaaatagagaaattacctccatttttacaaatgagaactatgaataaaggctgaggatatgattttgttgtgatctttgtgaaacggtttatttagggctctcttgtgtaaaatacagttctaaattccttatcatttcctctgtctcagagaacttactgtggccgaactggaaagagaaggcacatatcttgacttccaggtcaaccttctggtcacccyagtcttctcatttgttgtattggtcatgcatttgatagcagtcctttagtattcttttatacatttctcttatgcttaatattctttatactgtttgcagttgtgaacagccagtagcagaagtcaaaacacttcacttttcatatgccagagttgggctgtccgatttttgaaatatttctgttatgctactttcacagaatttgggatcagttttatattttttcattaatttcatcgtttctgcttttaccccctttctttctcattagtgtttagtgtatgtgcagctgcctttcatggaagacttgcggcaatacatgttttcatccttgaaaaacagtaagaaatatgctcccaccggtgagtttgttttcatttagatcactcattgactacacacactgttcttgggaaatcacctgtctgctagttgttggttggggctaggtatttatagggtgcaattagttggatttccaatcatacacttagacacagtaatgatgaaggtggtttacttggtgtttttccagtagtagggataggtttgccttaaactcacccaacactgtctagtttttgccttggagcatgtacctaggggaaagcytgatggtaatggatgtccatctctagttgtgagcagagtttgcccctgccgaagtgaatctgagcagtatcaaacctgtgactttagtgttctgtgtaaagtctgatgtagctttgaaatgaaaagtgacagtgctgaagattaacttttytytttgccctgtttttgtagtttgcaccaacagtccaagtctcattgttacttatttctggcttttaggagttacttcaggcttgatgtgaaagctcctgattgagcatctggctgcaaatgtcagggtcctatatagaattattcttagagccacaggtccagtcttccagagagcctgtcatttaaaacaattgtaataaaatataatagggggcagaagtagaaaacataccaaaaagaacaacaaatgatgagtagatgttttaggttacaagtttatatataatgtctgtgtctgtgttaagattagggaattgtgaggtgagtctcggaactcaattctttctgttattttggctagaccctttggaagtagtgtgctatagaaaggccaagaatcagatgggtccctagggcctgtatctttatcttccttctagaaatgagtctgtctgcatcacggtggaggcaggcatggacctgattatatggaagttgccactgtattacagtattactctgtctctatttcctgataattccaaaatttaaatgagtagaatatttaattatttatttatttgagacagggtctcactctgtcacctggctggagtgcagcggcgtgatcatagcttactggagcctcaaactccctgtgtattagttcattttcatactgctgataaagacatacccgagactgggaagaaaaagaggtttaattggacttacagttccacatggctggggaagcctcagaatcttggtgggaggcgaaaggcacttacatggtggcagcaagagaaaatgaggaagaagcaaaagtagaaacccctgataaacccatcagatctggagtgaataaatctatagacttattcactatcatgagaatagcacaagaaagaccagcccctctgattcatttacctccccctgggtctctcccacaacatgtgggaattctgggagatacaattcaagttgagatttgggtggggacacagccaattctggctcaagcaatcctcttgcctcggcctcctaagtagttgggactacaggtacgcgccaccgtggctggctcatttttaaaattgtttgtagagatggaatctcactatgttgttgtggctggtcttaaactcctgggttcaaacaatcctyacatctcagcctcccaaactgttggaattatgggtgtaagccatcacgtccagcccagaatatttttaaaaacccagtttattgataatttattttgtcgacataaatcactcaggatctgaaacattaaatatcttctgttatctattttctgtgagttaacatttgtttacattttctccattggaaaaatggaacattaaagttatttcrtgtatttcccagtagatgtctatgtaggaatgcaatgccaggatgatctggcctcctgctaccttgtagtagtaggtgaaaatcactgaatgttcacatgtacaagtactgccccctacctgttgctgggagggccttgaattagcaagttcaagatggtgttggctgtgccattgcctgaaacctccatggtttcaccatgaaaagtccataaatgggtaaaaaagaaatatctgatgataaatatctgtatgctcttttattttgttgtagctgtacaaaagggatatttgaaaaggtgcagaatagaagtataatgtactttttaggaactacttactcttttccaccttttgcctggtgactgtgaatgttccagaaatagtgcctcaggttcaacagctgaactgctgtatgaatcagtaaaatgaaagttacacacagtagtttaggcagaagtatttttgggagaattgcctttcgtccatattgctttgggctgtaccatttttattgactgagtagatttttattgaggagcacttgttttttattagtattaggagagacctaaggaaagaggatgtcgtatttctgctctcatggaacttgagagtttgaatggagtagggcaagacatgtacgcaggtgtgagtagtgtcatggaggcattaagagaggagagagcttattcagcctcagtagattgtgaaggaatcagctcaccctgatccaatggtgtcttcctgttaaggtgctgtactctgataaaagttatattaaagtcattaraatgcttatgcttcattaccagagaggttttttctttttaatgtttttcttctttagctaattactagtttttaaaatattagctcaatggatactaaatattttgttccagtctccttatagggattggtttttatatggctgtattcctctgaaacaaactttcttgcttttgatctgatactccattgtcagaggctcactgaatggtagaactggaacctaatcagtcagtcactctaaatcgatcttttcatggataagaaaaccaagacttgggttaaatacgtgcatagctagagaatactttggcagggccaggactgtataacctgccaatattgccgtggatatctctacgtagaaagcatttgttttagtggagaataatggaaataatcatttttctttcggcttctctgtttaagaggcacagttgaatgctgttgatgctttgattgactccatgagcttsgcaaagaaagatgagaagacagacacccttgaagacttgtttccaaccaccaaaatcccaaatcctcgatttcagagattatttcaggtaagagaagaaggatgaacaagtcatatttcttttaaatgaaagagagctaagtgcaaagttgcggtaattggccagtcctaaataaatgtcttttttctctgaaggccccatttgctctatttaatggaagaataacatcttcctctcctacttcagaaggtaaaaatattytgagctcttaaaaagaaaaataaagttggaatgctttctttcttttytttttttyttttttttttttttttttctggaagaagcttactttaacaaaaaaaatacaggaaggccagttgccyatgctggagtgcagtgttgtgatcatagctcactatagcctcaaactcctgtgctcaagcactcttcccgcctcagtctcctgaacagctgggattgcaggcacatgccaccatgcctggctcatttgtaaaaatttttgtgaagacaagtcttggccacgtgcggtggttcatgcctgtaatcccagcactttgggaggctgaggcaggtgcatcacttgaggtcaggagttcaagaccagcctggctaacatggtgaaaccctgtctctaccaaaaaataaaaaaattagccgggcatggtagcacgtgcctgtaatccgagcttctcaggaggctgaagtgggagaattgcttgaacctgggagatggagaktggagttagccgagatcacgaccctgtactccagcctgggcggcagaatgagaccgagtctttaaaaaaaaagaaaaaaaaaggttcctaggctggtctttaactcctaggctcaagcattctgagtagatgggactccaggtgtataccattgcccccagccagatgcctcttttatattttttcaggcttttctcctgtattgtatgtaaataacacttttcttygttttctatatcaaaatagtaggagagcttatatgaactctataataatataacattgttagagaagaagtgttctaatgtcacatttctcaaaaatttcataattaaagggagcataggggtcagataaaaaggttatattgtgaaattattaaagaataattaaaatacagaaaatataaaaaatcttctgaatctgagtccaaaggaattggaaggcagagattggattaaggtaaattggggaagttgacaagagagctgacttatgctgaggaaggggagggctagaccaaggttgaaggagaaaggaatattccagtcctggattcagttgatgacagcaggacataggcttctctgacccccacaaaactgaaaaaaaaattatataagcagctttttaaggcaagctgttgctcacagaggagtagagggcccttttctgcaggttgggggtaacagggcatgtgctgcagagaccacagattctcccttatgactcacttcatgaaacatctgtaactaacttaagtccatattggggcttgtgatttgagggatcctctacttgaaagaaactgcctgtttttttgatgcttgtaattcttttaagtagtgaaaaaaatcttttgttctaaaattagagatgtgaagcttaacatgtgaagacttgactctgaatactcatgcccctcagtttatgatggggatacacgcctataaacccatctaagttgagaatataagttgaaaatgcatttactacacctaacctaccaatcatcatagcttagcctcacctactttaaatgtgctcaaaacacttcacattagcctacagttgggcagaatcatctgacaatatcatgcactgtaaaggttgtctacccttgggagctgcagcttgatatcactgcccagcattgtaagtgtcctactgagttctactgaatgagtatcgctttcacactgttgtaaagtggaaaaattgtaaattgaaccatcataaaccagggaccatctgtactctagcatgctaagtgtaatgaagtataaattacagatataaaaatcctttggtgtttttttggcaaatgtacttgaagacctaaagccttgtgccatttgtaggaaaggtaggagcagaccagttcaaagcttaccaaaatggttcactgtggagaaaaagagaaacttctattaatactattttgcacacttatctacagtaggttgtatttatctttaataaatgcttattggaataacaaacagatacaagccataaatgcaggcatttttatattccaaagctgctgcaagcacgggctttgatttttattagtttgttttgtgggggagagtttttaatgtggcttatctatataaagaagtatcttcactaggatacataaacttaaaaaaaacttatttattgagtactaacaatgaaccacgtgcgaaagatactataagctgctttttttttttttatttttattttgagacggagtctcactctgtcacccaggctggagtgcagtggcgtgatcttggctcactgtgagctctgtctcctggttcacaccattctcctgcctcagcctcccgagtagctgggactacagatgcccgccaccacgcccggctaatttttttttttttgtatttttagtagagacggggtttcgctgtgttagccaggayagtctcgatctcctgaccttgtgatccgcccgcctcggcctccccaaagtgctgggattgcaggcgtgagccactgcacccggccaagcttacttcttttatggacccctctagaagaatgagaaaagtagagagagaaaaaaccagttgttaaaacagtggtgggaaaacaccatgagaataagaagaaaaagatttttgcaagtgggtgacttagggaaggctttgctgaggaattagcatttggacagagttctaaaagaacaaaggcggtgcatgtggtaaggagggcatgccatgcaaaataaataacatggaaaagcatgaaaatatgaagagccaggatgtggatccctttggctgcagaataagttctgtatggggaaatgatggaaaacgtgacagagaaggtaagtagtaagtaggttgtgaataccttgtatgccatactcagtcatttggattttacagcagtgggtaattaaagaattttcagtggcccacttgaaggcttaagagttaaagcagtgatggagagagtggagacgagaatcaattcttaaggcatttagaaggtatagatagaacttgagtgattgatggaaaataaagaggacttgaagataacaggatcctagcttgggtgactgaaaagatgatgtcaccattcaatatgataaggaatacagaatgagcaggtggaaaagataattcatttattttcacaagtgttaaatttgagaaaatctattggatatcctggtacagacactcattgggaagttacaaacagggttgcagagcctagaagacaagtcaggtctaaacacagatttgagagtcctcctcattgaggcagaaagacaagtgagtaagattgtctgggagagcacactgggtgagtaggagagagaacaaagtagagaactgcaacacgtgagtgaacaattagacatataaaaaagggttgttacaaaaccaaaccaaatgctcctacctccataccccaataaaaatcagcgaggtagaaaactaggagaaatgcatcttggaaggcacaggaagagacgagttggaaaggaaggaatcgcaagtcagatgcacaatggggagtagaggtgagcttagcaaagggtctttaggaatttgtagtccagtttgaggactttggggacacagaatcagttgagtaatggtgtgcaagccaggttacaatgcctagatgagaaagactttctgatgaagggagagagaaagagaggacacagtaatctataggaggttgtgggatccaggaaggccacttttttctttttgaaatacctacagttaagggtaaatgagcttggagaaggagagagagattaataattaatttgttatcaagaggttaatttaattctagttttggaaagaaatgctgaaaatatatcttgtcaagtatacagttaaaaccactttttaaataattgatacaatggtgctaaaatcagtatattggtaacttttgagctattgtggtctgtaggtttttcctctaatctttttcaaattgtaaaaatcacatccagtaacagttgcttaaaagagaaataaataggtgatctcagcttcccatctactcagaaatgtcactttctcataatcccatttttttagtgcattgggaatttttacctgaatgaattttgtaagtatctcgcttagcttaatttgcctaaaatgtgacctttcagaaaatatgagagggaggttggtacctcagaacatctcttgtagatcctttattattgacttaacggatgatgacactgaaaagattgcctggggtttatgctgaaaatctggaatgttttacagtaggaaggttgggtaggatacttgtccattggttgttctagcccttttccaagaaatgtcaattggatatcacagatagaatcttcaggagtttatgagaggtagtctgctatgttgggtgtttgattactgctttacatctttaggactttctaagctgttcaggtattttaatgaaccaagggagagcactgtgaataaaggattatgcataataagaaggtggtgagggggtagattcacagagtttgggatcttttggatttgcttaaacagtttggggattaccttgctttacattgaataggcctgatgttactgatgctcaagggaaagtcaagtaattaggaaagaagaaagcaggcatcaaactcagacaaacaaatgaatatactatggagaaggaatagttgtggttggtggttgaaatggggaagggagcagggagaagcgcatggaatttctggaggaaattggtacttaattcctacttcagggttttcgaaacttacaggacattgactcttggatgatactattaaacctaagcatcttttatttttttagaatagaaactttcagcttacattttcttcagtgtaggaaaggagtccaggggaccaggggatagtataaatcacatgctttgtgataggagcagtattttgaaattacaggagctcttcagctccctggtgttttgtttgttttttttagaattaccaatttataagttgtttaaaagtgggaatagttataccttaattttggaattaatcttcatcgaaggaaggaaaacatcaataaactgatagtttcatttctttctttgttttttaatgacatctaatcttactgctttctatactccttttagagcatttccttttctgggcaggccaaggcctggcccagtagacttgaggcaggataggtggttgaatgaggtggcatgctgtgtasaacttcactcacatgggcagtggagaatttgccctggccttgatcttggcgcccctcccccttggtgttgcttcttgacaccgctgtcaacaactagagccctggaaaagagcactttattccttcagctgttatckgccaggtgcttattatgtgccaggtagtatttttggtgcttagaattcattcagcagtaaagaagagaagagccctacttgtaaggaggagggttagataataaacaagtaaactaaaaaattgataattttagataatgatggagcctataaaaaatataaaataagggaagtgacagaaaatgactggggtggtagaataggggtggaggggctacttcatatagagtgtcagggaaggcctctctgcggagatagtatttcagcaaagactaaaatgatttttaaaaaaagggcaagggtggagctgactcttgaggtttagggaaagacagaggaggcagaggtagtgttaagcccaggccccaaagttaggatgagcttggtgtatgagcgaagcaggagcccagcctattggggttgtgagtgaggagaacaagtggctggtgatgcgatcgaggaggcaagcagggctgcatcrtaggaccctagggtatggtgagcagttcattctcggaccacttccagtcagacagtggaaagagaagctgggaaaccagttagaaggtgactggtaggccagggatgaggtgatagggcttgggcaagaatggtagcagtggggagagagaaaggtggatggacttgtgctgaaaagtgcaaactcagcactcagggacaactcagtattctcatctcttttgcagacctctctctgggactcactgagcatgggcagcttccctgtagccacctgtttcatccaccacatggcattctctgagattaagtgagggagaaagcacagcatgattaagagagataaaaggattataacaagaaagttataatcccagattatcaggtcttagaatcaggtattttagggaatcttgtatattccccaagtagtaaaaacaacagctttgatttataaggtgaggctcctttccaggaggtccagagcagaagatactgttgctaggcttggatctatttttacaattggttttaggtattgaccaatatcctgccaacaaaggtggttctaggtgaatcctcttgattgttttttacatgtggtatgaatcacttagccctcccacactaaagatggaggatccctgatcagaaaatataaagaagccatatatgtctccatctgtgttttaaaatccttactttttccaacagtgtctgctgcacagagctttacatccccgggagcctctacccccarttcagcagcatatttggaatatgctgaatcctcccgctgaggtgacaacraaaagtcagattcctctctctaaaataaagaccctttttcctctgattgaagccaagaaaaaggatcaagtgactkctcaggaaattttccaagacaagtaagtacttggtatagttgcatttaacattggggtacataagagttgtggtcattttrgagtggctctggaagtgtcacataggggtctatggaatttaaaaggtgagaggaagaagccttttgctatttggcccttatattgaaatattgatttcttatatctgtctgctgtgatcatattttatccttgctgttcactttggatttagagctaccttctgggctgatgactttttgatcagcatcagattcttggtgaattatatataatgtataattcagataagtttctgaatatctaaggctaaatgtcaccctttttaaagtaaagtactgagaatgagtgtgttgaagatcataggttttttgggttgggaggagattagatgttggggatgtcaatgagatttttggaggaaaagtgggaacaagagtgaaaaactatcaattcttcagccgttctattagtgtatcagtgatgtatttggttgtgctattggggaggtgtttgtagttttaagtattgcaaaatgcttttcatatacacttaaatcaagcttacaactggctattaagttttttccctcttctgttcacaatctgtgtcagcttccattcaaaacaaaacaaaaataaaacaagaagaaattgttgttgcttatccagaattatttgagtatgtaaaattgatttttaccaggtttaggtcaaccagttattggtgacttttttttctcaagctggaataatctatacatttcttttggctgtattttgaaatctgattttaaaccatgaatcttttccccttttttatttgatttttctctccacaactatctttattgacaaagcttcttatttataaataccccagtggagaagtattgagtaatttccggaagtcttcacaggtttctataaatcattgatttagagaattactgtctaaattgaatagaaagttgtgcacattctgtgactttctaaaggttaacatccaagctttgtcagaattgaaaaaaaaaatcatgtacttggttccgccgcaccaactgcccgccccccataagaccatctctcaaggaaattgatagattgtttcttgatagattttatgatgtgcatttcttacacatcctggagaggttttcatttctgtttagtctatcgttctacacaagaagactgtccctaaaaattcactttccccctgctatccttatctaccttctggatttgtattttaaaacagttcaataaaagtctgcagccttttctttctatgacaccttgctgaagtctcactgcaatcacagggctattctctctctgtgtgtgttaaatctccagtccgtgatcttgattaccttctggtgttgtgggaaagaaatgggccattttctgctcttccctttgattaaaatgtaaattagctagttaaaaaagcacaccacccagacccagaaggatgcagttctgtcgtttgatccctgctatgatcacacctttggctctggtcctgctgggcactcttctggaagcttgggtgtgctgagcttcttgttctttgctcccataatggctcgcagcatagctaagttaatcttgcaggggcctgagaagtatcttactcacacacgcttgctcacgctcctattctctctctcttctgagaaagcttagtttttaagaattgtggaaatgattcatttagcaaatattgagtaccacctgtattcaagaagaatggttcagtcctttctacaaggttctaaaacccctcaattttgatgataaagctccagtcagttctagaggtagtttttccaaggaaagaaaaaattgccaacaattcgcaatgtttttgtatatattcatcatctctggatccagggtacatatttctagtggaggggagaggggctaagatcaggagtggacaaatgtctgttcaggaagtttaatcatcttaagagctgggaatcattccagttttttcacttgatatgattttggtgaaataattttacctttatgagattttcttcacctaaagaaaaatctcaagagatactataacaatgaacaaagatattaaagcactttgagcaactgacatccttcacttaacgacagggatacattctgagaaccgtgtcattaggcaatttcgttgtgcgaatgtcacagagtgtacttacacgagcccacatggtagaatctactacacatctaggctatgtggtatggccttttgtcctcaaggtacaaacccgtgcagygtgttactatactgaatactgtaggcatttgtaacaaagaggtatttgcatatataaacgtatctaatgatagatgcctagggaggctgaggtgggcagataaccgaggtcaggagttcgagacagtctggccaacatttttagtagagaatccccatctctactaaaaatacraaaatgaactgggcgtggtggtgtgtgcctatagtcccagctacttgtgaggctgagacaggagaatctcttgaacctgggaggcagaggttgcagtgagctgagatcatgccactgcactccagcctgggcaacagagcgagactccatcttaattaaaaaagaaaaataaaagaaaacgtaatgctttgcgctatgatgtcatgacagccctgatgtcacaaggcgataagaatttttcagtttcattataatcttatgagaccaccattgtatatgtggctcatcattgaccaaaacgtcattccgtggcccaggaatgtatttggagggaaggcaatagtcaaaacctaaagcaataatagtatcattatctataaaaacattgaacctttgagaagatctgatatttgtcttggacttgttgaatacctagtgttagaagtgatttcatttcaagaggataagagcaccatttgacactgtagwcccaaaatatactaaatattaccctcatcatataaaagcattgcttccatttatgttgctgtacacccttgaaatgaaaatgtcatctcttggacggggaacttgcatgagaattcggacatctcaggtctaatcctgcttgtgcagctgatgtatacgtgatcttgatttctgtttatgcaggtggtctaaagctttctgctcttttcaggtccacgaagactccttctcacttactctcagcagacatcctcacttggttaatggttaagacttcagactccagagtcagccaatatgagtcagaccccttgctctgcagtgtggccttaggcataggttacatatcctctcaaagcctcagtttcctcatgggtaaaatagggataataggaatatctgtcttatagagttgtcatgggggttaatgcgagcagtgtatgctgttcactcttgtatccctaggacctggcaaagtgcctagcaaatagtaagaacacagtgtttggagtaaatgattttaaaaatcctagtaatatgcctggcatgttagtagtgacaatgacagtagaggccaataggtggtgtattagcatcactcatgctgctataaagaaatacccaagactgggtaatttctaaaggaaagaggtttgattgactcacagttccacatggctggggaggccttgggaaacttacaatcatggcagaaggcgagggagaagcaaaggtgcatcttatgtggcagcaggcaagatcgagtgtatatcagcacagaagaaactaccttatataaaaccatcagatctcatgagaattcactcactatcacaagattagcatgagggaaccgcccccataatccattcacttcccacccgctctctccctaaacacctggggattacaattcaaaatgagatttggggctcggctcagtggctcatgcctgtaatcccagcactttgggaggccaaggcaggtggattacttgaggtcaggagttccagaccagcctggccaacatggtgaaaccctgtctccacacaaaaaaaatacaaaaattggttggctrtggtggcacaagcctgtaatccagccactcgggaggctgaggcacgaaaattgcttgaacctaggaggcggaggtttgcagtgggctgagatcacaccattacactccagcctaggcaacagagtgagactgtcttaaaaawaaaagagagaaaaaaatttgggtgggaacacaaagcgtaaccgtatcaggtgagaactccgcagttttgtggcccatcttatctcaaaacatacctgtttttgcatgtacctcccttcttttcctgtctcagtgaaatagggtatttatttcatcctgcctaaagtgaattcctttacctgtgccctggatccttttttttcttgtttttttttttttaattttagtttttgagacagggtgtctctytgtcacccaggctggagtgcagtggcagggtcacagctcactgcagcctagacctcctgggctcaagtgatctcccaacttgaggatcctcagtagcctcctgagtaactcacgccggctaagttttttatattttgtcgagatagagtcttactttgttccctaggatggattcctttttctgcttcatctggtaccttaggccactaataatttcttctctctttctgtatttttagcttctccctcgctaccactaactcctttcttctctcatgttaaatttctttcatttaacacaaaatagtccccctagcttcttccctctaattactacctgttactaattactaatctaattattatctttccttccagaagccaggctcttggaagaatagtctattctgcaacctttctcagctctcattctcaccagcttttgcccccaccacatccttgaaactcatctttcaaaagacactaactgctaaattcacttcggctttgtggttctttgctttcttgacctctttgaagcacttgacactgtcagttattcctgctttcttgagactcatgtatctgtcttaacttcagcttctccaaatttttctttttcaatctttggcagctccctctcagattcctgtgggggctgcttttgtgtgtttttgtgttgatattctgtagratttgtcctcagaaacagcaaacatttattgaaccttatgctgaagataatgggaagccattaaagcaagggtttttaatcagggttccaaagattgatatcaaggaatctgtgaactacctgaaattacattcagacttcaaaacytaatatgttaagtgctttacatgatgctaagtgctttacacacattatctgtttggacccacgttgccatcctatgaagtagattcttctgttgacccccaacttaaagctcaggagactcaggattagagaagatgagaaacttgcccaagattgtagttggtargtgttggagtaaggatttaagtgtaggcagtctgactccagagcttgtacttcaaactgtaatgccactttgccttagcaatgcatgtcccaagacctcttttttatttcagagcctcaaaaactactaaatacctatcttcagctcggatttctatcccatcaactaaatagcttaggtgcctgtaggcccctccagttcagtaagccagaaatggctttgttatctgctttcttcttcctgctcctttccaacccctcttcatgctattattctctatttcagtgaatgacacctaatttcttgggagtcttccttttcttttacattctatatgtaattggtttaccaagttgtattatatttacctcaaatctaacgctttcacttaaggttagtctggtggctaatggcattgattttggggtcgaatttggagctaaactcaagcatttccccttaaaagcagttgaaattggcaagttgctcagtgtcaagtggcaataacaaatgcctgccttccaggaggttggttaggagaatgggtgagtacaggattagttctttccctttactgtgtgctttaaacaagggatcaaactttcttcaggcttagtttgctcatctgtaaaaggatgctgataatagctaactcatagggttgttgcaaaatttaactgagataatttaaatgtgtgtaacatagtgactagcacatggtaagcattaaaaagaaacgtaagctcttaatagcatcgcccactgccactgcttttatgtaggccttctcattttagcctgcctcactgacataagctcttcactaatttccctaatttgtcttacccctttccaattcatgctgctacctgagtgagtttaaaaaacaaacctgatcccatcactgtcttgcttaaaattcttaaaagtagtgattcttaatcatgtgtgaaagacagagagtgcagtgaactcacttgatacaaaatctatgaactgtcttcccagaaaaatgctttaacatactaagttttgaagtttggatataatttctggtagttcacagattccttgatgtcatctttggacccccaattaaaaaacgcttgctctaatggcctcccattatccccagcataaggtcaaactcttttacacagataagagaatccagataagcagaaagaaaagaggcatctattcataatccaactatctagagaaaaccattttctttttttaaagtaaataaaaatgaacttattaaaaaaaaccatttatcatttcacaacacatcaataaccaagtagaaaataaaaaaatatataaaagcctgggcaacatagtgagacctcatctctacaaaaaatataaaaattagctaggcatgatggcacacacctgtagtcccagctactctggaggctgaggcaggaggatcatttgagcccagggttcaaggtggcagtgagccattattacacctgtgaatagccactgcactccagcttgggcaacatagtgagactcccatctcaaaaaaaaaaaaaaaaaaagacaaggaactaataattaggatatacaaggacctcttggcaaatcaaaaaataatttttcaatttttccatggaaaaatggtcaaagattataaaaaagcaaatcacaggagcagaaactcagctggcttacaagtgtatgaagagatcttcaatctcaattagtaatcagaaatgtaaatcaaagcaaaaaaaaacattggcaaatatttttaaacattagatgataccagttgttggtgagaatatgggagaaacaggaacttctgtgtactgctaagggggaatgtaaactgttacagtaggacattagaagcaaccagtgtactcgtcactaggggaaaatggtctgtaaacatggtagatccatatcatggattatgctgcaagtaacagccacatggacagatctctaaggtcaccactgaaggaaaattaagaaaaagaataagatctataatagcctatatcatcttgtacttaaaaagcacatacataaagcagtactgtgtaacttaataaaaatatatacacatctaagatgtatctgatatatcggtgggtacaagagggtaagtggggtgcagagggagtgggaaaataactatgaaggggaaaggtactaaaatacaacgagaagggcctggcacagcccatatttgataatgtgctaagaagtcattagaaattttgaatgactgaattccctatacctgaggtccccctttaaaaagctcacccttcttatagacgaagaagcgaagacactaagttacaatgatataaattaagctaccaatgacaaagtgctcagtcaaccttctgccttgtgttgataacactaatctgccctagttatatctaaagaaaaatatactttcatacagatttcacagcttttcaacatccatatatctggaaagataagaacatttgtatatccttccatatgagtccttgtgattcgttgaggccataggttaagtttcctttcagtcattccaaggagaatcagcatgaccaagcaaagcaggttccaaaggcaggaagcagaagcaatatgatgctgtggaggtrcctttctgaaacagtctcttctgctgttgtggggtctttgggcaacccttcaatttaagtgcttggcaacaagtctgctgagataggctgaccttgtagcttttgtagtctctatcgtacagcactggtcagatctacataagcctcatcgatgctgacgcattcaatcacagcaaaacaagacttcctccatcacttcaacactggcttcccggtacttggtgaggttagctttcccatggtactcacgaacttgtgccagtagaagacctggacttaacttctttgcatcatctgcctacatatagtgaccccaaatgcaagascttcataactcactgcaattattctaccaccttccatgatttgtactacacagctgcacaagatttattcctcaratgaggattttgccgctgctccattggaacaaagtctatgtccatgagagtaaccacacaatcctgtccagtagccatttttcaaggtaacagacacctggccagactgccagcagtgggtgccgcaaatgctgggctcggtgccmactggaaggaaaatggaagaagggcttttgaatatcttttcgcctttctggggagagtttcgagagatttattccccgtgatgacagaggaacagagaaggggtcgtgaaggatcctgcccaggcgaccgtccccacagttcagcagggatcagccgagagcagtgtgcccagcaacaaagccaccagactgaggacagacagcacgcacgctgcctagagaaaaccattttctttcctcacgttttttaatgctcctaattaaygtgttttctagctccttctctcactacgtcccagcttttgcaccttatgctttaacccaatacaactattttctttttttttygttttttttttgttgttgttttttgagacggagtgtcactctgtcacccaggctggagtgcagtggcgccattgtggctcactgcaagctctgcctcccgggttcacgccattctcctgcctcagcctttcgagtagctgggactacaggtgcccgccaccatgcccggctaatgttttgtacttttaatagaggtggggtttcaccgtgttagccaggatgatctcgatctcctgacctcgtgatccgcctgcctcagcctcccgaagtgctgggattacaggcatgagccaccacgcccggccaatacaactattttctatcctctgaaagagataggctgcctatcacagtattttgttaattgtctatatgtatacttcaatttttatttggctgaaggtgttgatggtatattaatttttgtatattgagagtttagagtctagcttagtggctgatatatagtacatattcagtaaatattaggctaaataagtgaattgcaaaattcatacatgtttgtgaaagaaaataagaaaggagaaagaacaaattacccatggtctcatcatccagatgcaccaactgctgacatttatatgtctactgtgatcttgtgtgtataaatttctactttctagagcttagcgccttcatagataatttagggaagagagtcattaccctttcccacttcacatagagattatgaatttagtgtatgcaaaattcctaataatgctgttaaatgatttggcctggagaatattaaccatactaaattttactgtgttgtgcatatgactggggctacttttacttgcctggtacgggaaaattgtgtatgtgtctgtttacccttytttccctagaacctcattttggagggttgaagaaattcttcatgtgattcaacttcatattcccccacaacttagctttttatgtgtaatccttcttaatactactatataagctaatctgtatttgtggaagagaatagttgatatactgatggtagttttcatcatagtgctttcctaaggagcagactgaagctcagagaggtttgtagcttactagactctaaactctagatagataaaaattagtacacagtgaacgccatcaagaaggtgtaagatttcagggctagtcagtggcaaaatcgagactagaatccaggtcttttgactccaactcttcagtagtttaatgttgttggcttgtctcttgggaagaactggcaaaggttaattgaaatgactggctctgacctttttttttaaaacagactcaacttctaatggaatttcattctaccttggatttctcctttttttctttcatttttccacgaaggctgtgtgtttattttttattctacttgcaagaaaagagttctgggtgacttaccccttgtaatgtttcctggttcccacccttctgtcttctactttgctcttgtctacttctcaaagggaaaacatttagtggtgaatgggaaagatgccaaatagtgaaaattttaattcatggatgtatggctgtgatgattactttagttcttttacctacctctaagaggaaattcattattgaaattgaggaagcccatatatgttttattttctcttggcttcattttatttttaaaatttatttttgcttcatttttaaaataacttcattttcaagcctcattgtctgaaggttgaggctttgagcaaaaaaacaacacatttagaaattctagtcctgaaaattgctgagaaattttaactgttctcataataaaataagtaaatgaaataatgcatatgataattagcttaatttagctatttcacaataaatgcatattttaaaacattttgtacatgataatatatacaatttttatgttaaaataaatgaatttttaaaatttctagatcttggttactaattctcttatcatttagccatttctgatggctgcttttgccctagattgcatttctctctgggagaaaaaaatcttaatttctttatgttcagcagcttaagggagattacaggcagagtctttggatttgattttcttctcttttgcaattaacttgacctcctcttgactttaagacaggctgttaaagccagcatgttgcttgaggmaagatgtttgatatacttttccttagcacacagatgctactggactgttagcatattgcacaaaacagaattaggtttataaaagaacaaattaaaaagttttcggggaagttttttttttatagtttacgacttctttaagagggaaagctcttgcatagttaattaaggattgtctagtaagttttgacagttgtaaacagaggcttataaagctctaacatacatgatagaraaaacgggttgttagacacaaaggtcttctgtgtacatggaaagctaatagctgtcaattctgagacaggaactagaaaataatatctgaagagtaaatggatttcttacttaaatgttaaatttccattatctgtgcttgcagtttcatcttttccaaggaccttatgatgtgattgcttaattctgattctcatactgctgtgaaacaaagccagggctgcctcaagttaggcccttaggagcccggtggctaggaaagggaggcagcttgtttgtagaaggactacatgtagctattgtttttcttttctttttcttcttcattatttttcttttcttcttcttcttttttcttttttttttttggtgcttggaaaataagtttcacaatagcaatctggttttgtattgtttgttctaagagaaattttttttttcttttctagccatgaagatggacctacagctaaaaaattaaagactgagcaagggggagcccacttcagcgtctccagtctggctgaaggcagtgtcacctctgtaagctaagcttttcaagtgcgcttccccctttgcaggaaggttggggcttgagggagagtgcatcaatttttgttagtccgttcttaccactttcaagttaagatcatgatcactttctctggtccttgctctatagaagccaaaaagacccattccatacttctttaagtaattattatcatgaattgcctacagaattatctatatgatataaggtatatagagctctttatagaacgtggaacatctcagtgttgagattttgctgttggcattattttgcagcttttcaactagtcaaaatgataggataagtgggggttagtgatacgagccttaatcttcaagtacacacaatttaagttagtataactttcctattttctaacatgcaactttagaacaggattcacaagtttaggatttccccaagaaygtatcctttgatacatgagatttttattgaatgagaaattttttggaacttgaaaatactaccwtaattaattaattaattwattwattwatttttatatcttggtcagccaggaggaagaatattttatttaattttagagataggttgtcactgtcacccacgccggagtacagtagtgtgattttagctcactgcagccttgaaatcctgagctcaagtggtcctcctgcctcagcctcctgtgtagctaggactaagggtayatgccaccatacccggctatttttcatagaggtggggtctcagtatgttactcctgggctcaagcaatcctcccgcttcagcctyccgaagcactgggattatagtcatgagtcactgcacccagccaaatagtgccttgttctaagcagcattagtgtgaatcaacaaatcttaaaaattggccrataactttttaacacaatgtactaggaaggatagtcagggaataaagggcatgcctttattctcacctcaaacagaaactcagaaaaattgaatgtgtgaaaaatgatttagatttcatttagatgttttatatataatagtaaaggaaaaagtcatgatcttgttctgagagcttttctgcttcctatatccaagcaaactggaagctttagtatattttggaaccccattgttttctttcttatgagctgagtggttcttaggccctgtgagggttggggccagcagattaaaaacataggtataatcagaaagttccatataatatggcagtttcgtctttcaaacttcctcacccagcactgcagtacatctttgtacataatctgcttttactttctgaggacatgttcaacctgggtatgctttgtatattctaccaaaacttcagtgccaaagggtcagcagcagtcccactaatgggcacttcggtgaatcaggcattaagctgtatttctcatgttatcttagtggggcaaatctattcgaaaccgaccccacactgcagaatcctcggctttctaattggttgggtgacaggatatacaggcagtctgtgctacacaaagccttccagctgggctggctggtggcttgagttgtaatacttttttgacccttctggaaagaaatcagctttcataaagcaaggtgagtgaaagcacagagggcagctcttggaccactgaaatctgccggcctttcacagagccctagaaatgaaaatgaatagaaaagcccttctctttgtctttggttttattttataagagcacacttattacattaagccatcttgtattgcctggggtgctgctaaaaagagaaataacctgtaggtttatcatctgttggtatattttaggttggaagtgtgaatcctgctgaaaacttccgtgttctagtgaaacagaagaaggccagctttgaggaaggtgagtggttgactttgcatttaggagaagctgtttagttaagctaactaatttaaagtctagattaagaactgtagccttttgttgtaacactttagcatttttctttactggcggatctttgtggttttcccttgttagggagctcactgaggcaacattatgagcacatgaaagtgaactcagcacagattttctcaaaaggaactaatttgtaggtctccctacagaaaaactttgggccaacaccttggcgcttatagctccacttcattgaagttttttaggattttgtcgtgagctataaataaaacacttttatgtcacatcttcctattttattttcttccttttttttctttttttttttgagatggagtttctctcttgttgcccaggctggagtgcaatggcatgatttcagcacaccacaacctctgcctcccgagttgaagcgattctcctacctcagcctcccgagtagctgggattacaggcgtgcaccaccatgcccagctaattttgtttagacggggtttctccatgttggtcaggctggtcttgaactcctgacctcaggtgatctgccagcctcagcctcccaaagtgctgggataacaggtgtgagccatcgtgcccggccacatcttcctattttcagagacacataattcttgttccagtcctaagagtttgtggcccatttatagtagacctagaaagaccttgatgctgcccctaaatttaatccttctcaaaatggctgcatggtcacttttccttatcagrtagtacctagaatctcatttaggctgtggctaacataaaaatagytttcagggatgcacagagggcctggaactaacattcattcacttgattgcattcaggtttctgttcatttaccctttaaatggtggcaactggcagttgttaatcctgcaggtttatatataaactattatattcattattgctggtccaagtctggcctgtctgcgagctgacttctacgtatgtgagtgtttatgtttgttcatgtgtgtatagaactttctcttccaacatcctgcagggagcaggggaatcacttttttttttttagtgacagggtctcgctgtgtcacccaggctggagtgcagtggcaggatcatagctcactataacgttggacctctgggctcaagtgatcctcccacttcggcctcccaaagctctgagattacatgtgtaagtcaccatgcctggccaaaaattactttttttctttttcttttttttggggggacagaatcttgctctgttgcccaggctggagtgcagtggtgagatctcagcttactgcagccttcaccctggcctcctgagtagctggaactacagttgcatacccccacgcccggctaatttttgtatttttagcacagacggggtttcgttatgttggccaggctggtctygaactcttgacctcaagtgatctgcccaccttggtctcccaaagtgctgggattacygtgagccacggtggcatgagccaccgtgcccggcccaaaaatgagagttaaatgcctagaagcactactgcctgcagtaggtctaatgcatcttactacttgcagtctaggaatcctggcaagatccccagatctactgtgytgttgtccagaggcaagcatgagcagctgagcctcagagagagcttacagtctaccaggcttaaatcctgtcagcaggaatgccaaaggccaaaccatgagaatctccagaggaagaacagcttcgttatcacagtaatctgcagtctcttaagtggggtgtatatgtttttggttttgagatggaagaagagctttttgtcctgctaaaagttgccatataggagaaaaactttgagttttaacacaaaacaaaacctcatgtaaatagaaggagatctgaagttctaagtgacagttttctaggattggtgaaaacagtacttcagaatttctctctttaatgtattggagtgatcaagacactttcacagtattatacctgttgtctgttcagctgtatattgttacagggtgctcggaaagtggcggagatgctrctgtgacaagtcaatgaactcttgtctatcaagactattgtgtttttgaaggaaaattgagactttcctagctttcaattgtatgtcgtcaattacctcagccagtcaaagtccaaggtcccccgtttggaagtgattggactctgtggttggtgtaggcatggtcttttcagggactgaatctagctgtcatcaccattatatggtagccactagcggtttcatatttactatgttcaaggcattgtgctagcacttttatgttattttaattaccctgcattagcagttctgcaaaatcttgtgaagaaatgaagaaaatgttagagctttaacagcttttgccagaattttctgagaggattgctttacttgggaaaataactttgataagtgcttagggtagagaatgagtctccatccccagacttggttggctagtccagaggcttcggaggaaaggaagctcctcagcatcatagaagtagaaaaactggagctggtttaggagaggaggggcttagaagaagaggggagaggcagggagacaaagtgggtgaatttacgcacagtcacggccttctacaatacgtttcaaactcatgaccacraattactcagtgtcagtacaactctggaaatgccaggtttaagtgctgtatttggggaaactggcagtttggtatctggcattatttcatgcagagcagagaaagcacctgagcacacaggaggccagagtctgaaaagaccaggagagagtcagttactgagaatctactcacatcttaggaaaatatgtcttacccctggccatgggattggggattcagagcagtcttgtgaaaatagcaagggcaagcggaccctagatagcatgtaagttaacaattagtattattatctccattttactgatggataaactgtaaaattggaggagatgcattttcccaaagatcacataggaattcaaacacatgtctctttcaaatactggattttttacgtagccatattgtttcttttgattcctaatgacttcctttcctacgctttttaaaacaacattttaaggtcgtgtatctgaaaccttgtacctactgataggacttttgatgaatagattgttcttttatattgaatttgactttgagacccagcatgttgctagtatttcgacaaaagatgtccctctgacctccgtctaagacttggtgaatcagagccctctagtgatgtcacaaaaccagactctccacagagctgtcggaaaatggattgcttattagcaactagttctcgtgattttaacttggcttccgttttatcccttctgccgttcttggtgccagctccagaattgatgtcctgttctttgttttgggcatcttgtttgtttgtttttccgctagggcatctttttactaacgccctttataagccaagactcacttctcttgcaggcccaaagagttctccctccctagtagtggtcttcttttagagagatttctgtccagagtcgggagacaggaatcccttccccttttctccagtaaatttattttttaaaattcagttgtcaaaagggcgatcagcgatagatagttggtaagattgtttgacccttaggtagaactcggctgttttacctatcattataaattaaaatatgggtgtagttactttttctcaggcctgatagtagcataatcaaactgagagtcttgtgattctgtccccgacatcagcagtctatatatagtaggcagctacacattttcttaacttctggttttcagtgtgagggatgtatcttgttctaagcttactggcagagaggagataaccaatgccctgaaccccaggaagcatgttctttctggctgcccttttcccagtccctttcctccattctccctacccatcaccattctatcaccacagagttagaatagaaaacaattttttttctcttttccttttttgtgaaggggtctcagtctgtcgcccagactggagtgcagtagcatgatcacagctcactgcagcctctacctcctgggctcaagtgattctaccacctccaccccgccaagtacctggagctacaggcacacactaccacaccaggctaatttttgtagtttttgtagagatgaggtttygccatgttatccaggctggtcctgaactcctgagttcaagcgatctgcctgccttggcctcccaaagtgctgggattacaggtgtgagccaccaagtccagctcagaaaaaattttgaccacagctgtatatataataatcatctatcagttatgaaagtagggttgtttccctrcatacactattcataagcacatcattgccatcatctgggatttgttacctgtcgttgtgggtttcagagtctccagaggctctttacattgagtttatccacttgtttggayatcttccacccagctaatcaacagagttgctaaggaggaatgccatgattttcagctccttgcgctttcccaacttaggaagaatgctaaaataaaataaaataataaaatgtcaaaagatagacagcaggttcaagaaggaaaagccacattacttctttcctccggacaattcctgcgygattatgtctgaatttataaattcccactgagtatgggagataatgtaaaatagcttgaatgttcttggtgtgtcaaaaacaggttttgtgaggatcttaagagccagaaaggatggatatatggggacagataaaaggatggaatgtaacttaactttataatgagaygattctctttcagggaccttgtttttgccactgagattgtagtttctgtattaggcttgtgtgtagtgacagggtggcagagctccatgttaccaaattgaattcacttgagcctgactggtttaaaaaaagtctgtcaagagaagacctaagtagaaataatacagaccccaaacagccttaacatttgactcatgtacaagagagcagtaatatgtacttgtccatttgattagaaggtgatcacttcatttttttcccctttcactttgtttggattacgtctcatcctagagtctttttgcctttgttcttcaaccttctttaatctcacttactagaaacatcctttcatttttaaaagatatttcctaaaattcactttttccaagcaatttcagcactagatagaatatggtacaattagtaataatatgatattcatcaaagccaaatagttttcagtgttggttttgtatggtatagcactatcccatttgcatagctgtttacttacatacattatgtgattttctgccaggagtcaagccctaaacagtgaaccttygagaattgtgatctagcagaaatctctctcgtgtgtgtgtgtgggtttgtgtgtgtgtgkgtgtgtgtgtgtgtgtgtgtgtgtgtgtgattttttttaattgatcctgattcatgtaatcttgggtatgaattatataatgaattatactctgcccagatagataagaagataaaaatatggcgtttttctacacagcgctggtaaatttaagaaaaataagctctttcaaataccttgagcatcttaaagatgctaaatacaaacagtcastaaaattttaaacatctttagccctataaaagtttttttcttaaagaatttgacatacttttttagtcctttctccaaatagcattgatacatctaatcatgagaaaattcatgattaaggattccagaggtttagtctgtactttgtatttttattaaatatctcacttgtttttcactggttttctttttgactcattttaaattattaaacctcagaacctgacaatccaggcttattttatgcctcatttatcaggacaagtggtctcattgtaacacaaaaatcagtgtgtttggaattgtagagaatacttgctgaaagggtgtgttayctgacatcgtaattatgcaccattggcctttaaggtgttgttcatctttcatgtgggcggactgaggcccagagtagttaggatgacttttcacagataattgcaaatatgtgaaagactctggatcaaattccagagagccaattcttggcctctgtggcttaaacctttttactggttgtgtatatttcattggatggcacagcaccaccctgaagtttacatcttaatataatgaaactcagcagccaaataatttagatgaaatcattgaaatagagatgaaaagaaaaaataaaaagcacatgacgtagaaactaaagaccattatgcacacataatcattttaagtattttcatttttcagcgactcttcctaaaaggctttcatctattcttacccagcctttaaaatccttttaagttcctgtcaatctrtatcagaatatccctaattacaggatatagctcttgtaaaatgtagcctggctatccattaagaaagagaaatgtgtggtagcataaaaatgaaagcatgtttgctgtagttacattctgttaactgaaaaaaatcacaagatctataaatttagaaaaagagagctttatttcttataaagggttacagcttgcaaggtggaaatagcaaggccaagtggaccctagatcgcatataagttacagtaagtattattatccccattctactgatagataaactaaaattggaggagatacattttccccaaagatcacataggaattcaaacgcatgtctctttcaaatactggattttttacttagccatactgtttcttttgattcctaatgccttcttttcctacactttttaaaacaacattatagggtcacatatctgaaaccttgtgcctgttgataggrcttttgatgaaagcctgggaaaggctattcctagtctattcaaaggctgggaaacatggcctccagccaaagcccagagacaggcactatgaaggagggtttggggtaagagcattattgctgacctgattgactaaacatacatattcagcaggttacaggaggagctatgaatattcatgaaggtggtcctgatgcatgagtattaaacatgcatgttacgtaatacccatgttcaccttgcagggaagacttgacatttaaatattacagttagaccctgtacatcaaaaggtcttttcaggacacagcatgcaaatgtgccatctttgtaaaacccactagaaccagtccgtggttggtggtcttcttatcaggagaaagttaccgaaatcactctcttgtccaatcaaagctgtagttatggctggtggaacaagagttcagtaagtcagcatctggtagagctgcaaattgttttaaaaacaatattgcttatcccaaggccagtgcttttttagctgcttaagaaaaagaaaaaccttttggcagttagaacatagtttattctttaagtttarggggtgcgacttaacccttgcctggcatggccttaggtcctgtttactacagtttgttctctcagtcttatgatacctattttaaaattaatgctggaaggttgtgtctaaattgcaaaaaggaggggtataatgaaatgcacctggccgggcgcagtggctcatggctataatcccagcactttgggaggctgaggtgggcagatcaggaggtcaagagattgagaccatcctgggcaacatggtgaaactaaaaaaaaaaaaaacaaacttaggtgggcatggtggtgcgcacctgtagtctcagctacttgggaggctgaggcaggaaaattgcttgaacccgggaggcggaggttgcagtgagctgaaatcgtgccactgcactccagcctggcgacagagcaagactgtgtctcaaaaaaaaaaaaaaaaaaaaaaaaaaaaaagatgcacttgaccccttgtcgtgtcatgaccaaaaactcagttaaggttttctgggatcccctttgtcaagagggggtccatttcatcagtggggagcttaggatttctagtttacatttctcagtgagcacctgaatttcttcctgagagctttttaaaaagtccttatgaaatatatgacagtgttcctgttttctcccagtgttttgttttctcatgctacataggaaagttgcttcccttaaatgtgctgagtaatttttctctttttatattaaaaatggaaagaataatttcccatctggctgaaaatggaattcatgaaggctttctcagcatcataactagatgagcccagagtccattcaagcctttacttaatatactaaatcactcctgataccartcttctatgaaggagagagagagagagagagacacttttaaaccatgagatatcaaaagaactcactgtcacaagaacagcaaaggggaagtcctctgccgtgattcattcacctcctaccaggctcctcctctaatttgatatgagatttgggcgggacacaaatccaaaccatatcatttcagcttgcatcaatgacttgggccatcagtgcaacaaggcaggtgctcacaattggttccgatggaaatgcagaactcttgggtgcttaggagaaagggcctgcagcttgctcttagaattcacccttgcagtaagtgctaatgagtatgatttgtgagacagagagcagttcaaggatttactcatggcaatttggtyctttctttccacctcctgttaaattctgcagttcttccttccatggtaggtcattgtcatgtcatgtagggtattgtacttggttctccttgaattgggctgtcttcaagattgctccttaagcccagctggttgaaaaaggaaaccggtttcagattgtgctgatgtgcaaactgctttaatcaatgacttgaagtgactgctggtggcaaacaacagacgctcttaaccaattaagatatttaggaaaggatgttaggcttttgttaaaatagtcactaatgaactgaaatgtgttaagaggagccaagaaacagctaggagttccacttaaatgcaataaaagtgtttgggtcctcccctttcaaattgcatgcccaaggcaaaaaatatgctgacacagaaagaagtggcaagtgtaatttggtacagttagcctgtcagatccatgcgtgtctacataaaacctagaaaaatgtcgtgcttgcttctttggccagaaaagggaagggagtttaattcctttatagaacagtttcagcagggctggagaatattaccagcttagatgtctttggaaatgggagaaaatttaacttgtttttagaggttccttatgttttagaggttggagaaaaatcttcagttaatagtcataattaaaggcccgtttttattttcctctgtcagattaaactactgaaatctgtagttatctgttcatgtctctcagtggtaatgaggctcagccataacactcaggataatatggtatttcattggtagccatttgaagtcaggagccattgctcatataagaactacttttttacaattcccttgctcttggaatccaatartgttttcttggggcattgagagtaagatacactgtctaagttttcatacttattctgtgatagaaacatctagtttctctcttctgtctgtggtaaatctctacaagtctcttagataaattgcacttattaattctactttttaaaatagctttattgaagtaaaatcttctactataaaatatactggtaagtataatttgatgatcttttgtaaattatagagttgtraaattatcaccacagttcaaagaacatttctctcacacccaaaaattcctgggacctgttcatagtcagtttgggtctggagtgcacacaggtggtgggaggttgcaaggtgatgctggcctacatgacttgttctgataatcctgagttattgcaccatctgttgaatgggctggcgccatcttgggcctgacgagttgtaaattagctgcagccttcaagtaataacccggtggtggaacattctatagatacctggattgtctctggaacttctaagcaaacataattagacaagctagcaatgcagtggagtgtctggtggaaaggaggagagtaaaggttgttatttcataactaaaaagttaatacaaagggcctcagaaggaaaagtttaagaaaaaaagactaaaaaatagaatactcggatacactccaactttgttcttttctaaaaatgttttaactactctatgtcatttgcgtttccatggaaactttagcatcagcttttcttttctttttttttttttttttgagacaaagtctcactctgtcacccaggctggagcacagtggtgcgatcctagctcactgtagcctccacctcccgggttcaagtgattctcgtgcctcagcctcctgagtagctgggattacaggcatgaggtactacgcctggctcatgtttgtatttttttaatagagacagggtttcgccatgttgaccaggctggttgaactcctgacctgaggtgatcaacctgccttggcctccaagttttgggattacatgsgtgagctgccgtgcctggcccagcttttcaatttatatgaaaaacccactggtattttgatagggattttattgagtctatagaagagttaagggaaaattgccattttaataatactgagttatccatgaacatggaatagttactcatttatttagatcttattttttctccataatgttttatagtttttagtgtacaagctatacagctcttttattaaatttattgccaagtattctttttgatgatgttgtgagtggaattgttttttaattttatttttggattatttgttgctggtatatagaaatgaaattatttatttattatatcttgcaaccttattaaacttattagttcttgtggttttttaaatatacttcttaggattctctacatacaggatcatattgtctgcaaataaagaaagctttacttcttcttttataacttgtaagtttttctttctttttttttaattattgtactggctggaacttctggcacagtgttgaatagaaataagagtgaacatccttgccctgttcctgatcttaaggaaaaacctttgtctttcactattagtatgatgttagttgtaagttttacccagatttcctttgtcagcttgagaaagtttccttctatttctaattggttgaaagtttttattatgaatggatgttgagttttgttagatgcattttctgcctctattgagatgactgtgatttttattcttctgctaatatattaattgacttatagttgttaaatcaaccttgcattccaagtataaaatccagtcgttctataaaatcctttttatatgtactgaattcatttagctaakgctacagtttgaataatgtcacccaaagtttatgtgttggaaacttaatccccattctaacggtgttgagaggtgggacctttaagaagtaattaggtcatggaggcatcattctcatgaaaggattcaggccattatcactygagtgggttagttataaaaaggatgagttcggcctgatttcttctctgtctctggcttgcttctgccttctgatgtggggtggtctcctccagctgccggtgtcatgctcttagacttcccagcctccagaactgtgagctaaataaatatctgttctttataaattacccagtcttgggtattctgttatagcagcacaaaatacactaagacagctaatattttgttgggaaattgtttgtagttttcttgttttgtgtgatgtctttggttttggtaacaggaaaatactggactcatagaatgagttaggaagtttccttctcttcaagatttctattatttattctttacatatttcatataatttaccagtgaagccatctgagttctttgtggggagcttttgttttgttttgttttttgaattttgagattgtttcatttgaaggtcaccttaatgctcttaaattcaaaaatatgctaatttaaataccaaatcctattaatctaaaacacacattgcaaacatacaaatatctcttctcttcacatgtcagtgcccattcatgtcatggtttggaaatggggacaktagattccccttgagctgcaagtcagcatatgtttctttatagttaactttagcaaaatttatacaaaatagtaattaacaayaatcttctttatttgttaactcaaaagaaaataccttcaaaactgcattttaagtttctgtactaaaatacagaaaaactacacaaatattgaaaagttgaaagttctttaatttttttattcctgttatcactaccacaatttacagggcaatatacttgatgtaatgaaaaagaaacagacaaagctacaacagataaaagagctcaggaaygtacgtctaatcgacactatattgcattcattaatagctgcacttttgcaaactgtggctatgatagtcctgcacaagaagggttttctgtttaagctgcaataacttttctgaccatggatcaccattccttctgtggcagatttttacagttcctctaatgcatttgggatgactatctcaaataacctgcaacttttgtgacaactccttgttctttctcctgctaagaattgtagcccctctctgctgtttttagaaccttctgctaccatatccgtcacgtctaccrccagatccgtaaccaccaccaccacaggaactccccgagctkcttccaccaaaactgcaccctttaatgggttcataatttgattgtttttgtctgctaaaatttccagaatcattatagttcccaccaccaccatagttaccactgccaraatttcctccttcattgtaaccatcatatccttcaccactatccccatacccgccattgtggttttcatatcctggttcaccatctccatagcccccactactgctgtaggcaggcccaccaccattgttgcccaccgtcacctccacatccattatatccaccattacaccctccataaccacctctgctgccaccacctctacttctaccaccagagcctcctcttycaccaaagtttccaccacagccaaaattacttgcaccacttccagagtttcctccacaacccataaagttgtcagatccacctccatcacctctgtgatcctgcagactgcatctcttgtttagaaagggcctttttcactttacagttgtgcttgttaatagtgtggtgtttctaaacaacagttttatcaattgtatcatgatcatcaaaagttaaaagtgcacattctctctttttccactctgtcatccataacttgtatggtttcagtcttgctatagttttcagagtaatttctgaaactgtatctactttaataccaccagcaaaaatgttcttcactgttaggtgggcaccaggctttacagaatcctctctagaaacaactgtctttggttccactccacacccatcaaccttgtgtggtcaagcacacattgctgygtccacctcttcaacacaagagaaagccataaaaccaaagcccctggaatgtttgcttggggttctgtcattaccacacaatctgtgagtgtgccccctttctcaaaatgttctcttaacccatcatctgtagttttaaagctcagaccaccaataaacaattttctcagccgcgctggattcctttggatcatggccttcctcctcttggcggcagtggcaatgacaacggccagagtcagcctaggggcaaccgggtagtggttttacctccattttaagactagacttgcctcctccaactcaagttcaacatggaactgtgaggaagaggctgtgggaagctttttaatactaattcaatttttttcttttttttggatacggggtctcactctgttgcccaggctggagtgtagtggtgtgatcttgactcactgcaacctctgtctcccgggttcaagccattctcctgcctcagcctcccaagcagctgggatgacaggcgcccgccaccacacccggcaaacttttgtatttttagtggagacgggatttcaccatattggctaggttggtctcgaactcctgacctcaagtgatccacccaccttggcctcccaaagtgctgggattacaggcgtgagccactgcaccgggcccaatttttaagctaataaatctggtcagttttaaaatttcttattgaatcagttttagtaatatgtctttataagaatttgttccttttgtctaattttttagtataacattgattattattcccttataataatatttttgagatctgttctttatttctgatttggggattttgtatcttccctttttcttggtcagtctaggtaaaggcttatggattttatctttttaagatcccagcttttagttagttttattgattttctccattattctcatttaattaatttctgctctgatctttattattccattccttcttcttactttggctgtaattcacttttcattttcttgtttcttaaggtggaagcttagatgattgatttgaaacctcttttctaatataggcatttaaagctatacatttcctgctaagcagttttttagcttcacaccataaattgcgatgtgttatgattttgttttcatttagtttaaatatattctaatgtctttcatgattgtttctttgactcttgggttatttaaatgtgttcttaaattccaaatattgaagatttcccaatttcttcctgttgttgatttttaattctgttatgattggagatcatactttgagtggcttcagtccgtctgaatttattcagacttgttcttatgtggtctcacatatagtctgttctgccagttgttctctatggccttaaaaagtacrtgtattcacctgttactaggacaagtgtgctggaaatgtcagggcaatttggttgatagtttgttcaaatctgtctttygactttctatctagttgttttccgtgacgttttgagtattgaaagttattcaccttgagaccttgtgtgctagtgagacctttatgattttggtctcacctagctaaaccagcttgggtcatgagatcctagtgaatttttacagggtgacactaaagaaaacactgtcaattcaggtaatagagtatatgttaaataaaagtcttcaggtattggcattttaggaaaaataaacttagctatgtgtgctgcaagactgtatgtgtttctgaatcctctgcttcgagggaaaaatcatattagtagaggataagtttactcagtactggaaaaattgtgtagattttasgaacttgttggagcagaaaggcgattaattgtgagaaatgaaagtcaattttagtggcagcaggtatatcaagtacatcaagtcttagttcaatgtttatagattttgaaaatttataggttcattattcctttcatttgtttcttcttttgtcccatttttgtcaagcatgtatttattttgtttgamtccttttttgtctcatggactgagaagaaaatataactaaggttggatyatcccacaatttgctctgtgtctaattattctgaggtggattgtaatgaagccagcaagacttatacattggaattttaaatgtatgggattgtaaggagggtagaagctacaaaccaaagataagatatgcctgcagatctgcttcagatttcctgagggcagtagatgaaattatttctaagggcctttttyaccactgctctttaagtatatgagtaataaacaaaaagaacaaagtatgtggttcagaaggaataaaacaaaaaagaaagaaaaggatcaatgaaatagaagtattgtgtcaccccatgaaaattgtcttcctgttgagagctcactagaaatagaaacaattgttttttatctccttgtatgacaatctcttaactgtttcgagatgatttacttgcttcttaggcttccattaaaaataagcacatgcttatatgggggaaaatgcaaatagtaatataatagcatataaagttaaaaagtggacatctccttctttattgtctccctccctttgaaactctgcccatacccacattctgtgtcttcataggaataaccctgttcatccctactgatgccctgtattgtgatcaagatggttaattgttttagggtataataaattggggatatagtcagagacagtacattttgggagaaccctccattcccagtggcatcaagcagcttgatcaaagaaaagaaaaaggtgtacaccaagatgagatgaggcatacttagtaagcaataataaaacgtcaagatgtcttcatgcatataatcatgacaatgttggatgtgatatctcatccctgtacatctgcatatatatcttatatagcatgttattctttctgcatttcccccttcaatagagctttattgtaaccatttccrtctctgtaaaattaagggagggaggggataaaagagagttctagactgtctactcccctaagtggcagccagtgctaaatacacagcttatgggtttaaactgaacgaacaacaaaaagacatgttcattccttaggcttttagaggaataaaccagtgaggcctacaccatttattcatccattcaacaattatttgttgaatgcctactgtgtgccagtcataccaagatacagacagtaaacaaataagaaaatatatgtcaaatggtgataagcatttgtgttagtgtcctagtgctgcagtaatggagttccacaaactgagtgccttaaagcagtggaagtttatccttgcagttctggagactaaagtccaaaatcacaggactgcttccttctgagaggtatgggggagaatctgttcaatgctctcttgtagcctttggtgacagctggcaattcttgcatcccttgacttrtagatccattactgtaatctctscttctctcttaacaggggagttcttgtatgtctgtatccaagtttgcctcttcttataaggatgtcagtcctattggattagggcctttcctagtgacctcatcttaatttgatcacacatctgcaaggactctctttccaagtaaggtcacgttgtgaggttttggtaaggacaggaatgtgggggcggggtggggatactattcagcccatgacagcactatagagaaaagttaaagcaggatagtgggatagggaatgctgggttgagatgggcttataattttatgtagaggatcagggaagtcctcactgttgaactgagaattgaggatagtgagagagagaacctagtggatatctgggaggagagctttgcagacagagggagcagcatgttcttgagaagctcaagatgastatgcttggctagaagcatcagggaggtccgtgtgactggagcaaagaaagtaggagctgagaagtcagagagctggctggggtacatatcacataaggcctcctagaccttttgcttttctctgagtgaaatgtgaaaccattgaagagtttgaagtagcgaatgatctggttttatatttcataccatgttgaggaaaagggcaaggttgaggtaggcagatgagttagaaggcttcggcgttaatccacgtgaccggaggtagtaagaagaggtccgatttttgatctgttttgaaagtagaattgtcaagttttgctgatcatttgaatgtagagtgtgtgagagagaaaaagtttaaaaataactcccaagatttttagtctgagcaactggacgaattgccatttgctgagaaggagaagatggtcatgcaggtctggacttcaggaaaaaggtctgagttgtatgtataaatcgtggagaaggagccatagagactttaagacatgagactggaagagatccttgagtaacggagaggcatgggatctagggcacaggtggaaggggtaacttagataacacacagacagttcagcaaaggcaataggatggaaggcagactatatgggtgcagatgcaggtaggtgactactttgaagaakaattygtggaggggccgggtacagtggttcacgcctgtaatcccagcactttgggaggccaaggcgggtggatcacttgaagccaggaattcaagaccagcctagccaacatggcaaaaccccatctctactaaaaatacaaaaatcagtcgtgcatgatggcttgggcctktagtcccagctactcaggaggctgaggcacaagaattgcttgaacctgggaggcgggaggttgcagtgagctgtgatcatgccagtgcactccagcctgggcaacagagcaagactctgtcttaaaaagaattcctggaggaggttggcataacctggtccattatggtaaaggtggataggagagggcccaaagaagggcattctaaggaaggcaaccacctaagtgatggcgtgtcctgatgttattaatgggactttctccagaaataagcagtgttgttaactgttgttttgccccttgagtatctttttttttttttttccgagatggagtttcgctgtcgttgcccgggctggagtgcaatggcgcgatctcggctcactgcaacctctacttcccaggttcaaacaattctcctgtctcagccttcctgagtagctgggattacaggcatgcaccaccacacccagctaattttgtatttttagtagagacggggtttctctgtattggtcaggctggtctcgaactcccgacctcagatcatccacccgcctcggcctcccaaagtgctgggaatacaggcacgaaccactgcgcccggccttgagtttcttcattggcatttctgacaactttgtatccatttctcttctgctttctaatcatcttctaatttacttctcaggtctgtcttttcctttccatcytatcactatccgaattcaggctttcattattttatcattggacagttccagcatccttcattaataaccttcaaagttctccttcattcctgcccatatgtttgtacagatttaagttcttatagcacagattttattctgggtcagcccttattaattactcccattcagtcccccattcaaggcttgccacaatctggtcccattctgccactcccgacccattcttatacagattccctctgtgaaccttgtattcaaaccatgttcctgctaatgcccttgcagcatcggctttctaaagctgattaactcttttaaaaaaatggccattcttatctttacccccaaatcctactctaaagagatgcttgtgattwgagaaccggtatatctttggatcccaatgccgcccgtagttttattgtagtatgactcattagatactgctgctgctttaccatcagtgagacaaaatgacctccatctggcttttttggtttycattgcgactttaataaaacagtgcttgggagtaataagaatttgaatttttgaattgtagcagatttacttctctggttctttggatcaattcctaagtcttagccccatcaaagaagaagtgcagaatctaacgtgtctgtattttgacctctagaatactgtaaaactttcttcataaaattagaaaggatagaggggggaaaatgaaaagaaaaagaagaatctgagaggtccctaaggaaaaataccgtataaaccaaggcattatttatcagtttttagaaggagttatcacatagaatgtggtctttctaaaatttctggtacstaatatttcctttcaaaaaagactcaaattcttgaggcatcctagaagacttgtgtgctgcctcccccttgtccaccctccccaaaagcacattcaacaatggctgcctgtttctctccttggtgaggagtctgactcatcattcactctgtcttttcaactgatacctgcgtttcagttccattcaattaccaacttttaattggatcccattgccagattgattttgtgttcctgttccctcttggctgcactgttactatgactacttggtatcttctacttacttcctatattagtttgatgacatctagtcaggtatgaagctagatagatactataaaattgctacagtaccaatcactattatcttacatttttcctttcccctactgctcatttggaatggaatcaagcatggtgataaggttcytaattcttctctatcaattttagtaagcattggcaagttttagaattctaggaccttggaaaattgtggagaccctcttcctctgccctccctagtcttcaccccccaccacaacacattctttcaggcatatggcatatatatttcctaaaaagctgaaagatatcatttcctcatttaattagaaagtcttcctttagtttctttcttatgttagcataatgtctcaatattctactttaagtgtactcckttgtagaattggggaaaattagttacactaggcagtgcatgttctttggtctttagttaactgctgtatgccctataaatattaattgatgaccttcaggctttatgggatatgtttagtggttttttaatggttaaactgaatatttttaataaaaaattacaagaccatagaatgccrcagaaccattccacttaccaggaaacttaaaatttgccagctgacctgggaacagatctggtcatatacccaagctatttaagaagaggaatattattcatcagaataaaaatgttatatcataatgctctcttacataaaatgagcttacagccagtgggctaactggatatcatttttctggtttcttgttagctcccactaccatatttgttacacagagtgaactaaggccaagagaccttccatatcattcttcctgtggctacaaactaggattcacagctagctcaaataaaaacagaaataaaaggagagagatctcatagtctgcargaatggattctgacaataaagaccttgcatttactctgttccttgtgcctggggtttttaatttaacacatcaatgaaaaggcaccatttaaaaaaggggggaaacacccagcaggacttacttttattagtgcaatttgtaagaaattactgcacttaatgagaaaatcattaagcatgaaaaaatgggctctgactgaacttgtggaacttaaatggtgaggttttaattgagttttttagttattggtaagaataakaataataatttaaaaatacaggactgcatctgtgtgttgaggtggtcagcactttgcatatcttagtccaatttcctgtgccactggtcatgcataatattatggctgtggtgttctctctgtcgtatctactgatttttctgttctgaaagggaagcagggaacttcttttttgttagattgaggaagtttggggcaaagagctagcagaacagtttctagaaggtggaagaactgtaggctaaggcaaagagcagagctatgtctgcttctcagtccagctgcttaaaaaagatgacaaatttcaatgtcattttcaggttactcaagcttatgcttttttcctagttctctgtttcttttgttgccatccagtgatttatttttcctcaataagaatatttcattaaagaccatgcaactagaaaacaagaataccaagagcaaagagcactcttcagtccgaactcttttagaagtggaagcagaaagaagggtgtttaagaaataagtcagcactgtgtgtgtgtgtgtgtgtgatttagagaaaaaatatttaagataccttctttttgtacttaaaatttcataagtacgtttgacttctgagaggaccagaatgccatgggaagtgctcagttgcatccagtacctgttgtttattgtcatggtccacacggttgcatgtcacaaccgtgttagaactgaaggaaaggaaatgtatgtaactctaaagacgtttcaagtagaagtgaaaacaatatttttttacataatttgttttttatagaaatacagcttttatcaaatgtctgggagaagctttaaatatgcttttgaacttcttcagtaacttttaattgaatttcattgtatcctacctcactagaaagaaagaaacctgcaaattttagcttcccttataatttaaatgatgccttgctaatttctgtgtttttgagatggagtctcaccctgtcacccaggctggagtgcagtggtgagatcttggcccactgcaacttctgcctcccaggctcagatgattctcctgcctccgcctcagcctcctgagtagctgggattacaggcatatgctaccacacccagctaacttttgtatttttagtagacggggtttcgccatattggccaggctggtcttgaactcctgacctcaggtgatccgcccgtctcggcctcccaaagtgctgtgattacaggcttgagccgctgggcccagcctgatgccttgcatttctgtctcctggaaatatccaattcttaaaagaggccatccccttgtgagttcataacacactgtgcccttagatcccctcctcaccctcccttcttctgtatgccctgcatctgagggaggtgtgggcagagctggctcttgtaggttgcatttcccaggctcctgtgtctaaagacttcctactgggttcggcatgagagatactggtgggaagtagggagrgagaaaccggtgtatctcttcttccctttctatgttgggtagcatctttggtcctcagtgtcttcagctcccataggacagatccctgaactctatttatacccttttctttttcctgagtaccaagggatgctaagggtttcttgctgttaccaatcccggggttacagcaccattctcagttggctttaacacacttcgtaacctgcaaaacaatttcctgtcttaagtctcctgtgttaaatatttggagtggtttatattccttgtgttggwccctgactgatacacacaccgcctctacccacaatggccaatttatatccgatagtaaagaggcataaagaaagcccgcttttgataygtttcttaaattgcctctgttaaaacagactttcttatcaggcaaatatcttttataagtttctggcttaaacaatgattataatttacaggtggatttaatttatggtagactggactgcttgcctagacttttatttgctgatgggcattactcctttttattctcttaataatgaattacctgaccttatacttattttgatttaagtgcttgatttttattgtcacttttaattttgtgttataaagatgcaattgtcattggctacataaatttgtttttttcttttctttttcttttttttttttgagatggaatctcactctgttgcccaggttggagtgcagtggcatgatctcggctcactgcaccctccacctcctgggttcaagtggtttctggctaatttttgtatttttagtagagacagggtttcacaatgttggccaggctggtctcgaactcctgacctcaagtgatccgtcctccttggcctcccaaagtgctagggttacaggcgtgagccattgcgactggccataaatttgttcttaacatttaaaatttatttaactgctgacatttgcaaaatgtacagcatttcaataagtaacatttacatgaggcattgagaaagtgagaagaattaaattgggaaatatcctaaatgatggctgagttcagccaaatcatttgaggtgtcttcacagtcttttatatataatgtgtgacagatgagggaacctactgctttttgggctctgtcagatggaggagaaaatcccacaataaatgacttcctttcactttgttggaaacatctttgcaaagaacagaggtagtgagtaaatgtaaagtcagaggcagacatgcacatggccctgggtgttttgaccttggtgactgtgcaatgagaggggaggtgtagtccattttataggactttgggtggtgttgaatgtattcagtagagaagcagaatgtgtatttcagattaaacaagaaaacttcgccattttcctcttctgtaacatttctaaatctggataacattttgaatatgatactgaagtattgtattgagattaattttgggtgtcaacatctgtactcatttaagatactgggttagtatatgatgcccatatctaaaggttttgcattttctaaaacctcaaaatccaaaacagacatttgaagtaatcctggaaataaatgacagccatttgcctgacttagtatcctaagatggatggcccttccaatggccattttttattttagctactaatgagtattattgagtcactaactaatttcgaaaagcattttggtgaattataattggrgctgtgatttactgagtttgaagactgataagccattcctcagccctgtaattaatgtagaagcagagaaaagcaccctgatgatcagcatttcctttatgtggggcaggggagtcaaaagcatattccagccaaatattatagaatattattttttcagccatttctgcattttacttttattaaaaatggcagggaaatgtgaagtgccacaaaactttggaaaggaagtctcttgtttacatcccttttgatactcagtatattcaagcgtcatccatcacagctattccctggtgttaaatggttcgttatagtcagtgaaccacaaaagtagtctgggtagagggacagaatttagaatcatggaccagatttacaagccacgtaactgagtattcctagaaggccaaaatctggttgtttgtattctttgggtttattggaagtttggatatgtttatccatctgtgtttctgaaccctctggaggaaagagcacaacagtctaacatgtaaataagaaaaactaaatccacataggcccacagatacattaggacttcatttttttttttacaaagaaactgggtattgagactcctgctacttccttttacaaagaatttatggtagactggactgccttctttcctgtatcgttgcaaatggattgttggcttgggtatttatttttgtttcttttgaatatttttctctgtaagatagcaactgtgtgtgtgtgtgtgtgtgtgtgtgtgtgtgtgtgtgtgtgtgtgtgtgtgtgttctatcatatttcaggataaaatgagtcaggaagctggttgttttggttttttgttttgctttgttttttcgcaaagcaatttagtacctgtgtagttgtttcatgggctcccagnnnnnnnnnnnnnnnnnnnntactcttttccgtgtagtctttatgcagtagtttggacacagcagacaactctttcctttaaataatctcttctcttagtatctgtgatgccatgaactcctgacacacacacacacacacacacacacacacacacactctctctctctctctctctctctctctctctctctctctccccgtctccctgtctctccctctctctctctctgactaatccttcttagcctccttcttcagctccctttccactatccaaccgctaaaatttcttctttcttctacactttctaaggagccacgctgtacccctacctcaggactctcacacacactttctcttcttggaactccctttcctccagccatttgctgtctaatcctcactcttttttcttcccctatttctgtccatgtatgaggccatttgcttttctccaaacacagcttgtgctttcttcttcatacttaggctaattgtgtttcctgctgtgtaattgccaaattctgtttttcattgcctagctaaaaagccatgttgatttgtgaagctttctgtaatcaccaaagattttttaaaaattcaaaccaattaatatatttccttaaaactcatagccctcttcacattatttcccagtgttaattttatgtatatgcattatattccctattcaactgcaaactcctcaaaggcaagggccttgtcttcaacttaattctgtctcccacagaacataacatagtatcttctacatagtagttgcacaataagtatatactatcaaacaaagagaaacatttatattatagcttcctaagatttcctattctcatttcaaaagaaatggagaatwtagagtctctaggattattgcccttggcctgtaaaggtttttatttgtgcccaaatatgtaacctcgagtgaactttgtatcagatgatctgggaaagtacaccgctttctgttatcaaacatttctgttactttgcttttcaagctgaaaaggggagataacttctgtttgctttgagcttttgttgatggttttctgctctgcctactaatcagggttgtattatttaccttgtttaaaaaggttcatctgaacattctctctctattttgaattgtaattggatattaattcactgctgcgggatacgttggtaaagatttttgaaattgcagggaaatgtttctttaatccctcaagtttgttaagtgctttcttataatggagatcataatctccgagttggtagaagggatgaaacggttactggggatatttttcccttgttagaaaattgctgtattaaaaaatacttcatccagttttttaatcctttccacatgctgtatggtccttaggaaataagtagattcttagcaccgatttcatgtttttaataaggaaggcattgagtaatgttcaggtcactgtgattcacagagttagtggcctggggcctttattggtaaagcttgaaagtagttttctttagcattgtgcatacacaggtagctgctagaatgctcacaggaggctgtgatttggggaaacaggcagtcatagaatatcttgaacattcagcataaattgccaaacagccacagctagtgaatggtttcaggggacaagggagaggagcctttaggcatgattacccacatctccctgatttgttcttccacacacagatcttaagggtcagttttgatctgcacagcattaagtttcctcatgacttttagatttcctttttcctctgctttttattcatactgaagaattttttgtttctttgtaaggtgtaatctactttggaaatgataacactatgaatgcattttctctttctgtagcatttatgacattgcttgctgacagttactgtttattaagtatttgtggcttttggagtagtgagcaatagggagaatattcaggtccagctaagggcataaggtagatagcaatgatttctcattcgaaagggatattttgttaagactagggctgatcttttctaatttaaccttggattggtagaagatggggtgtccctggctcattatttttcactgcccagcactgttsgacaattatcctgagtagaaktaggggagggactagaggatctgttttctgtgaatacaataggaaaggcagttttgaattatccaaatggcccctaaattctgggggaaaataaaataacaacaacagcagttttaaaaataactacaacctaggttctgacatcccaaaaaggaatatttcaactataattctcagcattttagaaattaatttcttgacaaatatcaataggtatcattcagactttgcaaatacagagttttgaaatcagaattttgcatctcatctctcccctaaaagaagtatggcaattgtgcttgctgaccatgaggcttgtgaactataatacatacttataggcacaaacacagaagcataccctctctcaggcatcactcaaatctaagaaaatttgttgtcttatgttttagcgagtaaccagctcataaatcacatcgaacagtttttggatactaatgaaacaccgtattttatgaagagcatagactgcatccgagccttccgggaagaagccattaaggtaatgctatcctagcatctcttttcttcctaaacagttggcractatcacagggaaagaggcatacagcatcctggaaatgagtctgggccgyggaaattatcattctcaatrtgaatagcagtgtatgccagtggagctaaaaatgacttaaattcatgttactatcactgtcatttctgagatgggataaagatgagtaggtagggtgttttatccctgaaagttggctttttattgtactgaagacctggcctttgctttctgttcctatttagggaaccaaggaaatttccattataacctctggtggcccactcactattgtaaaggatgggctattttagggaaatggatgggaaatatatattggtataattattgagaaagattttatgaagacaggagtagggatctaaatgtcagaaaaaaaagaacactgacaataagttcctcccatgccttttgtgtgggttttgtctgtttgattgttttattaggaattcttagaaaatatttctaaaacttttccaaattatgtataggcttttatatctctaggtaagaagtgagcaagtttaaattagaaagcatattttttaagtgggcacagttgtagtatatgttcttgtgtgggtgcttattaaatacttggcgaacgtatgaatgaattaatgcttaaataatttaggtgcttacaaagagtgacaagaaaatggaaaaatcattaaaattagattcaataacagattcagaagtagataacctgaatactcttagataaaagacaaattttagaaaagtagagtcaggacaagactgcagatgattcagttggatggagaaagatttggttcaatggaaagagatagtaaaagtgtattgcttttttaaagcactacccaggctaggtggagtgtcttataacacctctgtgcatggttgccacccagtgtccttaaaaatactaggtcacattatatctcttaaaaaaaataaaagagagacaagagaagcagaagagacttcagtgacatatcattcagtcttaatggagagattattattttttcttttccttttttttttttcttgagacggactttcactcttgtcgcccaggctggagtgcagtggcggatctcggctcactgcaacctctgcctcccaggctcaagcgattctcctgcctcagcctcccgagtagctggcattacaggcgcatgccaccacgcccrgctaatttttgtatttttagtaaagatggggtttcaccatgttggccaggctggtctcgaactcctgaccacaggttattcgcccaccttggcctcccagagtgctgggattacaggggtgagccactgcgcctggccaagggatattttttgaactgtaaaaagattaagttttatggaacaattaggaaaatgagaatactggctagttatttggttctattaagaagttactaattttttatgtggtgttaatggcatgtgagtgtttgttttaaaagactatattttctatatttcatacaagaatattcataaatgaaataatttgactgaaatttgcttcaatataattggagggttatgggagaagaaggtcatagtatagaggaagcaaaattggtttggttgataattatttctttattttattttttatctttgagaaggagttttactcttgtttcccaggctggagtgcagtggcatgatctcggctcactgcaacctccgcctcccgggttcaagcaattctcctgcctcagccttccaagtagctgggaatacatgcgcctgccaccgcatccagctaatttttgtatttttagtagagatggacccatgttggccaggctgatctcgaactcctgacctcaggtgatctgcccagctcagcctcccaaagtgctgggattacaggcatgagtcaacatgctcggcctgagttgataattattgaagctgggttatgagtgtgcgagcactcactaaattgttctctgtttttgtttgggattttctacattaaatgttaaaaacaaagggctaggccaccgcagaaaaactgactctgggaagctctgtgccttccacagatggaaggatttctggtccccagtgaacacacctcagtttggaatgccagcttcccatgtaccaaagaagaacattttatttttttgtaataaataaggtgattcagaccaaactttgtttggtctggggtgaatttgtttttgtgtttgctctgacttgctgcctcctctaccccaacttgctaccacagttttcagaagagcagcgctttaacaacttcctgaaagcccttcaagagaaagtggaaattaaacaattaaatcatttctgggaaattgttgtccagggtaagttgtcatttgccttttttttwaaaaagtatttttaaaatacttatgctattttattctaaatatacatataaattctaaatataaactgtattgtataatgagttatgtgggaaacatgatgactttctacatggctttgggaaatgctcagtgttcggtgaactcaaactctcccttaataagcataaatacagagtgataaataataaataaacatgtaagttccatcttagactctttacgcagcatgacctatttcatggctgtgcctttctgtttgttgaatggagcagctgtgtgggcgaacattgtcccctttctcagatccttaggccatttcagtcctgctggttccacagccctttggttgacctcacccagrttttatctccctgctacttttcatttaccatgttcttggactttccgtttcaacagaccagcatcttcatgtaccaaaaccattcagttcttcacttgcacagcaaccaatgcaagttaaacccagaaagaagacagcacacattctttcagtgttaggcttgatctttgctttttttcatgccctttgccccaccttttttaaaacatgacctgattttcttttagaacccaagtataagatattacttgtttaaaatacatattatgaaaatgattatgtttatgagataaacttttcacttatactagagatgcaaaatttgtttcaatctctttctgtgygaattctatataaaaagaattgcatacctatctatccgccttctaatgggcaactcttcatcacacaggtaactgttttcctgacagttaatttttcagccctttaacttctgcactggagaacaaaaggaattggaatgggtagtgaagggggcttactcaaatcacttttgtgtctctgctgttgaccccgtaaatgaaggagattggttttggtatttattgaatgcctatagcgtattatttgctgaaaagaaacttacaggtcatatgcaaaatccatattttctgatagcttatatgccactgagagaatacagatgaccaaggccattcataggtacacatgggtgttaaatacatgtgctttttgaacagtttatcaggtatcagccatttgatgtaggaaaataggaagaagagcaaactaaagagtagattttctacccttgatttgctcttactgagctaaaattgattaactgtcctaaatgatagacatgccccttggtgaagaccatgttttcttcctccctagtcctctggccactctatcaatagccagtaacatggccacaagacaaaatgcatggcgtagttccatattgggcaccggatgtcttggacaaaagcatacagtcatttaattatcatttatttattgagcttctgctatgttctacagtaagtcctctcttaacgtccataggttcttgaaaattgtgactttaagcaaaatgacacataatgaaaccatttttttctcatcagtgttataatgaaacaatattatttaagtacctacttttgtttcacttaaagtcacagtttccaacaacctattgatgatagttaagtaaggacatactgtacattgaggggaatataaagacttataagacttagtgtctgcccttgagaaaatatattcttaggagagagaacatgtgtacaaatagttacataaaatacgacaagagccatttcaaaggaataaacaaagtgatctgagatttctaaagaaggggagacttatctagagttgatcaaggaaggcttcatgraacacgtggcatttgacatgcggcctttattgcttattacacaggcaaaaactggagaaaagataatttaagatggtcattgttaattggttgcctttatagttttatattttttgtagaacagagcacctttatagttttaaaaatctccagctcaggctgggcacagtggcrcatgcttgtaatcccagcactttgggaggccgagacgggaggatcacttgagcccaggagtctgagaccagcctgggcaacatagtgggaccctgtctctatttaaaaaaaagaaatcttcagctcaaaggtgggaggaggtgtgatggaaacgaaaatgggattggggttgattctttgtgttttgattttactctctgaattactttttagatggaattactctgatcaccaaagaggaagcctctggaagttctgtcacagctgaggaagccaaaaaggtattgaggggtaaacctttgtctttagttgaattattatagtggactttattttcttgataccctcgaagaagttaaattttatgggtaactaaattartgtactcattttgtattcaatatgtaaattgcttcaaccacagcatccccatgggagaaattataatcttactcagtttcctgtaggctgtggttatatttctggaactcacctgtaatcccagcttcagtacccctagagcatgctgttgaacyccatagtgcgcaaacttagcctcggccctggtaaaggctatgaaatccacagtgattcccaccctggccacacattagttacttggtgagcttgtttttcttttttttcttttcttttcttttcttttcttttcttttcttttcttttctctttcttttctctctctctctgtttctttctttcttttttttttttgttaatactgattaaaaatcagaattaccctagagattctgttagtctgagatgggtcctgggcacagttggtttgtttgcattttaaaacccctcaggtgattgtattgtatagtgaatagagaaacactagtattctagcataagggacatccaagtattttcagtaaaagaccccatgcagtccccatgagcttcttattcacacacattgttaggcctaggcctccttgtttggtgtgtattgaatctgattcagccatgagtcagatacatgtggttatttagttcagtagtccttcattgtacctcaaggttgtgatgaaattttaatgaattaagttgaatagctcaaaagtatatacttcgtaacactcagtttcagttacagtcactgactgatgtagttctgctggcacctgacagctctcagttactaagcttctgcgatatgctaggcactgtgctggatgataagacagcacccctgccctctagaagctcgggcagttaaaatggagcagagggaagcaacggagactcagaaaataactatacacactaagggagagcttggtctggggctggtgaataggaatctgttagggaagtgacagatgcaaagctggaaatgttaatcagatggctaaattcaggccaaaatttaaatatcttcaattttcaactcaagaaaggcatttggcagaaaccatgtttggaaaagaaattaaaatttacaagaatttttattaagcactttgcctagcaaaagatttttgttaaaaaaaaaaaaaaaacttgtcatccctactttcagggagtagaatcctggaatttttgaagcatactgtaagatggtgattatatctcagaaggggttccgtggtgtctgtaccctctctgccacaggcaatactgagcaccataggcttgagtatgccatttaactgtttggttttgtttctgtttgtcactttatacaatgtttgataatatctcctcattgaactgggctatttcagtcaaggttctccagagaaacagaaccaagagaacgtacatgtgtgcgtgtgtctgtgtgtgtgtatgcacatacacacacacatatatatagagagagagatttattggctgaatttcagaaattggcttgtgtgattgtagggcttggcaagtctgaaatttgtaggacaggctagcaggctggaaactcaggcaggatttctgtgttacagtcctgaagcagaaacctcagcttttgctcttaaggtcttcacttgattggatgagatctacgaatattactaagattaatctttacttaaaatcaggtaattttagatgttaatcacatctacaaaataccctcacagcaacatctagagtagtgtttgatggaacaactggggaccatagcccagccaagttgacacataatattcattgtcacatggtgtgaagacctatcaatcaatttttgttaaacaagtaaatcaggaaaaatattttttgtcattattacattaagaaaatttattatccaggtgacagtacatactagagtttttggaagaagtgaggagccatgacctaaaaaagcttgtgtttcctgccagcagcacatcttaaccaaagatgttccagctaagttaacccagaatattagacaggaaagaaatctgaaaacagatgatgcacttgcaaattgtgcaaggcttgttctgtaatgcaaataggatgtcttctttgaaatgtaaaggcactgagcctaagcatgaggaattttaatgtctaatgatgaagctatagagagaaatttcagttaatgaccaggtaggtataagatggtgtccttagataattctgatatcagaactgatgttarttgtagtttaagacaactctcctgagacaggagaaccgcttgaacccgggaggcagaggttggggtgagccgagatcgcgccattgcactccagcctggacaacgaaagcgaaactctgtcccaggaaaaaaaaaaaaaaaaaaaagacaactctcaaaacttcaccatctttgaatagagagaacatcataaaaaacaagtggagagaatctcttctacttcagccacgggttgcctggctctgactggcatcttcttccttttagagcatagtgtttccatagtcaaggcacagagagtgtgcttccagtactaccagcaaaactgaacttcactgtcatggcagataagaagttaggaaattcaacataaaatgtattgagtaccaccagctctatgccaggcactttgatatatattatctcatagcctccaaaaaaagtacattgcacattcacctagcagactctttcacatctagaaaatgccatttcctttttttccccacatttatcagtgctttagccaatgtagtatgtataccagatatttagataacactttgactgctaaagaaccattcacattgtatggtgtttgtctacaacactatatacatcatatctagataatggtagaaaataagagtagtagaattttacttgtatccaactcccgaaccaaagagcccagtattatctctgtaatcttcacaatgatctgctaagaattggcaagagcaggaactaccatccctgttaccactgggaagccaatccccagaaaggtaaagtggggttacactttgagctcaccgaggtagcaagaggattaaaatgcacgttcctttgcaccacaccagaccttcgttttcaagtggattaagttttgtgaatggaatcttggaccaatcatttctaaaatacagtactccctgtctgcttcatctcaacaaatgactttctrgcctagagccaggtggtggttagaataacctggaaagtcatagagtagaccctgtaattttgactcaccttcagtgtacgctgtgttatatctgtcagttctcattagtatagtggtgagtacccccacctgtcactgtatcatgcctgactgtgagattatgcttttgtgtctgctttaatatcacatgaaccctttattttgttttccagagtgaaaacttgatcctttgtatgaaaaatgcttttwtttatttatttatttatttatttatttatttatttagagacagagtctccctctgttgcccaagctggagtgtagtggcacggtctcagctcactgcaacctctgcctcccaggttcaagcagttgtgcctcagcctcccgagtagctgggattacaagtgcgcaccaccccacccagctaatttttgtatttttagtagagatggggttttaccatgttggcaaggctgttctcaaactcctgacctcaagtggtccgcccaccttggcttcccaaagtgctgggattgcaggcgtgtaatcccagccatgcctggcctgaaaatgcttttaaatggcatctgttgatttttggagagaagtgtagaagggagagtgtacatgtaaatgataatggggagaattgcagaggaagattctggctcaaggaagctgatttcttttggttttaatagaagagacatgctttagctatttctcttagccaagtgagagaagtattatcacttttgaccatgcactgaaatattcatttatattgccttcaaatgttcaatttggtcacttcccaaataatcatttaaggaaacttgactataatcactgaggttaaagaacaatcctcacagtctatttaaattcttttgaggtgtttcccataagttatttaaagttagcaagctgtcaaattcttgctattaaatgttgacatttgaaaggaaataattatccagggatgttcattttaaatgaaaattataactttacatttgtataacatcttaagagctattaccctccagtttttctagaaatatgtggattgtatgattctttgagaaatagaaggaagtcagctctgctacagaaatagaaagtttttgcatggcgtgagtttagacagtcactttcttttaagtttcctggtacctctcatttcattttgaaacctaggcataaatcattctttaatgttcatttttattatcattataacctgtcagttcttccactttttctgtttctagtttatatgattagatatgccattagcatttgatgtttggtagaatctttgtatagcctttgtgtgctcttcatctrtcagttctcctggctctgtagtgggtggaagaggtaaagtgatgtgtctgagagctcacagtaagtcaccggccaggaatctagttctagcactgccctagtccttcattctcctttagtattgagaaagcagtgaagaaagaggatttatccccatggcattgggatyttttttttttttttttttttttttaccagattccaagaggctgagctatatctaaataatcatttgatgtaagctctgtgaaaaaaaaatcattattttagcacttatttttcttgtaactgcctaatttatccttctttattgttgttgacatttatggattttccaccttagtatcacagacattcatagatagcaattggccattttaccaattggtgttggccattttaccaacacccctgtctagagaggtaaagttttctgtgcctcacagcaagctagtggccagcagaattgactggaatccagrcccccagatgcccgctgtagtcgccttatcaccacaccatggcaccagctcttcaygccttcaccttataatgccgccaaccacatctacctagagaaaggatgctcatgctccctttttcaagagtacatctggttctgtgtgtgagagtgcacaggaattctccaaagcttagtgaaggattgaagacaaaggttaagaatcatttcttgagagcagttttgtcaaactgctggcccctgttggaacctgtgacatttttctttgcttttttctgctttcattttctgccttaattctctggtgtagtttgctagtacaagaaaagtaataatgaaaatatcacagtgttacccaatatttatttaaggcttgatacatttaagatatgatattaaattttttattgaggtagaacatgtgtacagtaaatgcacagatcttaactgtgcaacttgatgaattcttacacattcatgtacctgggtgctcaccacccagatcaaaataatagaacatttccatcaccacataagcctccctggtaccttcctagtcagaagcccccatcccttgaggtaaccactattctgacttctgtcacttgagagtcatctggcctgtttttgaccttcatataattggaatcatgcctttttttcatcaattatgtgattatagctatgtagtaatcccttttatgattttaccacaatttattcatccattctcctaatgatggacatttgcttgtttgtcctttggcagttatgaataaagatgctgtggatattcttgtacataccacttggtggacatatgttaagtgtattcctaggaattagaacatgaaacttacaataccataatgaattttttcatactttagtttatctgagactcaacaacccctaagataggtatggtaagtagtagtattcacattttgtttttgagcgaaattagttatgaaaaggtcaggtggcttgcgtaaggttcctgagaaactgacagggttatagttgtgttctccacactaggctgcaggatttccctcttgcaccatgttagtgtttatagcatccattaagctacaagtggcattaatgaaacccaaatatatgtcattttaggcaaagtacatgcaaactgacttttattctttttgatgcttttttacacatctagattgtcagtaatcctttggaatcacctgatggtgttggaaacaacccagtggaagtcatgtgtttttactttgggggtcagtaagggtctgagcacaagatgatagtcttttagtcttatggtggtataggactggcagtttctatatagargttattgatttcattactctgcttgtggccaggattatatttcagtgtacttgaaaagtagtaggttatccatttcataaagttctccaggtaaggaggcacttttatggtaaccccaggtaagtgatggtggtttgaggaagaaggaatatgtcactcacacacatgccctttctatctgttctctactttctcagcatattgcagagggaaagaacacatgagaaaagatgagaattgactcctacccctttctgcagaagagattcggagaatctcttgcttttattgagaaagcaggccagtcattgagttctctgctctatcttgcttccctgtcactgcatgggctagaattacttgcagttacaaacattaatgatgaggagtgatatgtggaagagatcagccttgcctggggcattgggaaggataatggatggcagcccarcttttaaacataatttgcttacacagaaatgtgaagcagatctgtcaggaaaatcagttgcagacratacttagcacttaatgaaaatgtaggatttttgttgctgctcatttcttcctaggaatttggcctagtctcagagatgtgccatttgtgcttaagtatatataccatggtcatactgtgccaacaataagtccttatctaaggggtcatacaagatgtagtggactacagaaccattaagcctatggagtttttcagatgtttggaagataccagtcatttgtggccctacagagatttatggcaggatgcagctctactgtttattctcttgccccaactggataagtcttatcctgtagccatatagtcctgatatcacgaaaatcatgcaggggttaatgacaatgagtaggagaggagaggtacaacataaaaagtatgataataacccggaaaaccccaaataaaaacccatttgagaatctaggatagagtagtttatttaacctttacagataaatcatatgctagtaaatgtatagattttttawtcatttatctgtatttgkctgtcagatatctttattcataatcacccagaataaacagaatgaatgaaacagaagcttcatcacaattctgttacagactgtctgcctccattgctgggatttcctctctcttataccattgattctcagtcttgcacatggcccagtttagggtcaacaaagagctatggaaagatccataaatgtccttaaaagaagataaattccttattcgctcagtcataaaagaagttaatgaatagtgaggtggtcttaactgagggaaaaaaagtccaagagagtggttgagtcaacaaacaattatgtccatggtgctgacaaaggcactgcaccttaaggcagacacagcctccactgttatcactttgttacctgtgtgtgtttttgtatatgaggactagaagaacaggcagagctttcttgcttcctgaaacttgccacatgcagcctcatatttcatggttgactttggtttgactttttaaagagacatattttagtttatttataggtcttaggtttcagaggtcatgattgtgtccattgtaccataaaagtaacaggaatgtagagaatggcagctcttaccattttttcatgttgagagtgaggaaagtataattatactttttcctcttgggtggaagcaactacaggagagcataagtgggctggaaggctctctcaccgcgtgcctgctccatgcactctcagcctgaagaatgccagaatgcctctaggggccagtcagttgtggtaccataactgattctctatttactgtttctggcccccaaaggaaaagtagaagtgccccactttccactgccctctctaaaacactcactcctacaggcaggcatgctaccagaaaatcaccttctcgtgttaggatagataggcattgctagatagatatgcattgctagaacccagctcttagaggcagctgccacatgccttgaaggaaaaggctccccactgctatcccttggagggacasgatggaaaaagagtgttcagataattttcaagggcactcacctcactacccttttaaaatctgagtgtcattcctagatcctcacagacttcacttcctggactttgctgtattactatgtatctgcctttcagaagctccagatctagaacagtgatgctgaatggttttctcatccatttctcatctgcctgttttcaaacaatttctaacacaaattgaaagatttccataaaaggaatcaaacaaccttccaagctcactcatttttgcatttcacgtttcttatgagaagtcccccttttactgcttttgtccacagtggaatttaagagtagattattctaagctttttttttttttttttttcctgattcttcatcattcaacttgagattattctaatcttgatttgattctcatgctcctttcaaaagagcatactagtttggggtggttggttattttcttaaccttagcaagccagcttatttcctatggaagcagaactggaaacagcagatgtccaccatgcttatacaggacactacacactgtctcgacaagccatgttctttcctccctcttcgtgagcactttctctggtgatgagttagtatggactacttgaacctcaaaactgggcctctcacccaaagccaaatgaagtagcgtatgccaggatgatgtttcttttgggccgttggcagtgagactgctaagcaggctgccttaggttttgctgtggcaatgctagcagattgttccctctttcaaaggggcaaaaatatcattttggtatgataactgactttctatttacagtttctggcccccaaagacaaaccaagtggagacacagcagctgtatttgaagaaggtggtgatgtggacgatttagtaagtacttttaatatgcacctggtgttctrtgattgaagtcacctgagctgtaaatacagccacaaaggctgattatcttacacttgttgcttatttgtgttttaatttccaatacaccagaagcttcctacaccattatatattgccattataaattcaatcagataggtaatttcataatagaaattcctgtgtttcatggtgtcggctatattgttcattcagattaatcctctcccttgaagggctgaaaaagagctagggaggctattccattagtagcaaaatgttgtaattcactgaaattgctgttaaccaaaaataagtaatacaacatgcagtttgtgtgggttgacaaatgaaacagcccttaaaagggctacttcttaaatgttctcaattaacttaatgtaaacaaaatagaccgataggcatttgaggatttctggaccccattacaccatgttgttgatgtctgggaagctgtgtagtaaatgtcttttgtatctatccttaatgtttggaaacttcccgcctttaagcttcatatgacaactgaccaacaaacactacgtactatgatgtcaatcttttttaragacattctcattactaaaatgagtggatacttgaatgtttaactcctaaaataatgagcggtgaataaatgagcaagtacrtgcatgccttccaatgtagagtcattttcattaaaccctctctcaccagagaagcagtggtatgaaatyggcckgattcctttctaagtgtgttgttcttgttcacagttggacatgatataggtcgtggatgtatggggaatctaagagagctgccatcgctgtgatgctgggagttctaacaaaacaagttggatgcggccattcaaggggagccaaaatctcaagaaattcccagcaggttacctgraggcggatcatctaattctctgtggaatgaatacacacatatatattacaagggataatttagaccccatacaagtttataaagagtcattgttawtttctggttggtgtattattttttctgtggtcttactgatctttgtatattacatacatgctttgaagtttctggaaagtagatcttttcttgacctagyatatcagtgacagttgcagcccttgtgatgtgattagtgtctcatgtggaaccatggcatggttattgatgagtttcttaaccctttccagagtcctcctttgcctgatcctccaacagctgtcacarcttgtgttgagcaagcagtagcatttgcttcctcccaacaagcagctgggttaggaaaaccatgggtaaggacggactcacttctctttttagttgaggccttctagttaccacattactctgcctctgtatataggtggttttctttaagtggggtgggaaggggagcacaatttcccttcatactccttwtaagcagtgagttatggtggtggtctcatgaagaaaagaccttttggcccaatctctgccatatcagtgaacctttagaaactmaaaaactgagaaatttactacagtagttagaattatatcacttcactgttctctacttgcaagcctcaaagagagaaagtttcgttatattaaaacacttaggtaacttttcgrtctttcccatttctacctaagtcagctttcatctttgtggatggtgtctcctttactaaataagaaaataacaaagcccttawtctctttttttcttgtcctcattcttgccttgagttccagttcctctttggtgtacagacttcttggtacccagtcacctctgtcttcagcaccctcataagtcgtsactaatacacagttttgtacatgtaacattaaaggcataaatgactcatctctctgtgaattgctgctaattattgtctgcaaaagacttcttcagtgctctgctgagaattgaacacccttatccattgattgaaaatggatctgcaagatagaacatcattcatttagctgaggagagaaaggagtgctttactttgggcttctaggacatcctctcaatactatacacacttgcatcaaacttgacatacaggtgctcatttaaagtaaccccaacagaggatgacatatagtttctggttagatagttaaagcccaggggttgtttgtgacttggacaaaactgagacattcttagaaccacagagagtggaaactttgatctctgaaatcttcattattctcatcagatcctcccagcaatatgaatcagctcagtaagtatggctccatcagcagcccctgtctttggcagtttggggaatttcttttgggaaacgtcagtctttttgtcatgccaggaaaagtttaaatcaagttagtcctttagatcttctgatactttttgacttagtttgaatgcagcaggattatttgtgcttctctaaccctgttttacctaaatctcaatacctcaaggaagaaattagtttcacaggctaaggagaggaagaactaaatgagtcatgtaatttccaaatccatttcatacaggtgaagtatatgtgctatgtagacttcatcagagcgtactgttttgagtagggacagcgtgttttgcatgaacacatcacagtcccatttccgtgaaatgagattggcagatctacagaactcccaggtgttctgccgagtgtagccctggaggacagcaagtgctgtattgtcgtcaatccaccatgggctgcttctcagaagcccagtaatcccacaaatgataggcttgtctgtgattgcaagtcactgactatggacccggtcacctttttcttctatgtcactgaaatttattgacttgaagaggagtcatcctctttgtgacccccccacccaagtcacaactcaaatgaccatacgcatttccaaatgcccccttgaaggtatgtgctgcccctcattaagtaccactattttaaatgttgggttttaatcctttgccagttaatttacatataagatttagaatcttggaaaactatttgaaaaatcgtgttgggattaggcagcatttttttttcccgccaagtccaggatggctttgaaaataaatggacacagatctctcctgttttgatgatgtgcagtgctaatgactggctttgcagttaattttgattcaggcaacagatgttccttttggttccctgtctcccatgggcgtcatttcatgttgtcctctgccttcccccagatattctaagttcaggacacaagcttctggcccatgcagagcagaggccatgaggggtcacagcatgggtacgggaggaaacactgggctaacccagatactggacttgagtcttgcctctgctgcttgctgcacagcttctgtcatggtgctaaacctgtgacctgcctcacaggcttagagcatgcccgtagaagtactctaaactaaaatgctttccacaaatgagatggtttcatgaaaacttcaaatagagggcctgggcagaacataacctttttttttttttgagacagagtttcactctgtcaccgaggctggagtacagtggctcaatcttggctcaccgcaacttccactgaccaggttcaagtgattctcctgcctcagcctcccgaatacctaggattacaggcatgcaccgctacccctggcttatttttgtgtttttagtagagacggggtttctccatgttggccaggctggactcgaactcctggccttaaatgatctccccrcctcggcctccccaagtgcttggattacaggcatgagccactgcgcccagccacaaaacaacttttaaataggtctgctgctgtttttttattttaaccttatttcttctaagaccttgagtattccagtgctgttttctttgtaatgatctattgttattggacttaggttttctcatctagttatacataaaaattaaagtctccatgtgatcaaaggtaagggtaggacccagggtaggttttcttactttttaacagggtgaccatgcattccagctatggaggatggattgttgtcttagcataattaatagtgctcttttttgttctcagaattgtcctggtatggattatagatatatggtcaccctaggttttgattatattaagttagtatcacaaccagggcccaaggaatgaccatatcctgccttgccactcacccctctcctattaactccctcctggagctaaatgcacaaggagcagacagcaaaatggaaatcaacatactgctttgtattagcttatttcagagatctttggaacagctaggttgtggctcatggcttaggtttgtcctctgcctcctacatccagatcttaccaccatctggcttccaagcctgagacagggaagaacgtctcattgggcctgcttggaaagagtaggcccttgggcgcagtggcttacgcctgtaatcccagcactttgggaggcagaggcaggcggatcactagaggtcaggagttcagaacagcctggccaacatggcgaaaccccatctctactaaaaatacaaaaaattagccgggtgtggtggtgggcgcctgtaatacccgctactcaggaacctgaggcaggagaatcacttgaccctgggaggcagaggttgcggtgagccgatatcacaccactgcactccagcctgggcgagagagcaagactccatctcaaaaaaaaaaaaaagtaggccctggtacttgtgcctggttgacagcatggagcaggaagtggaaatgcatatgatgtttaaacaaccttttaggggttttaatgacccctaataaatatagctcagtctccagccatttttctaagtcctccctatagcaggcaggggaatattaggagggtgatggggaaatgggacttcccccatcccacacttttaccccatataggtcagttcccctgatcagaagtagaattgctaatccctgcttagatagttggctttctgcagtcattttggaaaggaaagaaatgctcctttaaacataacccaggactagacttcctttcaagaggcataatggcataatgcttcaaatagccacctggatgttagatactattaggtttattaagtccaggtgtcaatagcatttaacagttatgtggccttcacaagtcccttaacctttgtaagcaacaaaataaatcacttgcattttatctgtgggcagggtggcccaggagaggacagaaacttctcagccaaagggaactcacaggagctgcttgaatatgcgaacgggtactgcttggagtgttgagaaagcagctccagacccaagccctatccacatcctcccattttacattgcccagggccacccacctttgcactgcagcttgtgtgggtaaggaccctggcagacctggaacgggagtcttagcatgggtaagtctctgaatttctctacgcccctccctgttaccttttcagtatgctgggaattataacagcttacagggttattgttaagattaatgagcacatactgctaacagcatatattaatggcttggtaaaataggatgaaaactaaaatttattttgcagcagaattccccttaggaacagatctagtttgttggataaatacgttgatgaactacttcagggattgcagtggcactgagataggagaggaaagcagaaggaagatggcaccctggggaaacttggtggtaggggaggtgttctggctggttactggctttggtgttgataaagattatctttaaataaggggagagttttagagatggaggtgggtaaagacaacagcgatggacagctgcaggggagggcagctttaggggcttggggaagcacaagtgtccataggcatcctagtcttaagttatcctgtggggttgagtgaattttcatctccccactgagtattcagtgcaacatccatttcactaatgtgcttggagttggtatttttaggggatgcatgtaagtgctgtgaatgtgaccggtttcaaggagggcaagggtgaaaacaggctgtccagagagagtctggtcatctctggattatcttcatgccttgctgtttaaacctgaaatcaatcaaatgtaggcgatagcaaactctgctcctccttaggttgaacttccatgcctccactgtggccaaaatcaagccttatataattccccattcagaaataagaacaaaaatgaactctgttcttgaaaataactgcagataacagcttggccaggaaagcacaaaaggtagcatgtgtgagacatttgtcattgctcagaattttaaaattgcattccaagctgttggatttgagtttaagtgaggccaaactggggcgagatcaaacacaccatcaaagaattacacacatatccttgtggccacatcgcttttgttgtttgtttcaaggatgctgtgtgtgttactagggttaagactcttctccttggctgagggatctcctctggagattttgaaaacaggaaacagatttctctctcccttctctggtagtcttcctattcgtgttagaaacagtcttgctcagaggcagagggtgaatccctggcagatcttgacaatcttatgtaatatgtgcatgacttttctctatctctgccatagtaagaatactaggctgaaaaataggttccctttcttagcagtttgtgttgacagaagttggcagatggtaggggtaaaagggagtcttagagcatttctgaagccagatggtataataccccagccccacctgggaatgtctgataggagctgggggaaaaaaaaaaaagcagaatctctcctgagtccttcctgtcatttctgcagctttagcaacaccaagaactatctttgtcaacactgaattcctgtggcttgtgtcctagaggagatgaatagaatagaatgtgctcacctcaagattagagtctaccttgtaccagaaaaagctgaggaatgagacccatgcaaagtaatatagaaacataacaatccactcctgatgttcttctgtggaaagaggggagaaataatcccaaagcattgtatcaagtgggcagaagtgagatgggcagagtctcttcctgccactgcctgagggagagatctccacttgcagagcatccgaagttgatgaacagcatggcactttgaagagccttcacttactgtggaaactcagagaaattgctttaccctcacagacttcagttttaccatatgtatggtaattggtatgtttgagatttaaaatcagttcatttaagtaacactcccaatggagtaagtcatgttaactttttaaaatcacaaatctgtaagtttggaaaaggagagaggaaactattacttcttaagagttatagcctgtcaggttatcttgcaagctgggaagcacagcctcctctagcagaagcccagagacaggcacttcaaaggaggaggggttggcttggagctttatgctgaaaaagttgtctaaatatgcatattcagtaggttacaggaagagctgtgaatgttcataaagttggtcctgatgaatgcatattaaacaagtatgttacatatgacccatgttcatctcacagagaagactcgacatttaaatattacaatcaggcccagtacatcaaaaggtttttcaggacaggaaggcactcaagtacgcaatctctgtaaacccactagaaccagtccatggtcggtgggcttcttaacaggagaaagttactgaaatcactctcttgtccagtcaaagctatagttatggctggtagagttcagttagtcagcatctggtagggctgcaagtgttttattagtg

SEQ ID NO: 93222 - DNA, 39149 bp, Homo sapiens
  misc_feature (1)...(39149): n = A,T,C or G
aaacttaagtcctgtttgaaacagctcatcttcctagatgtttaaaaatgcacaaaaatatgttaaaagggctaaagtaatacccttcttttttttttaaacattataggagtggttgcattttggggacagaattgttaaagttgatgtcttggagggtatgctgactgctcattgggtggtggtgggtgatggggaggaggaagtttgcagagagaagggttctatgcccatgagttagactacttcagatggcctaaccattgttctatatgcacattttagttattattgcgtgcattaaataataaaataagttataatgctcaaagtatgttaaagtagaggaagtaaaataatccctttataaatgtactcttgttcgtttttacaaacacctgtcttctgggagagacctttgtccctagacctcttggagctagacatagtcctgtacttagtccctggaatggtggaaggagaagagaaagggtggagggaagggctcttcggtaaatatctagaagatggttttaaattaaaatcataggtctacatgtgcatttttagtaaattagctgtgtttcttgaggacaaagttcattgttttgcaacatctaagctttatagatgtcccgaggtgacagtgtaagacaggagtattcaatcttttggcttcctgggccacactagaagaactgttttgggtcacacataaaatacactaacaatgatgacagctgaagagctagaggaaaaaaaaatcacaaaaaaactcataatgttttaacaaagtttatgattttttttgagatggagtcttactcaaaaatcaaaaacctgatgattttttcaaatgagcatttactccatattgtaaaatacagagaaatggagacatggtggttgaccctgagggggaaggagtgctgtcatttgctcctgagactgtcagagcaggtggacagcttaaaggacccgtggctcaggaccaaaacctgaaatgcagtattcatgaatccaagtaattaatagtagggttggaaatatgaggtgcgtgggtgaaaaagcccagggcaatggccagaaggggcaggtccacagaaaaggggggtggagggagactggggaggtagacagccaggacaaggaagataatcaggaggggcataggccatgtcttttccttccttcctcctccacataccacattacctcagtcctttaaagttcagatcaaatgtcacctcccccatgaaggcctccctgatttccacagctgacattgagcctttcctcctctgtgctcccctggctcactctctcctccatctgatctttgccacactctgcctcctcctattttaacttcccccccacccctcgccccctgacagcgtctcactctgttgcccaagctagagtgcagttgcacaatctcggctcactgcaacctctgcctcccaggctcaagcaatcctcccacctcagcctcccaagtagctgcaactacaggcgcacaccaccacacctggctaattcttgcatttttttttgtagagacagggtctcactatgttgcctagactggtctagaccggtcctggactcaagcaattttcctgcttcagcctcccaaagtgctgggattacaggcatgagccattgcacctggcccatattttaactcttttaaaagttaactggtgtacgtcctttgcactccagctgctttgaatggagatgtgatggatgaagctatggctactatcttggaccactgggagtcaaccatactttagggagggcggggcgaggatctggaaggacttgacttcctaaggactctgggtcagaaatgccaccccaaccctggactgcctatctccagatttttatgtgagaaagatatatatgttaagtcaattattcggggtctctgttaactgcagacaaccccaattttaactaaagcattgggaattatttctgactccttttctacctttctctgcatctaatcaccaaatccatctgattctacctccttgatatgccccagatctgtaaccttttctccatcactgttacctctacctgaactcaggcaatcagaatttcttgcctggattcctgtgtaaaccttccttctacctagtctccccactgtagggttgttccttccaatccacctttcatatcaggaactcaaattagcatatatacatatgtatatgtgtgtatatatatatatattgtatatgtgtatatgtatgtatatgtgtgtatatatatgtatatgtgtatatatatacacacacaaaaaaaaactatatgcacacacacacacatatacacacatacagaaaagtacagaatccaatgtgacaaatactcaaccccaaaatggtgacaattgttaatctgatctgtattttttctttttttctttttttttttttttttggagtcagagtcttgctctgtgcccaggctggagtgcagtggcacaatctaggctcactgcaacctctgcctcccaggtttaagcgattctcctacctcagcctcctgggtagctgggactataggcacgcgccaccacatctggctaatttttgtatttttagtagagacggggtttcaccatgttggccaggctggtctctaattcttgacctcaggtgatccgcccgctttggcctccaaagtgctgggattacaggcgcgagccaccgtgcctgcctcttatctataatttttatgaagctaatatgacaaagttgtctccttccctccacaagggcaaatacgctcatgccctcctaatcctgtattgaaccatatccttggcatattttttcaaacttttacatacatttatgaataaatgtatgttatggttttgtgtattttaaaaatattgtctaagtggcaccatattatatgtataattctatagcatgtttatgtttttgaggtctatccatggtgacatctattgagttcattcacgttagtagttctgtaatgctccatcatgagactgtagcagaacatccatctcttcctccatcgatgggcgactaggttgttccctgttttgcttttataaacaatgctttactgacagccttaaaaatgtgtgagaagatctctagggtttatacctggacatgtaattgttttgggaatagtagttgttatgtgttgaaatgtgcccccaaaaaagatacgtttaagttctaacctggggaacccattaatgtgatctatttgaaaatagggtctttacagatgtaatcaggcgaagatgaggcaattaagatgcaccctaccccaatatgattggtgtccttaaaagaagagaagagacagacagggagagaacactgtgtgacaccagaggcagagattagtgatgcctctaacagcatacgaatgcccaggagtgcagacaattgccagaagctaggagaagcatggaacagagtctctgagaccccataaggcacaaaccctgccaacaccttgatttttgattttgggcctccagaattgtgagtgaataaatttctgttgttttaaaccacccaattcatggggatttgttacagcagtctgagcaaactgatgtactggtatgtttgaaattcttgtttcttggtgctgtaaagaaatagcacttgaacataaatttaatttcctcagcaaggccatctttatactttcggcagaaagggtacactcgacagcagttttgccatgagagtacaccaaacaaaggagacagggtcacttataacctgatacatccaccttgctgctgtgtccggttttcattggctggaacaggtcctcacattttgtatttgttctgattggctagcaacttagaactttttaaaagaggcaaaggcagaggagagcaaaggaaggaggaagtaacttgtggaatgctgagaaaggtaaaaacaccttcaaataaggaagaggaacaggctatgacctaatgcttgcttggaccagtataagcatgccagggcaaatatttaggctaaatggtggcagctaggaacataaagtacattgatttctttattatggctagcagatatttaagaatgttagtacaggtctttgaatacattttgtttttaagagaagttactatttatttctaattagacagggaggaaagtctttaaagaagaatctctactttacttttcacaggtagaatcccaagtcatggcctataggcgcataggtcaaggtcatatgagagcataagggtctgagacagtaaattggagctgggccggaaggacctagaatgtggccctaagtaggggtttagactttaccattcaggcaacgtggagccacagaggagatattaaattgccaaggtacacagttctatctcggttttattttatttatgtatgtatttatttatttatttagagccagcgtctcactctgttacccaggctggagtgcagtagcgcaatcctggctcactgcactcttttttttttttttttttttgagtcggagtctggctctgttgcccaggctggagtgcagtggcgcgatcttggctcactgcaagctccgcctcccgggttcatgccattctcctgcctcagcctcccgagtagctgggactacaggcgcccgccactacgcccggctacttttttttttgtatttttttagtagagagagggttagccaggatggactcgatctcctgacctcgtgatccgcctgcctcggcctcccaaagtgctgggattacaggcgtgagccaccgcgcccggcctgcactcttgaattaatgggctcaagcaatcctccctcctcagccttctgagtagctggaacaggcacgcaacaccacatcctgctaatttttttttatttttttaagagatgggggtttcatcttgttacccaggctggtctcagactcttgttttcatgctatcctcctgcctcagtctaccaaagtgttgggtttacaggcataagccaacacaccgggcccctacctgggtttaagagacgagtatcagagaaatagactacacatgagaaagactcgtttgacttgtggatgtgtctgaaattcatttgctttttcctttaaaaccgattcatttccttcaaaaccgattcatttccttccacaaacagttatcaggatttgacatacacgagtttgtcattaatgaccataggttattttgtgcttactaaatcaggccctgttttagacataatctgctaatcttattaatcctcacaactgccccacaaaatacacatgcgaccctctccataaaagggataaggaagccaggtgcggtggctcatgcctgtaatcctagcagtcttgggaggctgagacgggcagatcacttgagatcaggagtttgagaccagactggtcaacatggtgaaacccccgtctctactaaaaatacaaaaattagccgggcgtggtggtggcacctgtaacccagctactcggggagctgaggcaggagaatcgcttgaacctgggaggcagaggttgtagtgagccgaaatcacgccactgcactccagcctgggtgacagagtgaaactccatctcaaaaaaaaaaaaaaaaaaaaagggtgggggataaggaaacattcaggaacgacgtgacatgacttgtgcttagggaaactattagggttgaaagtaaggccaccttgggtcctaatggctgtaaggcatcagacaaaatacgtcaactatgtcagcctacattttctcatctttcaaactgccataacagcagccacctcttcggccggccaggcctggcccagctggattaaatgaatgaagcgcagcaagggctgggcgtaggtaaactgtgcagtcatcctcttccacgacctccgctgagcccacgccgctccgcccgccggccgccagggatcgctgtgacgtggctcgggcccagcacgcggccgctctggcccagggaagtccctgtccttaccttcagcaggagccggttccctgtgtgtgtgtccgctcgccctctgctccgtcctgcggctgcccactgccctcctacggtccaccatgnccctgctgcactccggccgcgtcctccccgggatcgccgccgccttccacccgggcctcgccgccgcggcctctgccagagccaggtaagccaagggaaacggagatggagccagggcgatggccctgccccgccgagctgcgagcaccccaggacattcacccctcccggcccccaaatacacactgtcactcacacgcacacacacacttttctgccaccccctcggctttcccttactggggactgaggattgagcgtccgtgccccacagtgatcctcaggatcccacatccctctggtccccgcactgggccctgcaggaaggcgtgcaacgcaatccctagggaaaggaagtgtggccctcggcggttgccggactcccattcagtgggaggggtgcggatagtactrgggcagcggcgccgggtaacgaccgtgcccttgatagggtgccctgggggcggcgggcgcacctgtcctggcccccggcccgcccgagtcggtgggccggcggcggctggctgccgcgtgtgtgccctgggcgggaagagcgcgagaggaaggtttccggggcgccggcattcgggcctcgctttccttcccgcacctgcgaccttggcgtgcggcattctcctgaccttgcgaccccccgaggtccctgtgaccccggggcccgtttggcctttgcttgggaaagggtcgaggtgtagtgtgtctctttttttgttttgttttgttttttccttattgcccctaaggaggtccggttgcagggaggctatcaatcttcctctccatctccctgtgctctttcattcagtaaatatttcgtaactgcagtttctcagagccaggctctggaccagatgccaacgatacaactgtgaacaaggcgagggaaggacaatgacaaatggtcattgctcaaaaaatgacaaacgtaatttcgtactgtggcgtgtataatagtatggagggaaatttcagagcttgaaacgagctctagtaattcattcccagtggagaccggagccagaagattaattcaactcaagaagccgatttggagcactctccttaagcactaccttaataaggaactgagttttaaaaccacccccaagcaggtattaactgcaaggagcaaagcgtagcttggcctttcgtttgaatgtatgctctgtgtctttcagccagcagaactatctgtcctttccaaggccccacagccttggcagtacagttttgcccaggcttcgcacttttttctcttcctgacttggctccttcctggcccactgtcaacgtgtgctctttaagtctgcctacctagtgggccagagccaggaggagttatttatgcaacaaatttggaaaaccaaaggagtgcttaaaatttccgtcaagagaaagtatgtttccctattgcagtaatcttaaaataataccttgttttatggatttggctagatcacctgaagctctagtgcttggtgaaaatcccttggggtcagggttagtcattctttcagtttgagagtctgactcatttttcttttctgtatttttcttactagaatgtaagttccatgagagcggagactttacctactttatattcactgttacatctcagcactattaacagttgctggcatgtctcttatattggatatttttattttaagccctgatttttcacgtaatgcaacggaaacaaatacagtatgacattttaatgttgtatcttagatcaaaatctgaacataggctggtccaagtgtaatggtgtttacaactaattgatcataaccagttacagattttattgttcctkctctcgactaatcttacacaggggaaccacagtgctgcaaaatatgtaccaaaaaaaattccctttttttttttctttaaatacagggtctcactgtgtwgcccaggctggagtgcagtggcacaatcatggctcactgcagcctgaccttccaggctcaagtggtcctcctgcttcagcctcccaagtagctgggactgcaggcatacaccaccacacccagctaattttttattttttgtagagacagagtctccctgtgttggtctcagactcctcccacatcagccccgcaaagcgctgggattataggctaagcaaccccacctgaccagaaaataaattcttgaaatagttgagcacctaatgttgaggaattactcttcagatttaaataatgatacctgattaggtgacagaatcagatgccatatttggcatgaaggttaactcttcaggcaagatcagacttccctccttacactgtggaagtgatctttacctagctccaaatggtaaaagtggaaaatacttaaactgaattcatcgacatttctatttaaatggctcattctaatacaataaaaccttgtctgttgttattctgaagaactgaggatttatccaatggcatacttggaactctttgtaaatatgtggaactctttgtaagttcaagtgtatcatttagctaaacactgcgaataaaactttctcttgttgacttgtactgtaaatgtatagtgacatgagatcagacatagttgcagttcaatgaagaaaaaaaaagatgctaatgtattttgatttataatgatttgcttttaattatttaattctgattatttactttttggtgaaataactgagcaggtctcgtgagactttaaaaatgcagtgtgcaactgtggtaccataaccattggttaaaagatcacagaccaggcacagtagctcacacctgtaattctagcactttgggaggctgaggcaggtggattgcttgagctcgggagttctagaccagctgggcaacatggcaagaccccgtctctacataaaatacaaaaattagccgggcatggtgatgtgcacctggagtcccagctacttgggaggctgaggtgggagggtcgctcgagcctgatcgcttgagaggtgaagagttgcagtgagcccgctgatcacgccgctgcactccagcctgagcaacaaagcaagactgtgtctcaaaaaaaaaagatcacagctgtgctattgtctctgccatttttagctctgtgattgtgggcaagctaattaacttcccttctgattttaaagtaagaagaatgtgaggaaaagcagtttaaaaactgtaaaactttaagtaggcttaagctccagggaaattacaatgcgtttcgattggaaaggcttacctgaatacttggtacctaacctctcttggatgaccagtcaatattgctcaatgtttgaggctttgtgcctgtatccaaaatgtactgatagaaatcactttctaggtcacaggttatcagcatgagttttgcccctagaacactcctattttcatctactcgattcctttaaaaacatcagagttcttacaatatgtgtgtagtctttaccattttaagaaatggaataatgaaaggcatggaggagttgaaagatggttactaatgtggggctaatcraattgagtattccctctaggccaggtgccgtggctcacacctgtaatctcagcactttgggatgctaaggtaggaggatcacttgagctcaagagttggagaccaacctgggcaatatggcacaaccccatctctacaaaaaactagccaggcacggtggcacacacccatagtcccagctactcggggaggatcacttgagcccgggaggtagaggctgcagtgagccgtggtcacgccactgcattctagcctgggtgacagagtgagaccctgtctcaaaaaaaaaaaattgtatccctctaggaggggaacaacagacactggagcctacctgagggtagagaatgggaagagggagagaatcagaaaaaataactgtcaggtactatgcttattacccagatgatgaaattatctgtacaccaaacccccaggacatgcacatgtacccgtgaacctgaaataaaagttaaaaaaacctcccatgcctctgcccttcagatgctagtagcacctgctttcccccagagtttcaacaaacagaaatgtctccataaattgtcagtgttccctagctaggcaaccccttcctctctctctggctaagaataactttccttgtgatctggattataaacttgtctcaagcaatagatacatrgttttcatacctgtgttctttaatctgtacttcattttcaatctcaaaactagcattgtaattgtaaaatgaacataatttattacatttttwwaaaaaaaattgagtatccctgctcctatatttagattgtttaaaaattcagtattttgaaattgtgtttagaattcttaaaagacagaggctggagggctggggctgagggagggtggtgggcctgcrgggacattcttactgtgcaaacatagcgataaaaacatgtcattttccaaagcaaaaacaaaaacaaaaaaaaaagaattcttaaaaggtataccagaagacacaagtctatggtttctgagtttctatgcttaacattttaaagaacttgaaaaataagtgcttttcacaccatttaacaagaatgatgctttctctccttgtggtagggagcaatgggcagtggctttgttatgattgagggtcttggaggatacagaccattgttttttctttttctttttctttttttttttttttcttcctgagacagggtctctatgtagcccaggcttgtctcaaacactaggcttaagtgaccctcccacctcagcctcctgagtagctgggactacaggcaagagccactatgcccagccagaccatcttttgaaaaatgaaaacttttccagaagtgttctcttttataatctagtatgtccttgacattcagggtattcctttcactcggcagttaatgacagtgatgtagataggtggctgcatgttttcagggtctgaattgtggataagtaataatgaaagctttcttcaggcccagttcagaagttggtttaaggtatctgtgcttcttactattgcctaggtactaggaacagccaagcaacctagagccacagcaacacaaaatgagaggcaagctattaaaagaactggcaccaacactagtgagggggaagggtgataatggcagtgtctcctgattctctagaaaaaactatgcagtagtaattgaaaagcagaaaagggccgggtgcggtagctcacgcctgtaatcccagcactttgggaggctgaggcgggcagatcacttgaggtcaggggttcaagaccagcctggccaacatggcaaaaccccatctctactaaaaataaaaataaaaaaattagccgggcgtggtggcgggtgcctataatcccagctacttgggaggctgaggcaggagaatcgcttgaacccgtgaagtggagcttgcagtgagctgagatcgtgccactacagttcagcctgggcaacccagtgagactctgtctcaaaaaaaagaaaagcagaaaaggttggttggaggkttgtgggttattgttaaactgattaacattgtctccccccacagccatgcttgatttgctttgtatttaaagagaaagaaaarcagaaaggacctgcatttggtcacaaggtcttacggctgcatatgctccttgaattctctacatactggcctcaccaggctctgtactaggatgcaggatggttacaaataaaagtggagtgataataatttagtaacgatgactattagcgaacatcaggcactctgccaatytaggttttgagtgtttttttcatcattagaccagccctgtgagataggtagttttatggccccattttacagataaggaaagttgatgcttgatttacttgccagtgctcacacagctggcaggtggctgagctattatttgaatccgtacagtttgcccagtactgaaattacccaaggcaaactattaaaagaaacattacaagaaataagagcctgggaaatccaaaaaactggaaataatctgccctttaataacagagaattgactgtacacactaattaattacaacgattgagactgcagcagtctttaacttgtcaagggagcatgaattaaactctgtactgccatcaagtgtgccccatggaggagtgaggtgtatgagtgctgactagccacaagtacrttaagagaactttgttgggaaagaaatgttcatgaggtaattcacgagtttatcagcatggtgaacacggagaacttccatggtaccatactgaaacatgtggctgattcacagtggatgagtgattactaggagaacttgagcgattctcctgcaacaacccccagctccttctcaccgtgagcctttattcttaattctcttcttggaaagcccttttactcctcctttcagccttagcactcagctgctaagtcacgtcctctgggaagccttcctaaccttgtgcagtactttccttcccttctccaagctattasgtcctctgctcagggctcccataagtaatatcccataataatgccctgggtaggtgtgtatcactatccatcatctccctgcagtgcccagcctgcattacgtgcagatctctgctgatcaccacagtgkactagtcaggtggtaagggattgtgttgtactcttctttacattcccagcccttagcataatgttcttaatgattgctttagaagatcataaagcctagaaaagtgttctggcaaggcagagaatctctacactctaaactgattgcacagttttttctttttttaaaaaaaaaaaaaaccttttatattgtaggtgaagtcattaatgactaaaccaaggaaactaggccatcaagattgggcaaactttgttaaaatgttaacttgtgtgcgcctgtagtcccagctacttgaaaggctgaggtgggaggatggcttgagtctaggaggtcaaggctgcacttcagcctgggggacggagtgagacccatctctttgtttgtttgtttattgagacggagtcttgctctattgcccaggcaggagtgcagtggtgcattctcggctcactgcaacctccgcctcctgggttcaagcgattctcatgcctcagcctcccaagtagctaggattaaaggcgcacgccaccttgcctagataatttttgtatttttagtagagacagagtttcaccgtgttggtcagactggtctcaaactcctgacctcaggtgatccgcctacttcggcttcccaaagtgctgggattgcaggcgtgagccactgcacccggccgagatccatctctttaaaaaagaaaaaaaaagttaactcagcttcttttcagattcacttactataaatcaaaacaaaattcacagccgggtgcagtggctcacgcctgtaatcctagcattttgggargccaaggtgggtggatcacttgaggtcaggaggtagagacctgaccaacagggtgaaaccttgtctctactaaaaatacaaaaattagccaggcggggtggcacacatctgtaatcccagctatttgggaggctaaggcagaagaatcgcttgaacccagagacaggtkgcagtgagccacgatcgtgccactgcactccagcctgggtgacagagcaagactccgtctcaaaaataaataaataaataaataaataaataaataaataaagcaggccgggggcggctcacgcctgtaatctcagcactttggggggccgaggtgggtggatcatgaggtcaggagttcaagaccagcctggccaacacggcgaaaccccgtctctactaaaaatacaaaaattagctgcgcatggtggcaggagtttgtaatcccagctacttgggaggctgaggcaggagaatcgcttgaacccgggaggcggatgttgcagtgagccgagatcgcaccattgcattccagcctgggcgacaagaacaagactccgtctcaaaaaaataaaaaataaacaaaattcactaagttttgtcctcatatgctctttcatatttaaaacaaactggtcttttaggatggtagttctccctgggaacatgttctgtgttagttatgttagcatgcaatgtgtttccatcattgctattgtcaaatgaatcaawaagtataacaagctgctcagtttttctaatacagtaagtattaatagttataccccacataaataaaagctctttggggttttcagtaagttttaagagtataacaggatctaaagatcacaaagtttgagaattgctgctttagaccaatactactctttttccttaaaaacacacagttgtatttatttgtcactgttgatcctagtgtggtctcaacactcattgcttatcttttaaccaaagtagcttctatttcccagagaaaattaagaagagagggtggtgatgtcagtcctacacaagcattctaaacagactggcaaaactcgtgaacacacgcagtacaacttctacagccacatgtatcccttttatacctccttaaagtggcaacaaagaaagacctttttattttaatgactcaaagctatagcctctcgagcatgtaaaaataaacaaaggtatataaattttaaattatgcttggtaatcaatgtgtctgtagtctatcttagaaattatttaggtatacaatgaataataatctgttaatcaattcattgtaatattagaccaaaagtgtaagttaccctaaagatcttagaaattgtcttcaaggccaggcgcagtggctcacgcctgtaatcccagcactttgggaagctgaggcgggcaaatcacatgaggtcaggagttcaagaccagcctggccaacgtggtaaaaccccatctctactaaaaacacaaaaattagctgggtgtagtggcggacacttgtaatcccagctacttgggaggctgaggcaggagaatcacttgaacccaggaggcggagtttgcagtgagccaagatcacgccactacactccagcctgggtgacagagtgagattccatcccccagctccaaaaaaaaaaaaaagaaagaaagaaattgtcaagctggcatattacaaaatacaattactgttctcccaaaagcttatccccagtctaataagaaaaacatcagacaaattccagtagaggggcatcctacaagatacctgaccagcattcccaaaattgtcacagcgaagaggagcttatggagacatgcaactaagcataatgtggtgtcctagatggaatcgtggaacagaaataggtaaaagctaaggaaatctaaataatgtgtggacctaataatgtatggaccaggcatggtggctcatgcctgtaatcccagcactttgggaggccaaggcgagcagatcacctgaggtcaggagtttgagaccagcctggccaacatggcgaaaccccgtctctaccaaaaatacaaaaattagctgggtatggtggcggtcatctgtaatcccagctactccagaggctgaggtgggacaatcgcttgaacatgggaggcagaggttgcagtgagctgagatcacgtcattgcactccagcctgagtgacaaagagggaaactgtctcaaaaataataataataatgtatcagtatggattcattaattgtaacaagtgtgccataccaatgtaaaatgttaataggggaaacctgggggtaagggtatatgggactgtactatytgctcaattttctgtaaatcaatactgttttggctcacggaggctgaggcagaattgtttgaaccctggaggcagagactgcagtaagccaagattgcaccactgtacttcagcctgggtgacagagcgagactctgtctcaaaaaaaaaaaaaaagtttgtcagaatagcaattcaattttatttaacacaaatttgtatttttcataattttaaatatataagagtaatatggccgggtgcggtggatcacttgaggtctggagtttaaaaccagcctggccaacatggtgaaaccccatctccactaaaaatacaaaaattagctgacgtggtaatgcatgcctgtaatcccagctacttgggaggctggagtgggagaatcacttgagcccaggaggcaaacgctgcagtgagccaagatagcaccactgcactccagcctgggcaacagagcaagagtctatctcataaataaataagtaaaatggatcttggatctagctaatgggattgagctaatgtgtttctcatttcagctcctggtggacccatgtggaaatgggacctccagatcccattctgggagtcactgaagcctttaagagggacaccaatagcaaaaagatgaatctgggagttggtgcctaccgggatgataayggaaagccttacgtkctgcctagcgtccgcaaggtgagcttgctgttcatctccttttgaatggkatgaataaactgaagagagccctggagagtggcaggaatagtgctggacygggaatcaggagccctgggctttagttctggcactaatggcatgaatcacccgggttttctgggctgtagtctccttgactgtaaaggtgagaggttggaaccacctgttttttcccaagattgaactttctatggttctgtgatcatctataaaacagacattaaataygctttagaaatgcttagctatgcctactttaatcctgaaggtgcataagaggaccaagactttaagygctgtctcttgktgagaggaatagctcttcgtggattactatttttattttccatttctctaactgtgattactttaatcaaacctttgtacacaggcatgctctgtcctttcttcctgctgagctatgcaattttcacctctttcttttgttatatttttattagtagcatctttatttgttaactaaataatataacaaatccccttagaataattttttaagttattcagcaagtatttgctactgcaacctgcatcactaccaagcactattgtacattccctcattcacacttcacctcaacactgtgagaggtagaaatagttcctccatttaacagaggaggaaactgaggctcaggaaggctaaataacttgcctagggtaacacaacttgtaagggacagccaggcttccaatgccaaagcacgaagatgtgtggctattactgttaacacttcgaagttcttagactggcatatagcttgacatgctttctcttttgtatttagtttgatttaatcatcttatatctattttaggtgttgctcttaaaccttggtcttgtgcattccaagaatctcattttatgttaaattgtaaccaagagagactatacccatccacataaaacctaacttaaacaataaaatacaatttgaaaaagaaagtatttctgttctgcaatacaaactatcaagcattctacctacccttcttctcagagagtaacttcaaattttaaaaaaaggtttggccgggcgcagtggctcatgcctgtaatcccagcactttaggaggccgaggcaggtggatcacctgaggtcaggagttcgagaccagcctggccaacatagtgaaaccccgtatctactaaaaatacaaaattagctgggcgtggtggtgcacgcctgtaatcccagctactcgggaggctgaagcaagacaatcacttgaacccgggaggtggaggttgcagtgagccgagatcacactactgcactccagcctgggtgacagagcaaaactccatctcaaaaaaaaaagactttacctccaaaacktaacttataaaactttaaacattaatcatagtaattccaagtaaggagaagaaattcaatggatgtattttctcttgtctaggcagaggcccagattgccgcaaaaaatttggacaaggaatacctgcccattgggggactggctgaattttgcaaggcatctgcagaactagccctgggtgagaacagcgaagtcttgaagagtggccgggtaagctgagcaggctctggcatcatcccaggtctgttttaacaaatttgtaattatttaaacaattttaggccaggcgcgatggctcacgcctgtaatcccaccactttgggaggccaaggcgggyggttcatctgaggtcgggagttcgagaccagcctgattaacatggagaaaccccatctctactaaaaatacaaaattarccgggcatggtgacacatgcctgtaatcccagctactcaggaggcttaggcaggagaatcacttgaacctggaaggcagaggttgtggtgagccaagatcatgccattgaactccagcctgggcaacaacagcagaactccatctcaaaaaaaaaaaaaaatttaagaaatatgaaaagataactcattttgtgtgtaatgattgttttgaggaggccacactatttctaataattcttatttgatagtaaattgccatcattaaataaaataatttacatgacaccaattccaaaaatgtactagtagtaatcctgaaaatgcggtagtcatttgactgatagatttgatgttacttttgctgttagtctctacctgcttatgttcattttacatcaaatatgctttagaaatgttaactatgccgagttttaagcctgcagttagcccacaccctcatgtcctaagcttccaacttgcacagaagcagcaagcaggaaacaagccatgggtggactgtgggggctggaccagtctggcagccctctgctgtcccttcacagcccacatggacacagaaagaagaccacgctcccaacatgtgaactcgtgcacattgtggttcactttcttttgaaaaaaacatgttttttagtgagtgcatttgtacrtttttctgggtaagcctggggagtgaagaaacatacaaactagcaaaattaagtcaacattttttctgcccttccccctctgaaaagccagaataaatacactttatttacaagactggtctaagtccacacatgaattcgttaactcagagtaaagcacacaacctcaaccccagggttatgtagtaattatcctacgtcaaatagaatttggtttagttctgtccatacagtcaactgcctgttagcccctcctggaaatttctgtactttttaattcatgtgctyttttgcctagtctctgctccatctaaataacaacctaagtatgaaactggcctaccttaaaataacatcagcttgtcttttataagttgttgtgcctcagccgggcgcagtggctcactcctgtaatcccagcactttccgggaccaaggcgggtggatcacctgaggtcaggagttcgagaccagcctgaccaatatggtgagacccgcccccccgtctctactaaaaatacaaaaattagccaggtgtggtggtgcacgcctgtagtctcagctactggggaggctgacatgggaggaatcctggaacccagaaggtggaggttgcagtgagccaagtttatgccattgcattctagcctgggtgacagagcacgaacctatctcaaaaaaaaaaaaaaaaaattgttgtgcctttgtgaatcgtagtatcatcggacctacagtgaggtttttatttccatcatgccaaagcttgcaggacaaactatttaaaataattttttagttgggtttttccctctttaatctactaccaccccagtccagaaaaatacatttgtgctttgtagagccttgtacttctacaacacctttaaaaacaacaaacaaaaacctcttaaacctatggtaatttcttgtttgtcccttaaagttgaccaatttgaataaggagattcaccttaggcatcttcctattacccaaaacatgaatattttcagattatgaaaacacatagaaggggacctcttagaaaacctttatttatttatttatttagagatggaatttcgctcttgttgcccaggctggagtgcaatagcacgatctcagctcaacgcaacctccgcctcctgggttcaagcaattctcccgcctcagccttcctgagtagctgggattacaggcatgcgccaacacacctggctaattttgtatttttagttgagacagggtttttccatgttggtcaggctgatctcgaactcctgacctcaggtgatacgtccacctcggcctcccaaagtgctgggattacaggcataagccactgcgcccggccagaaaacctttaaaatgttgtaatgttatccttgtatacttgttgacttgcttttcaaggaactttgatgtttagagagtcattctactttgtataattctaaagtaatgttttaatgtagtgactgttctcagtgtctttttattttatttatttattttttttgagacagagtctcactcttttgcccatgctagaatgcaatggcacagtctcggctcactgcatcctccacttcgcaggttcaagcaattctcatgcctcagcctttccagtagctgggattacaggcatgcgccaccatgcccagctaatttttgttttagtagagacagggtctcgccatgttggccaggctggtctcgaactcctgacctcaggtgatccacccgccttggcctcctaaagttctgggattacaggcatgagccaccgcacccagcctctcagtgtctttttatatcttttatataattcacccctttttcatattgaggaggaatttttgtgttctgaaagtttcccgtgtaacatgaaatgatactgacaggccataaagaatgagcttctgaagtatgaaaggtcctggacaaagcagtggccctgggtctgggcctgtatagagagtgttgcacatcactgaccgtgggtatctctccttcagtttgtcactgtgcagaccatttctggaactggagccttaaggatcggagccagttttctggtgagtctggaagcttcttcaggaaagaattataaattccagatgacagggcttcctgttgtgtgtgtatttgactgttgatgcagaagtagatttcttctttccgtgaagtttgcagatgtcctattctcatgaaaaaatgaaaggactttgaagaaattacaggaaagatatattagtgatgatgataaattcagttcactaggaacttactatttactagggagcttttgcattttaacttgtttaatccctatgagagaggtacaattaaccccctttacaagtgaagaaagcaagacccagaaaggtccttggctacatggccagtataactgtcagagactattccaacccaggcagtcttactgctgagtcaatactgcttctcaaccatagagagaaactgggtttcagcagagaaaaatgttctctcaataaaacacatcaacatttttttgcctctcctttgttcatttttctgtttcctttcgtcccatcttttagcaaagattttttaagttcagccgagatgtctttctgcccaaaccaacctggggaaaccacacacccatcttcagggatgctggcatgcagctacaaggttatcggtattatgaccccaagacttgcngttttgacttcacaggcgctgtggaggatatttcagtaagtgtggctttcagggtgagagaggtgaataaaactccttgcttgcggacatttgatgtctcccaccatgtcccaatatctgagttaaaatactggggaagagctgattcccagggttctggttacctttgttacttatcaaatgatgacgatcctgtggcatttcagataaaccatttcctttaaagctgcaaagtcgtctcttggctgtttttctctttagaaaataccagagcagagtgttcttcttctgcatgcctgcgcccacaatcccacgggagtggacccgcgtccggaacagtggaaggaaatagcaacagtggtgaaggtgaggacgatgaactcactggcgacagttctgtgtttagtaaccagctttggaggcttaatttggcaatgtctcaacagagagtcttaacctcgaacctgcgtgaaatgtccacacaggtggataagctgccagaaaagggctccccatttgcgtgattagcagttctgggattgatgacgcatgagtatttgaaagtaattttttttggctgggcgcggtggctcacgcctgtaatcccagcactttgggaggtcgaggcaggtggatcacctgaggtcagttcgagaccagcctggccaacatggtgaaaccccgtctctactaaaactacaaaattagctgggcgtagtggcccatgcctgtaatcctagctacttgggaggctgaggcaggagaatcacttgaacccaggaggtggagattgtggtgagccgagattgtgccactgcactccagcctgggcaacaagagcaaaactctgtctctaaaaaagaaaaaaagaaaataatttttttcctcatcctggatgtagggaactctgataaaacctgtccactggccccaggatgtctgctgttgatgcctatattcgccctggtcagtggttgcttattgatctttttaaacactttttcatgtcctctcctttgcagcattgccatgatcactctcaaagtgtagccagctgtcagagaagacactagtcaaaattcctagggaggaaaatgttattcctgttgtctcatgtccctgttttcccttttcactccttttcatttccctttcttttctctctctctctttttttttcttttgagacagagtctcactctgtcgccttaagccagaacgcagtggcacagtcacagctcacagcagcctctacctccagggctcaaacaatcctcctacctcagcccctgagtagctgggactacagacatgtgtgccacacctgcctggctaattcttcctatttttcacagagacagcatctcactttgttgcccaggctgatctcaaactcctgggctcaagtgatcctcccaccttggcctcccaaagtgctgggattatagacatgggccaccatgcctggccagtttccctttctttaacttctgtcaaatctaagctgcaaacagaatgagacagaaacagcatttggagagcactttcaagataaaatggttctaatgatgttgtctcgtgagtcctgggtataagwtgagtcttccaggattacgttagccycagaaaaggcttattgtgcttattgggaccatgcccacctcacataaacatctttcagacttttataaacatctggggcctcttcagaaagactgctaaagcttcgatctttcgttccttctcagaaaaggaatctctttgcgttctttgacatggcctaccaaggctttgccagtggtgatggtgataaggatgcctgggctgtgcgccacttcatcgaacagggcattaatgtttgtctctgccaatcatatgccaagaacatgggcttatatggtaagctacagcatccagcatgacacatgctctcatgctgggagagaatgccacgagggcatagagcttgtgggtgtgtgtgtgtgtgtgtgtgtgtgkgtccatccatgtccatgtccctccctaccctaagatgaaagaccagtatcgtagattttactgattttcttagccatatattcttcggtgtccttaagtttttccagcaaaggaaactgattactgcttctctaaacaaaaagtaacaaatccgtgagccaagaagatagatacaataaaaaatacctttgaatactctgagtactcaaaacttccttgtgcctcagttcaccactctggttgttgaaagctttttatttataataaagttattttggggtcctttggatggaaacagataatacgtrgcaaatacactcatgatttgctttagcacattagatagtagaagtagaagacgagatccatttttgtctttcaggtgagcgtgtaggagccttcactatggtctgcaaagatgcggatgaagccaaaagggtagagtcacagttgaagatcttgatccgtcccatgtattccaaccctcccctcaatggggcccggattgctgctgccattctgaacaccccagatttgcgaaaacaatggtaaaggtttatgccactccccagccacctacctgttcccaccactgctccttcaaagttagtttttaattgacctctagtgatatacagtaccccatagattccatatgtggaaggcagggaaggaagcaaaaaatgtgcattccttttttaaaaaattaaggccgggcacagtggctcacgcctgtaatcgcagcactttgggaggccgaggcaggtggatcacctgaggtcgggagttcgagaccagcctgaccaacatggagaaaccccgtctctactgaaaatacaaaattagccggatgtggtggtgcatgcctgtaatcccagctactcgggaggatgaggcaggagaattacttgaacctgggaggcgaaggctgcagtgagccgagattgcgccattgcactccagcctgggcaacaagagcaaaactccgtctcaatctatatatatagatagatagatagattggttgagacagggtcttgctctgtcacccagtctggagtgcagtgttgcaatcctaactcactgtaactttgtactcctggcctcaagcagtcctccagcctcagcctcccgagtatttgttagcactttgaaccaagttaattgrtatttctctgtaagaggcagtcataatttttaaatggtagttccttttattccgtcatctccgtgttaagtagaacctgctttcccctaaaatcagtttcaaattaagtaccttacataggaaaacttccttaaaaacatcatatttttgtttgtgtcctaataattgctagcattgaatccgtatttttgcatatgtttgtattttattgtagagacagggtcttgctgtcttgcccaggctggtctcctcaaactcctgggctcaaatgatcctcccaccacagactccctaagtgctgggattgcaggtgtgagccactgcactcagcttgttttttattatctgtactatctgactctcaacatctgttctctgaattagtgttactaaatttttttgaccacaatccacataagaaatatatttaagtctgggcacagtggctcacacctgtaatcccaacactttgggaggctgaggtggaaagatcgtttgagacaagcctgggcaacatactgaaaccccatctataaaattttaaaaatatatattttacatcatgaccttgaacatattatatacttatatgtgtatataactgaaactgtcttccagactcaatactaaaggcttcatgtgctttactcgagttttttgttttgttttgttttttgtttttttttaaacagtcttgctgtgtcacccaggctagagtgcagtggcacaatcactgcaacctccacctcctaggctctagcaattctcgtgcctcagcctcccgagtagctgggatcacaggtgtgcacaacgagacccagctaatttttttttttttttttgagacggagtctcgctctgtcgcccaggctggagtgcagtggcgggatctcggctcactgcaagctccgcctcccgggttcacgccattctcctgcctcagcctcccaagtasctgggactacaggcgcccgccactacgcccggctaattttttgtatttttagtagagacggggtttcgccatgttggccaggctgttctcaaactcctggcatcaagtgaaccacctgcctcggcctcccaaagtgctaggattacaggcgtgagccaccaagcccagcctccactccaatattttctaaatgccaactgcatcttactaagttgaatttaacatactaagccaggtaaggtggctcacacctataatcccagcatgcattttgggaggccaaggcaggtggatcccttgaacccaggagttggagaccagsctgggcaacatagcaagactgtgtctctattaaaataaaagaaaataaaaaaataaaaaataaaaaaattaacctaccaatgggtcatgacacataatttagaaaacactgctgtagaaaggggttggcaaactgttctgagagtcaatccagtttgccccctattcttgtaaataaagttttattggaacacagctgtacccatttgtttatgaattttgtatagctacttctttgctgccatggccgagtgagcagttgtagaaggcagagaccatatggcctataaagcctaaaataattactgtttggccatttacagaaagaatgccaacccctactctatgagttcataaaaccaygatgcctgtggaaggtgtgatttgttatatgagtttatcgtatatttgttatatgagctgcttagttgagaggtcacatctctgagcagctcttgggtagaaaagctaaatctgctatctctaagaaacttgatatgtacctcccctagtcatcatgtgacaactattttttctgtctctctgtcccatgaagattaaagtaaatactaagagtctggttcaggatagttttttttgttttttgttttgttttgttttgttttttccttttgattttttataaagacaaggtctcactgtgttgtccaggccagtctcaaactcctgggctcaagtcatcctcccacctcagccttccaaagtgctgggattacagctgtgagccaccgcacccagctcagggtagttctttatggtataataggttcatgctagacctaccaaaaatttgagtactttttaagttatatttttttgcagcatgatattaacatgtaagtatatttcagaaagtttgtgaaagggaaaaaattaaccataactctagctattctaactcagctttttttttcccttacccattgtttgtttgttttttctttatttgttttttgtttgtgtgtgtggtttttttgttttttgtgtttttgtttttgagacagagttttgctcttgttgcccaggctggagtgcaatggcacaatcttggctcactgcaacctctgcttcctgggttcaagtgattcttctgcytcagcctcccaagtagctgggattacaggcatgtgctaccacgcccagctaattttgtatttttagtagagacggggtttctccatgttggtcaggctggtctcgaactcccgaccttagcacttcggcctcccaaagtactgggattacaggcgtgaaccactgcgcccagccacccattgttatctgtagttgtgacatactgttatatatgtatgtgcaggactggttttggttttgtcacttagaattatactaagcttttttacttaatattttcaatgtttttaaaaatattttcrtattctctggttatgaagattttttttaatgcatgcatttcaatacacaatttgagagtctgtagtagacaaagatgccagactgtgttaatgactaccctcagggtggttataatctgatgagaaagatacacacatgactttcttgttcttgttgttgttgttgttgttgttgttgttcttgttgttgttttgagagaatcttgctctgtggcccaggccggagtgcagtggcacaatctcagctcactgcaacctccgcctcctgggttcaagcgattctcctgcctcaggctcccctgagctgggatcacaggcacccaccaccatgactggctaatttctgtayttttagtagagactgggtttcaccacattggccaggctggtctcaaactcctgacctcaatggatccatccacctcagcctcccaaagtgctaggattatagacgtgagccaccgcgcctggccacacatgatatttaatataagacagaatggaataaatgatgactaaagggagagctgttgattctagtggggagttagagaagatgtaatgaggactgcggcatgtgagctgtgcrttaaagaggggaaagggcttttttttttgcaaaggaaatgaaacggacaaggaaactggggagagatctgagtgagggcataggcgtgggacgtgcattatgcagaacttgtgtagaaagccccaagttgttttcgtgatgaaaacacgaatgtgaggaggactgtgggagrcagccaagctgagaaggtggagcagatcgtgaagcaccctggttgatactgtaagaagtcaacacttgattctccaggcaacaaggaggatggaggggtttggctaagatggctccacatctagccctgttcatgcactcaatatctttgggatccaggcctcaaagtgaatgaagctggacgatggaaactgtaggaaatttaaaatcagatgccataactggaggggccaggggctcctcagctccagccagtaattattttgctaatacagtgctatcgtttctcatttttcaagagaaactacaggtttcagcttttaggcacaagtgcccaatttaaaaacgtttcactgggtgaagtaaaacattactaggtcccatatttggtctttaattggcagtttgtgatctctcttctaaccgtgcrtaacatcattatacagagatggtttaggaaagtgaacacctaagaacagggagataaactgtaaatgggaatgtcrttggtgagagccaagaatgtcccagagccatgggaatggagtggaaagggtagattctgaggaaggggaaggttgtattcagaatcaggtgatccccgtgcacagtcagaggactaccttctccagtccctcagacagaatttactctccttggggcttttagcatagcagtgtcctatgtgttttacattttgtggccgtattccatacttggtttacaggtttggttacaagcaccccttgcaagcttttgaaggcaaggactatgtctcagtcctcaccacctaaaatagcttggctcattgtagattcatagtacattgtctcaattgtgaagatgggaatgtatatttcatccatgtcaaaaataaggtcattttttttttttgtttaacccacagcttttaccttaatcttagtaggttttagagtgattcattcacttttctttttttttttttttttttttgagacagagtcttgctctctcacccaggctggagtgcagtggcgccatctccgctcactgcaagctctgccttctgggttcacaccattcttctgcctcagcctccccagcagctgagactacaggcacccgctgccacgcccggctaatttttttgtatttttagtagagacggggtttcaccgtgttagccaggatggtctcgatctcctgacctcgtgatccgcccgcctgggcctcccaaagtgctgggattacaggcgtgagccaccgtgccccgcccacttttcttaatacagatgcaattatgatggggttacatcccaataagcctgtcataagtcagaaatgcatttaaggccaggcttatgtctgtaatcctagcattttgggaggccaaggtgggagaatcacttgagcccaggagttccagaccagcctgggcaaaatggggagaccctgtctctacaaaaaaaaaaaaaaaagaaaagaaaattagcaaggcatggtggaatgcacttgtggtcccagctacttgggaggctgaggcaggaggatcacttgagcctggaagattgaggctgcagtgagccatgatcataccattgtactatccagcctgggtgatagactgagactgggtgatggactgtatctgaaaaaaagaaaaagaaaaagaaaatgggccaggcgtggtggctcacacctgtaatcccrgcactctgggaggcctaggcaggaggattgcttgaaccttggagtttgtaaccaaaccgcgcaacatggcaaaaccccatctctacattaaaagaaaattcatttaatacacttaacctaccaaacatcatagcttaccctagcatactttaaacatgctcagaacaggtattaaactacagttaagcaaaatcatctaacacaaagccattttataacagagtgctgaatgtctcatgtaatttattcaatactgtactgaaagaaacaaaatggctgtatgggtacttaaagtacggtttctattgaatgtatattgcatttgtgccatcatgaagttgaaaarttgtaagtcaaggactgtctctactcaagtgtgttaactgcttcagttgccttatggaaatagtgttccaatataaaacagaatgctataaaatagctttcttccctggccagtgacagcgtgtcactcattcgtgacctgagaattgaggcacactaggggactgctcaagggaggtaaaaatgcagtgaactccagcatatcggtcagtgcttaggcagaatgagctgcatctcagggtttctttacaggctgcaagaagtgaaagkcatggctgaccgcatcattggcatgcggaytcaactggtctccaacctcaagaaggagggttccacccacaattggcaacacatcaccgaccaaattggcatgttctgtttcacagggctaaagcctgaacaggtgagtgattctgatttctctgcagcagaccagctgatcagtctttgcaaacccgaaggattacttttttttcttttttcttttttatttaatgttttcgggttttttgttttgttttgttttgttttgtttttgtttttgtttttgttttgagacagtctcgctctgaaacccaggctggagtgcagtggtgcaatctcagctcactgcaacctccacctcccagggcttaagtgatcctcctgcctcagcctcccgagcagctgggactagaagtgagtgccaccacacctggctaatttttgtattttttgtggagacatagtttcgccatgttgcccgggcttgtcttgaactcctggactcaagcgatccgcctgccttggtctcccaaactactgggattacaggtgtgagccactgagcccagccccagaaggattcttcatagatcacccacctgttcaaaattaccctaaaaacagttaaaacagttattttggagcccttttaggtaaaagtattgtaatactttttagcatttattttgcttttttttttttagttgtttacctctctgtatcccccatgaactcacaaacttctaaagagcagagcttgttttgatcatgttcataatcactgttgcttctcccaagagagcaacaggagaaatagctgtttcataattgaatcctggctctgctgaatctaaaggtgtctttttccccatctgtttatgcatcagaattcatcatcctactttaaagtagctttttttttttctttttttgagatggagtctcactgtgtcgcccaggctggagtgcattggygcaatctcggctcactgcagcctctgcctcccaggttccaggttccaggttccagctattctcctgccttagcctcctgaatagctgggattacaagtgtgagccaccgccccagccttaaagtagctttttattcttattttattccaagctaacagcaaattctgggaacaggttttaagcgaggaaatagagcgttggtaagttggctactgtgccatgtcaggccggggagaatcccctgtaccgggaagaggtacccaagttctttcctctctgcaggtggagcggctgatcaaggagttctccatctacatgacaaaagatggccgcatctctgtggcaggggtcacctccagcaacgtgggctaccttgcccatgccattcaccaggtcaccaagtaatgtccctggtgcgaggaaacagagacaacctttctgtcttcagcctctgctattgagagcttcacacagacaatgagagagggtggatggtggtgagtggatcatttctttcagccacagtgtgtaacactcagcatttgaatgtttctcagaaaagaacatgtagtgacacagggcagaggcatccatggctggcgtctggaatattaaaccaaactctccycggtccttttttctccaacttttctcaaagagtttacatgtgcaagaaagtcatcgcaccaaaaaacctgtcaattatgccattgcaatatttcagaagctttaactgaagtgtcaggttcctcgtgagaaacagcacacgttagaggctttgagagaaggcctagttctgtcatgagtagtcggcctcgtgtctgtcctcccatcttggaacaaccttatcaacaggccgcactgcagaaatgatgttttatgaaaaccaatgaggctgctgccactccagmaagggaaataatgcagtttcctgtcttatttaagaraaagagaaggctctcttttctcccttgtcattgccgttcttttccttacacgcaaagattttttaactattgcagattttcatcccattctactgcttgattgaccatcaactccatcctatcgagatttatttaagaatgaagaacataattttctgctgatgcygtaccctcacccttttcagcaaagaatagtggagagtaggaaactgtactttatctcggcatcctcttgaatgatagtgcaagtttctccagttgggatgttgtctctgcccggttggacctcctccctttgttgaatgtggtgtgcagcctctcatctcacactgtgagtccagcggcgcagggtggtaccaggaaagaggatattctaggctttgcgtgctgctagctgggttcaggcttcacccactggaaagaaccaccatctgctctaaccatgtagacttattgcggcctggtttctctgttacaataaaattactgtagacccaactactgtctactaagttatcttttttctttaatgggaggaaggggtaggagtgggtaaataaataaaggggtaggagtttggaatcgtgtagctgatcataagccagtagatgtatccactattccaaatattggctgaagattcgtcgttttcttcatgttgccattcagtttgtccagtccgaagatgctgagaatgtgggtgtaatcccttggaccttgtggggaacaagtggagtcccatgaaggatcctgtggatataggcaaagggtagaaggggtggaggagaagtgacaacttcagtggtctataggagccaagaaggtaacgtaaataaaaaagtgttgtgaactggatttaagttgatcagtggtgatcaaccctcatcctcagcattgaggagcagtagtgaagtgacaggagctgtgaggatgaacgcccaaggtggtaggtcttacatttttcaagaaaaatggaaatcttgatttctatggttgatctgttggtgcttaaaagttggcaactggttcaatttttaaaaaattatttgggccaggcatggtggctcacgcctgtaatcccagcactctgggaggctgaggtgggcagatcacctgaggtcaggagtttgagaccagcctgaccaacatggagaaaccctgtctctactaaaaatataaaattagctgggcgtggtggcgcatgcctgtaatcccagttactcaggaggctgaggcaggagaatcgcttgaacccaggaggcggaggttgcagtgagccgagatcgcgccattgcactccagcctgggcaacaagagcgaaactccgtctcaaaaaaaaaaaaaaaaaaggaaaaaaaatgatttggaagcagggtgcagatggtagactgcaagtctgtgtcctctgatgtaggtcacatgcccctgtcagcagacatccagcactggcacctgtgtggcatcagtcctgcttacggtattttgtccctttcattcagtgcaaggagcctttcattgtgggagagtgaccagccagataagcaatggagcaggagccaggcccagggaccctccacagtgtccccatggttgctgggatgggcaagcaggctcaacttgttctttcccccttgccttctcctgagggacacactgcatggcaggtcaggggtcgctctgactctttgcttctctgtgttcctgttactagtggacattccaaggtggtgaaaggatatgtgaaaggactggttcactggatgtctttatctgaaaaggggaaacaatagacatattagtccgctgctctgcaaaggtactgactgcctaagttaggagaaactgaagttctccctgtctggagcaaaaatggttgaaagttggttgccaagacctcaactaattgtgaaaggaacttaacccccaccccctggtctcactctgtcgcccaggctggcgtgcagtggtgcgatctcggctcactgcaacctccacctcccgggttgaagcaattatcctgcttcaccctcccaagtagctgggactacaggcgtgtgccaccacgcccagctaattttttgtatctttagtaaagacggggttccaccatgttggccaggatggtcttgatctcctgacctcgtaatccgcccacctcagcctcctgaagtgctgggattacaggcatgagccactgcacccrgcctgaccttgttatttttaaacatgggtactaccaccttacactggactaagtcccattcatcatgtggtgtctgcagcttgatggttttctgagaaggtcagaacattggcccacagccttttcctagctccctagtctggtctaaaatgttaacattctccaatctgatagtagtttgcctgctcagagagaatagtcataccttggtttcattataattcaaggtagaatagttcccaaatctagatcatttatttaaagtactggttctctggcctcacctcttaggcattctgattcagcatgtctaagagaaagcttgacaatctatttttttaaattaaaaaaaaaactgcagttgattcaaatatagctcacccatagatcagccatggggaactatcagcctgaactgtttcaggtatacatctaaacaaccaaagtccaacttactcagccaacttgagagtttattctaagccttttttctgaattttttttttcatagaaattactggggttttttttgttttgttttgtttttgtttttgttttttttttatgagaccaggtcttgctatgttgcccaggctggtctcaaactcctgcactcaaacgatccacccaccttggcctcccaaagtgctgagattacaggtgtgagccaccgcacccggcctattggtttatttatacctaatgataactgaaagaccaattgtttctttttcaagatatcttataaaaatgttgaaaacagtagtttttattgataacagtagggtatgctcattttagaaaattttaaattcctcaaatgcctaccatgtggagataacagttgtttgtattgaattatcttcccttggtttttctgtgcaaatatttacgtggtagagattgtactactaatataattttggctgggcgcagtgacttgggcctgtacccaactacccaagaggctgaggtgggaggatcacttgagccccggagtttgaggctgcagtgaactatgatctaaatggaaagaatgaactttgaccccctacttaacaacatatacaaaagtttattcaagatgcatcacagacttaaatgtggaaagtgaaacaataaagcttctaggaaaaaaagtaggcgcaggcaccatggctcatgcctgtaatcctagctctttgggaggctgaggcaggagggttgcttaagcccaggtgttcaagaccagactgggcaacatagtgagactctgtctctaaaaaaaagaaaacagggctggatgcctgtaaaaaaggctcatgcctgtaaccgcaacactttgggaagccgaggtgggcggatcacctgagggtcaggagttcgagaccagcctggccaatgtggtaaaaccccgtctctacgaaaaaaaaataaaaattagccgggccatggtggcatgtgcctgtaatcccaactactcaggagtctgaggcaggaggatcacttgaacccaggagatgaaggttgcagtgagctgagatcgccatcattgaactccagcctggtcaacaagagtgaaactccgtcttaaaaaaaagggggagctgggcgcggtggctcactcctgtaatcccagcactttgggtggccgaggcaggtggatcacgaggtcaggagttcaagaccagcctgaccaacatggtgaaaccccatctctactaaaaatacaaaaattagccgggtgtggtggcacacgtctgcaatcccagctactcaggaggctgaggcaggagaattgcttgacttgaatccgggaggcggaggttgcagtgagccaagattgtgcccctgcactccagcstaggcgacagagtgagactccatctcaaaaaaaaaaaaaaaaaatcttcaaaactttaggcaaatgtttcttaaacaagacataaaaagcactgaccataattagacttcatcaaaatcaaggatttttgttccacaaaggaaaccaataaagtgaaaaagcagtcttcagatggagaatatattgacagcacatataaataacaccaaaatccaagccaggagtggtggctcacacctgtaattctagcactttaggaggcttaggcaggtggatctcttgagcccaggagtttgagaccagcctgggcaacatggcaaatccccatctctactgaaaatacaaaattagtcggaagtgatggtgcatacctgtagtcccagctcctcagaaggctgaggtaggaggatcgcttgagcccaaggaagtcgaggctgcagtgagccatgattgtgccactgcactccatcctgggcgacagagtgaggccctgtcttaaaaaaataaaactagaatccagatatatccagaactattccaaatcaataagacaatccagtttttaaaatgagcaagagacttgaacaggcaagtcacaaaagaggatatacaaatttgaatttatgcatattcaaagcatatgaaaaagtgttcagtatcattcatcagggaaacacaaaacctctattagacgcacccacctaaatggctaaaattaagacaaacaccaccaagactggtgaagatgtgtaactagaactctcactttgccagtggagtaaatactgttggaatttactaaagctacacataggctgtcttagtccttttgtgtcgctattaaccctttcccatttagaaaaaaaaaaaaacgcagcttgctgccagcgctcatttgaattttacataaacacactctttgaggctgaaccaaatctgattgattttcaatgtgaaaacataaaaaactgttcttggagttatttctaaaaagaactaacatcagaatcatcagaattgtctatttttgaaaaatcagattcatcaaatgaatctttggccaacaactgtttgagaatgatgttaacatcatgcataggaatgctacattttctaggatttgacattttcaatgataggcaattactgtagtaaatgaaaataccactgctaaaaacacaatgctataaatagaacgatgtcttttgtttccaaagctgatatactagaacaatacaaaaataataaaagcgagatatttcgtggcaaatttatctcagggtaaatgctgcagccacaagcgttgccagtgagtattctcggagcaaagacgacaagggtaatttataaaaagagctttatttggcttatggttttacaagctgtacaagaagcatgacaccagcatctgctctggtgaggacctccggcctctatcactcttggcaaaggcaaaggggagctggtgtaggcagacatcacttggtgagacaggaagcaagagaggggaagagaggtaccaggctcctctaaacagtcagctgtgaaggaaacttctgccaactaatagagtgagaattcattaccatgaggacagcaccaagccattcaagaggaatccacctccatcacccagacacttcccattaggctccacctgcaacattggggatcaaatttcaaaatgaaatttggaggagtcacatatcaaaaccatagcatattcctatcctatgacccagcaattccattcttaggtatacactcagagaaatttgtatatgtcaacccaaagacatgaacaagaacatacacaatacctattcttaattgctgtatagtctgttttcacactgctataaagaaatacctgagactggctgggcgcggtggctcacgcctgtaatcccagcactttgggaggctgaggcgggcggatcatgaggccaagagatcaagaccatcctggccaacatggtgaaaccccatctctactaaaaatagaaaaattagccaggcatggttgcacatgcctgtaatcccagctactcaggaggctgaggcaggagaatcgcttgaacctgggaggcggaggttgcagtgagccaagatcacgccactgcactccagcctgggcaacagagcgagactctgtctcaagaaaaaaaagaaaaagaaaaagaaatacctgagactgggtaatttataaaggaaagaggtttaattgactcactgttccacatgactggaaggcctcaggaaacttaacaatcgtggcataagttgaaagggaagtagggaccttcttcacatggtggcaggagagagaagtgcaagcaggggaaatgccagacgcttataaaaccatcagatctcatgagaactcactcactctcacgagaacagcatggggaaaaccacccccatgatccagtcacctccctccctcga

SEQ ID NO: 93223 - DNA, 99614 bp, Homo sapiens
cccatgctgtagaggctccccacccaccagtcactcagtagccatttcagttatcagattggctgttccagtatcgcagtgctcgtgttcaagtcaccattattttacttcatactggccccaaagcacaagagtagtgatactggcaattctgatacactaaagagaagcagaaaagtgttttctttaagtgaaatggtaaaagttctccacttaataagtaaagaggaaaaatcatatactgaggttgctgagatctacggtgagaaaaaaacttctatgcatgaaattgtgaacaaggaaaaaagaaattagtgttagttttgctgttgctcctcagactacaagagttacagccatagtgtgtggtggatgagtgcttagttaagatggaaaaggcataaagtttgcggaagatgtgaacagaaacgtgttccagctgatggcaatcgagtttggtactatctgcagttttggtactatccgcagtgtgtcccctgagaatcagggaggacttactctacactgctagagccagcttctccaggatatgcttgaaactgcctgtttagcatcagaatatctttaacaaaaaacaagcaaacaaccaaaaaataataccactaccatgtaataccagacaatattggaaataggaacttttaaataagtatttccttgaatttcttggagttacacaatagcatatctgaaagttcttcccccaggcagttcagtgttggtgtgttgaatctggtcccaccaaatttgttaatttattacaaaaaggactgctttataatttttttgaacactgatgacattgatcacctgagcaaacacatagactgcctctacaatattgagatgactaaatgaaccagcctgcaagcagcagacagaagtgaacaaggtctgaaggtaatgttcacgatgtcagatttcattccaggatcatcattgattcatttatgtaatctgaggcccagctgcagccaggatttggacatggctttggagcgtggagttgcatagtgggtaaatgacaggttccagaagggaaggccttgactgccatgtgatcttgggcaaatcacttgaccttaaaaagctcatttgttaaagggaaaaacagtacttagctcaaagaattgtgaggattaagtaaaatactgcacgtaaaaatcttggcccagtactaacttgatgttagtgctggacaaatcttagctactgtcgctggtactgttatgtggattacctcttttctccttctgcccaggagcggtgcttcagggacagtatccactggggttgtgtagtgggccagctctctccatggccccccagagtcaggggtgaccatccctgcctaccgtgcatgttaattctgagcagtgattaaaatgccatacctgcttttcagtccgaggactttcaaaccagtcccaccaagcatcacagccccatccccatgactgtaggttttacactctgtatgtagctcctttccaaggagagccccttggccccagtggaaggaccaggaataacatatttccgaatctagaaggcaagttttacttggttcccaattcactcatctgaatctgggaagagtgtaattctaggactacaccaggaactctccattcagagaatcataaaattataaaagtgggaagggtgggtctcacaagcttttgccaacctagctgtggaggaggcggagaccctgagcattaagtgacttgcccaagctctcagcagaagctggcatcagattactattagataagattactatttcctcattcaattttctcccaccctttccatgccatctacctttcccaactttcatcattgattcaagtataaatacattaccctgccagggaattctatccctcagtggtccagggaacaggagtttccacagatgctggtgcacgtgcactgctttgagacgcccaactctccttgctcagtctcactcacccaccctcaccattccttccctgtgccccagagaactcttccattgggtggaaacaacagcttaaaaacctctcctagcccacaggagcctctagtaggagtggagagggtcaggagcaaagggaaagcaaacttggctcctccaggatagccgaagactgaaatacaactgaccctggtggacttgtttctcaaaatctcaaccactcagtgaaggaagtcacctgcttgctcctccaggctttctctccctgtagaccatcaagcagggatgggaggctcttcttgccaaatcaccctcacctacacttccagatagatgtgttttcatgggttaagcactgacaatctttgtaaccatcctgtaaaatgcttctttaaaactattcctctgaggggtaatatgttctcagacatccttgatattttcatcaatacaactgactctctccccagcaagaagaatgaagaacagcaggagctctgcatcccacctttctcccaatgacaacattgtgtcccctgattcttgtttactgcccacggagggcctggagtgtctgggtaaggaggaggctgtgtaggacaaagaaaatgaaggtgagtgtgtgctgagaacaagcttcccccactgagccggtttgtccaggctcagccacctgccctgcaagctagtgtgcgggaatgatggccagaaaggggcaaagccccttctgttctgtgagctaacatttatccctaaaactacccccctctctcttttattgctgtcagttaatctcaatgagccatttcctcccacytcggtgacattctacaagtccccttttctgataaaagtttgagttaattaaatgtgggaagtttgttttgtgttgtgttacagggcatttcacgacgtaaactgtgtaagataaaagaaacctttgaaatcattaatctggacaatttcagaaaggatggcacagctgcactgacatccaatcttattttcctaaggtggtgcttacttgtacagcttgtagaaatttcattatgtttataattacccctttcacccttacacaaaagtcccttgacaataattgcataacctccttgggtttcttgttcctggcttgacagccaaatctayggaactttaaattattgatgctttctaatttttaattattttgaggtttgtgtaagctgaagctttaggagatttggcaataataatacctcacattccactattgaaaatgccatctctgaggtcacatgtggccaccttgtctcgaaacatgaagaaggtatcttcccagtgtctgtcagtggaccctgcaagtgacaaaagactcaaatcagcttaagccaaaagtgggaagtctaggggaggggcctttaggcatggtgggattcaggaactcagtgtcatgagaacccagcctctctccgtctctccttcctgttcttggtgttggctctgttcacagaagggctatttctctgtgttgtctagaaggctcccagaagccccttgtttacactccctagaattcaagtccaagaggaaagaacaagcctcttgtctgctcaacctaaaaataagaagtcttgggatctgcactcacttcttgggcatgagaagtttggagcatgtgcccatccctgtatcatcactgtggtttgaggattccctgccttgattggaagagtctaggtgagagctcagttgcagagctagaggtcccattgttacaggcaggtctttgttcttagtgctctcaagatggtggtgagccgctcccaagatggcggcaagccttttgttctctgacctggggttcttggcctcatggattccatggaatggaaccttgggtcatgcagtgagtgttattgttctattagaaaacgtgggtcaaggaagagaaccacggaacccagcgactagtgttcagttagattaggacaaacccgggcacttagccatgcaggaacaatggcgagcctctagcctgaactggagcggcaatgggcgcctcgctggatcaggagcgcagcggactccctgctggattcagaggggtggaagtcagcggcgggtctgtgacggcagcaaacagcagtggtggatggtgagcaaaagctcagctcaagccgtaacaaacacagaccagaagagtgtgcagctgcaaaatttaatagagtgaaaacagagctcccatacaatgggagaggacccaaagggggttgccgctccctgctggaatgcttgggtttatatcctgatcattgtccctcctcctgtgctctcaggtgatatatgatttgactatttctttacctcctgcttttaacctaatttgtattttagtgagccctctttactacctgactggtagggtgtgagctgagatgcaagccccatgtttaaaggtaggtgtagtcaccttccccagctaggcttaggaattcttagtcagcctaggaaatccagctagtcctgtctctcaccatcagtttctccaaaacaagtgttctgagacttcaggcagaggatttcccaccaaagaaatgccagtgactgttaccagaataaggacaagaatatatgcctggtcagcagatgtccaccccacctccccatgacccttcataacccttttgcaagattccatcctgttgcccttcttaaaattctgcattcctgccttccatcacacagacctgtggtctcccttctctctgaccactctgtctcttcttcctcctcctcccctataagcaaagggatggtccaggattcagtgtaagcctatccctcatagcttaaccacagggagtgcattccttcatcctctctgtgcctttacacgctctgttcactctacctggagcactatgtcctcttcccaccactcacctctgcgtgttcacattctctgtatcctagttcaaatacctcttcacaaatcttccatatctgatgtctttaagccagaaataaactcactctttcctctaaattcttatctttatcccttctcaaagatagaatgttctgttttatatattgaaatatgaatgtgtgtcactgttggctgttagccacttgagggtggaaatgtggtttatctttcccacttagccctctagccaatccccctagtcaggtaagctttgtagtccttacaaagccagtatttaagtgaatttgcatggtgcttcccactttattagggtgtattcacagccatgatcatatttgcttctcaaagcaaatatggaaggcaagaacaagtattaatcaattttatatatgagaaaactgaggaaccaagagaataaaagatttaactgaagatctctaaactggttttgtggaaaagctgggagtagaaatttaaatctttagagttacagtaccggttattttccaagaaacacttgctggtatgtgttgtatcattaaactgtggagaatagttgacaccaagtcgttttctttcaaatacattaaatattttactctgatccttccctgtgtctgccaattactgggattatatgataatttgctcctcgcttaagaacatttaacaggaaacccagatcgagtggctctgttctggcttgggtgggtttgggtatttttgttgctgcttctagtgatggttcttgctttctttctccctctggatctgtcttttggtacaaacacacccccaaccaagggaaagggtgaggtggatttctttccctttagcacctaatcttatgatgaaaaacgcaggttcctttctcttaaaattccaagatctttcccttccaatgactccgaagcctgggtggatacctcaactcagggcgcagaacacttggggtctgagtgtgcaaggaccatgcggacctgttcaatcccggcctttgggctccagcccagccttcccggggggaggagccgcatatgcggccaggtcataaacccgtcaggccgccgggctccggatttgcagcctgaggcagagctcgggggctgtcggtggggaccttgcaggagggcaccccaagcccgcccggcccgcccaacccagcccctgcgcgcagcccgggccgagtaggaccccgcgcgcccctcgcyatggcggcgccctcgcggctcctgatccgcgggggtcgcgtggtcaacgatgacttctcggaggtggccgacgtgctggtggaggacggcgtggtgcgggcactcgggcacgacctgctgcctcccgggggcgctcctgcggggctgcgggtcctcgacgccgccggcaagctcgtcctgcccggaggcatcgacacacacasgcacatgcagttycccttcatgggctcgcggtccatcgacgacttccaccagggcaccaaggtacccgccccgccgcgcccccgccccgcggtacccacggaggctcgggcagcctccccagtcgtcccggggtcctcagcagggccgcctcgcgcggcgcggcgccgaggagctgggtgggcgggaaggagcgcagccccggcgggtgtcagaggggactcagattctcttcgctggggtcccttycaggcgccccttctcggcggcagccgagcagccttggctcaaccagatgccctcgactcctcctttagtggttaatttgacgagtttaaggccatccccttaccctaatttctctataccgcttactccccaaatctccccgcaaccccattttgattggtgttctgtggaagtcgcaaatcttccatacattctttagaatctttttttaaagtaggcacttccagccatttctcccaaccatttcgacccatcctttatccccaaccaaaaccaaatgaaaaatccattcacctggtagttacagccttgactcaaagtgagcagtgtagcaggtaatgtgtctgagtaggctagatgcccaccgtgttcacgttcccgtcccctaccctctgcccccactcccacccccagtagaaaaaatatagccccgaccagggtttagaagagaaagtattccagaaatgatctcgcaacactcacacacaccaacgcagcctcgcagcaggctcttttctccatcccacttgcgctggggacacaacattcttgctgctggagtacccatagttttactgatgttgcaggagggtaatcagatcaccactccccaggtgaaggtaggcttgggtttctctagatacaaaggcctagaagtttgggtcaatgaaaggaaacttaaaccaaacttgtccaacctgtaggccgcatgcagcccaggacagctttgaatgcggcccaacacaaattcataaactttcttaaaacattatgagattttttttcttagttcattggctgtcgttagtgttagtatatttcatgtgtggcccaagacaagagaagccaaagattggacacccctgcaacatttccccaaagctcctcaacacaagatcaagagactaacagagcagctttacaggaacatagagtaaaaattctactctcagcacttgggctaaagtaaagcccacatcctccctaagtcctgtgttttgagctgccttgagagaaatggctccttccaaagtgaagatgtattgatatactaaaggccttggcttttcacttggaccataccttgatgtgtgaaacaagttgggctattaagtccagtgtatagtaggcttccttcctccctccctccttctctccatcactccctcccttctttctccccccactaccccctccacccctctctttctttctattcccatgttactgtggacaggctgacagtcttccaaagcagttttggtgatagctacttcattcatatactgatttctgacagttttgctctccttacacctccccctctccaagttccccaatcctctataattgactggaatgattaacagaaaaaaaggaaggcaggtagatttgacccagagagaaggatctgggcaggctgctcaaatcaccatttggaaagcttcttcctgattactaattatcaacctatatctttatgtcaataaagtcttttgtaggacagattgttgtatggtttgaaaattagcaaactttgttttgtttattcatttttcccttttgctaaaaagtaatatgcactgaatttgaatgaacttatttttccattttaaagaattttttagctatcaaaacaatatgtgattgtaggaaacaattggaaaaataataggaaaattaaaagaagcaaaacattaataatactctccctctcagtgacagccaatgttttggtgtattgcctttatgctttttagcatgctctattttacataatcgatatcatattgtgcatgtgtctgtgtgtgtacacctatatttaaaatgtcagaacttgcagttttcagtcatagtgcaagccctttctgttattacagacttatcattaacaaagtgctttgctgatggcagggcatcccattgracactcccacctgcaaggtggggagctgctatttctgaccatgagttgcccactagcatcattctccctcttacagctgagcagtagctttcattctctttctgccatcagggttccagatgaagcagcaaagaagaggaagtggaatgctgtgggggaggggcattccctctctttctcaagattatctttgcgtgccccaaggtcctgggaagtggttcttggtcttctatcttttccttagccattctgggattctctagttcagagagatttataattcttaactgagaatgtaggtccttatggcgtatagtctgttgtcaacatctcaaaggatttatccaccagctgatcctctaagcmtttctgtacttaaaggttgtgaaaacattaaacaaaaacatgttcttcatgagcttaggatcttaaacaaaaaatgatacggtcagagatattaaggtcaaaggtttagcaaataccaaattcctgttgaatattaaacagtacttacaaaggggctgtgttgcaatagtctagttcagagtcagttggttggatcccaagaggtaaccactcccaccccccgaaacagctgagrcttcataaagtgaaccagatggggaaatatagataaacataaacattacagtattgacctgaattctgaaagaaaggcattatagagttattttgtcttctttcctggcctttgcaataatccccaaagcaacgctggtgggtgtttgttttggggagctagagacaaagataggccttttgtaaatactggttgtatgatatgttaaacttgaaaaacatcttcctattatacctttaagtaacatctattttatcaagtacataccagccaatgccctaagttgtgcattatcttccaaaaatcccagatgccattgtctacttttttacaattgaggaaattgaagcttaagctacctgcctaaggttgtacacctagggctgtaactcactgagtggctcttcaaatttagtactgcctgaccccgtcgctaaagctgttacctattagwgtctgttcttttgaaaaaacatataatgttcagatttgtcagggtggcaagtgatagatgacagagccatataagttgcattttaatgcgaggcatcttttctcaaaaatagagcagagccgtctttagaaaagacagtaactcttcactttcctaaagctagaggcagttaaggttatcaaaataagtacacactgcaggtattcagtttataaggcatttgtataatacatacatttatagccatatcatttgtaagggtacagaaatggaccttaagtacagaaaaagcataaagtaaaaatgatatattatactttcaggaaatgggcccctaaagtttagaccaatagctgtttgcattctacatccagcaggctgatcatttataatacctgacaaatacaaaaggatattatttgtggtactctatttatcgatcactagattgtgatgggactcaattttaaaaatgaatatacattaactaaaggttatttattttgtaaatctaattcatgtcagagattggtttaaagcctataattgattagcttaattacaggtaaaagctttctgaagtaactaatggaaataatgttctgctttaaagaaatcatatttcattttgttggtctataccaratgtacagtggtcttcagataattcaatatctatgaggaaggacaatggaattttttattcaatgggtagtatgaattcaataaatttgaaagaatcgtgactttgcttttactacattctgtgataagagaatgargtataagagtttggcaagttttcaaatatacataaatttgtattcagaggtgtatgcaggtcagagtgggtggagttgcactgaaaacccggyagtgtcagtagctggcaggaggaacatctttttaaaaattgggaaaccatgyaacacatttttctttttttcttttgttttttctttattgtaaaggacaaaaagttctcaaaattattgagaagggaaattacactttgctttgaaactttttggtaaaatgccattgtggggattacttacaaggcagtgtgtgattaagcaggtaagtgtgattaagcacaccacacatttagttgtatttatagagcttctgcaacttgtggaagagctgtgcttcaaaaaccctggttgcaaatcaaatccccttttctgttgcttgccagagctcccggctgggcttcaggagctgtgtgggctgattttgtgaccttaggcaagtaatttcctctctcaggattgtcagcattttcttgtctgtgaatgaggcaatggttagatgagcaattcaaaaagagttttttaagttataaaaacaatatatacttatcatccagaccttaaaaaaatgctggcacattatagtcactcaatatgcattagttaaatgaatcaactgctttttcaaaaaagaaaaatacagatgagtataaagaaaaataatatttaaatcacctataattttaacatttggctccctatccttctagatatttatttgttgggggaacgtgtaaacatttgtttccttctaccaaattgggcatactgattggagtcagccttgtttattaaacatttccccctgtccttaaataccactggagaatgtgattttgtggcctcattatcctctctgaggataatgatctctgagtctcggatctctctctccagcctgcatattccttaagcatcaggcctcaatttctgcctgtctctggatatcacaacctggatatcccagaagcacctcaaactcagcatgttccaaaccaaatgtgacctctccttcaagtttcaaactcatttttcttcctgtttcccaaactttgatggttcagctctcatcttctccatgatggacattttggtgatctccagtgtttatccactatatagcaatgctgtgacagacatccttatatgtaaattattgttcatattcttgatgattgcctcagaaatgatcccttagagtaaaatgcctgggccaatgagtattagacacatcttaaaggagtttaatacattcattcagactgctcttcagtttatgtgcccattatcattcccatttcactgtattcttgtcgatgatggataatgacattattttattttattttattttattttattttattttattttattttattttattgagacagggtctcactctctcacctgggctggaatgcagtggtgcaatccagctcacggcagcctcatcctcctgggctcaagcaatcctcccacctcaacctcccaagtagctgggactgcaggtgcacgccaccatgcccagctaatttttgtatttttttttttttttgtagagacagggtctcactatgttgcccaggctgatctcaaactcctgagctcaagtgatatactcacctcagcctcccaaagtgctgggattacaggtgtgagccactgtgcctggcctggataatgacttttaaaaaaatctatgtcaatttcagaggaaaaacgtagcacttcttactgtctttaaaagatcatctctttaataactggtgaggctgagctttgaacattcgtgttgtattagtagtttagatgctccagcttcaagggtttgtaattctgtggtttccttgaatggctgtttaatgattacaaacttaaccttcagactcatcagaggaagcacaaaaaaactcaaagattaactgaaaccacttgatgctaaytaaagctttggttctgttaagggtgttgtgtattaggaatcctttcactgacttagattccaagacttgccttatttcagctttgatagtccatagttcatgcttttcacctccaccccttgttttctctctcacatgtctggcctgggtattttcaatgtctctattagtctgttctcacactgctataaagaagtatttgagactgggtaatttataaagaaaagaggttcaattgactcacagtttcacaggctgtacaggaggcatgaccggggaggcctcgggaaacttacaatcatgttagaaggtgaaggggaagcaagcacatattcacatggtggcaggagagagagcaaagggggaagtgctgcacccttttaaacaaccagatctcatgagaactcactcatgagatcgacaagggggaaatatgcccccatgattcaatcacctcccacatggtcactcccccaacattggggattacaattcaacttgagatttgggtggggacacagagccaaaccataaaatgtctgagagaggtagtctagaaawcaaggtttccatgatgcttctctcagggaggaaagtcttttcctttaccctcttatgtttagtaattgggggcctgcaaattaaactgacaaaagagagattcacaaaagaaaagacaaattaaaaaaattcacatacatatataggaattcacagaaaaatgtgactcaacgagggggctagatttggggggttatacaccatcttaacagaacaagggaaggcggagcaggcacttacaaaaaaacaacttcttaataggggatggtcacagggagaaaagacacataggaaaacaaatgacttttagaaaagataaatgggcccttagaaggagatatgggacatatgacagttttgtgacagtgtctatttaggtatggtgtcagcttccaagtctctagtgataagtcaatcttccctggttgtgaaactcctagagaggggatttatgataattgaggtctttggggaggctttgctttayagcagatttgggacttaaggaaaaacaaaaacaaacaaacaaaaaaacacctattctcaaatatctggagctcaaaataatatttatgctacagtggtatattctagagtctcaactgccatctaatatggaataatcccaaactaaggatttttcaagctggctgttaggttccattaattcagtcaacaagtatttcttggaaacccactaagtgccaggcattgtggctggtgcagaggttatagagatgaaaaccatggtatttgttctcagcggtaaacagactagaggtatatgggtctctaatctgtctggactttgataataaattttatatagtaagtttgggctttatagactttgctttgatgattgtgacaaatttttagtaaacatgtgaggtcagtgacatctggcattttccctgttgctgagtcatcaatcacagtggcctgcatcacctggctgtgtttctgacctgcttacttggctgacaagtgagcctgggcaactggccaccatctacacctcaacactgctttgtgctttcttctcacacrtcaagtaacaagttgagaaaggacacttcaattttttctgttatgtttcattgcatctaacagggagactgtattatatagtgatagtcatggatgagttcctgagcctgaggatcttttcacacagaaaagaccttaacattcacctgaaartaaaacaaaatgtaatcatttttagaagtcaagaaagtatttgaggcatagatacagaaataaaytaaaattgtgtttgttaaaagtcttagttaacactgctttggtaatgaactttggaaaaactgagcattcagccttcagatgtggtctgcattgacactccatattaacatgttcatagaaggatctaggaaactacagggccaggactagcaatatttttgggaaatgacatttcacactaacacgcaacttacacagctttcccagtttgctattggaaaagtgaaccatcataattattccatctcgtgacttttagggaaattcactggtccttctcttcctttccccttcaaacatttagagaatattcatgtgccaggtactgtaatgggcacagaatatacagagatgaaccaacattgattaaatcagaatctctggggaatggggtaaacgctttctatatgattcctgcatgatccagggctaagaattgcttggactcagcacaggaatgggtagaggagggaagaacatgaatgatgtctctctctgaaatgggaaagtgctcaggtctcctaagagaggcagggacagtgtcagtggagtggagtgaatgagttgagagggaatagctcaatagacagctttggagaaagctaaagttcaggtcatgcaggaccttatgggttgggcaacaattgttttttctccatcttaagagcaaagagaagtcaataaaagattggaagtggcagatatggctgggcagacatatagtaggtatacctcctaccttggagttgtgttcacattgttgctctgaggattttctggggactgaactccggttgctcacagtggtaacctactcattaacacaccctctttatggccctcttcctttctgttttccctcccttctcatttcttcactgtgctagtccagtgggaagacgaaggtggcaccgggcagtagaggtgaagacgcaggagtagagaggctcctggagttcatagaagacagcctccagggtcttgttgatggattggatttggggatacagggaagaagagaagtaggtgtcaagagtaactcttaagtttctggtgggttggatgatagtgtgattaatattccaaacttagggaggcaagaagccaagcatggacaggaatgtgcaagacatctttacaaagctgagtgtgcttctggatttgggacagacgttgggaccatgaaacttgtttttgtaggtttcagtgattgtgagagagctagaaattcagccacgaacttttctcattaaggctcaaacataccgttgggtttctttttgttttacttgggtggtgcaggttctgtgatggattttagtgaaacaaagtcacttgttttaggataagcttagaaataagaatttggtggcaccataaaagggaagaaaatgcatttggatacagtagtgtaccctgaatcacagtttcaatttctccagttacctgaggtcaactgtagtccaaaaaacttaagtggaaaattccagaaataaacaatcataagttttaaattgtacaacgtcctgagtagtgtgatgaaacctcaagacatcctgctccatcctgcctggkactgggacgtgagtcctccctatgtccagcacattcatgctatagacgctccctgcccgtcagtcacttagtagttggctcggttatcaggtcaactgttgcaatattgcagtgcttgtggccacccacaagtcacccttattttacttcataatggccccaaagtgcaagagtgatgctggctaattgttctattttttattagttattgctgttagtctcttactgtgcccagtaataaattaaactttatcacagrtatgtacatataggaaaaaacatagcatatgtagggttcaatactatcctcagtttcaggcatccactggaggtcttggaatgtatccctcttggataagggataactcctgtactttcagtaatgatttacaatggaatattcttaaacaaaatcttgtgtaatattatgacccactgttagagtttatctcaatttctgttccactgcatttcttctggaagcagtgtgggctcccctgtcccccaaaagagttttttagataaactggaaggtttacaaggaagaacagtgaaagtaattaggagctgaaataattgatttgtgagccaggttagaaaagctaaatccattttgtttggctaactgacaaataaaaatggaaataagtcaatcaggaataaaagcaaaggaaataactaggcttcatgtagctatctgagagaaattggccccagccatcctttcccattcaatayagcttctccaaactcattcccagtctggggttgaggagagggagataagaatggggataagaaacagaacaagaagaaacaaaagataagtggttgttcctctcctgtctctttcctgctcctagttaattaggaaggtggagcatttgtgatcaaccctcatttaagagctttcaaattgtagccccgagaattttcatttgctttagttttagaagagtggccctttgactatcatatcttcagtctggtaagaagaccatcaacagctctgtctatttaatttatacaccatttatggtcatgtgtcacttaatagcaggaatacattctgagaaatgtgtcattaggcaaatttgtggttgtgagaccatcatagtgtgtacttacacaaacctagatggtatagcctactacacgcctaggctatatgctatgssctgtggctcctcggctacaaacctgttcagtagttactctactgaataccataggcaatgacaataataactgtgtatctaaacattgctaaacatagaaaaggtacagtacaaatatggtactgtgatcttatggggccaccgtcatacatgtggtactgtcattgatcaaaacaccattatggtacatggctgtacatatatatgccctgtgtcatatatttatatgtaaaatatttatttttcatataaaattatgattttaatagaaagtttagcaaatattgaaaataaaattgaagtaggggaaaattaaaatgacctggaattataccacctagaaccagccactgtaaacattttgtcttggctcagtgtggttttgtgttcgtgcwgagtgttggtatgttccgaagcatgttattgtggctcatgttgtcatgtctggcttctcgctccctggccatttcggccagtctcgggacctctatggcatcctctaataggtcactcctacattttctcctagtcttgtatgctgtttggaaacaggtctgtatgtcttcctgtctgcaaatgccaccaggtggacacgtgcccaagcacctcactctcaggatgttccccacttcattcacgtccctcctaagtgcagatcatgctcctcctctgtccactcgcctgccatcgtctcactcatcctagtcaaatcagctcacctgactcccttcgcaactgaaaacaatcattgccctgttttcctcctctgggaccaccactttatatggtccccagtcaccttaattctgccctttaacattttctgctgagctgctacctcttccccccagatcttcttcctcagagcgtctcttcatgcagttcacgtttcccagaggctcaggctctagggcctgatgactcagattccaaccctgccattgctccttgctggctatgagactttggccaagttattgacggttctgtattaagtttttttttctttattttactttaagttctgggatacatgtgcagaatgtacaggtttgttacataggtatacatgtgccatggtggtttgctgcacccatcagcccgtcatctgggttttctgtattcagtattcaccaccctaaaatggagttaaccatagtacctactgtggagctcttgagatggttaaaatatgcaaaacattggaatagttcctagagcatcatggtgcacaaaaacagcatcacagcacttgctgtgagtcagatatcattatacttaattggaaacttccacgtgtaggtcctaatcctgattgaaatccaagccgtctctaatctctgagttgatctttctctcctctgaattcccagtcatcttttctctgtacctcttctagggagcttagcaaattttacctccctttagcaatttttatactactgtttattttaaaagtagacttgctacctgttattacaatctaactattttatatttatttattcatatttctgcttctcctataaacaccctgagggcagaatcattgcctaattatttgtgtgatctcccactcccttcactacatacagtggcttggatgtggtagaacttttctggttttgtggagatagaatccacctacaatacaattcggccatttaaagtgtataggacaatggcttttagtatgttcacagaattgtgcaagcatcaccacaatcaattgtagaatactttttgttttgtttgtttgttttgagatggagtttcactcttgtcacccaggctggagtgcaatggcatgatctcggctcaccgcaacctctgcctcatgggttcaagcaattctcctgcctcagcctccctagtagctgggattataggcacccgccaccatgcccagctaatttttgtatttttagtagagatggggtttcaccatgttggccaggcttgtcttgaactcctgacctcaggtgatccacctgcttcaggttcccaaagtgctgggattacaggcgtcagccaccatgcccagccagaacacttttgatacccccaaaagaaacaccataccctttagctatcaccttggactctcctcatcccacccagccccagacaaccactattccacttgctctatggatttgcctcttctggacatttcatataaatagaatcacacaatatattatctttgtgactagcttttctcacttagcatcakattttcaaacttcacccatgtcatagcgtatgtcagtacttcatttccttttatggtaaaatactatcccattgtatgaatctattagattttatttatccattcatgagtcgatggacatttgtattgtttctactttttggctaccatggatcatgctgctgtgaatattcatgtgcaagtctttacgagaacatgttttcatttctcttggctataggcctaggagtggaattgcttggtcttgtggtaactctatctttaactgtgagaggaactccaaattgttttccaaagtggctgtaccattttgcattcccaccagctgtgtatctagtttctccacatcctgcgtgtggtagattttaatagggaaagaatacaaagaatagttctttaagcttgattttctagttcagtagatgctaaaagaggactttcttctaatgctttaattaacagcagattctattagaaaaatgtccttcatcctcaagggatgtcttgtcatactgggaagacacttttagaaggaagaaggtaagaagattaatctgtattcaaataaaaatacaaagcctgaggaatttttttcctagtattttcattacatcaatagggatttcttaagaaatgcaaatatgtattgttttgccacagataaggcagtgttatttaaaggtggagacaacatacaggatcctgtataaaaagtgaaatttttgagagcaaaaagaattggagtggggccaagtaagttaaggaaaaataaaaatctattgaagtaagcaagaaaagtgggagtagaatagagctggcatatcaggtaggacatgagggcatccggtgtatctggaagctgttgggggagggtggtgggggccggaaagagagactgaggcactgccccctcctgtgttgtaacatgaccacatttctggtgatgaggtaacacgatatagggaagatggaaaaattcctaatcctgaaatagtagtgctcaacccataaagcacttaccatgaatcaaactctgtactaagcactttatttttatttatttgtttatttttgagacagggtctctctctgttgcccaggctggcatgcagtggtgcaatcatagctcactgcagcctcaaactcccgggctcaagtggtccttccatctcagtctaccaagtagctaggactgcaggcgcatgccaccatgcctggctaattttacatttttgtagagacggggttttcaccatgttgcccaggctagtcttgaactcctgggctcaagctctcctcccgtctcagcctcctagagtgctgagattacaggcatggccaaggcgcctggacctaagcactctgtatacattacttcagtttaatcctcctatcaagcctatggtttaggtacaattgtcctcactttgcagatggcgaattaaaggccacagaggttaagaaattgctgagattaccacagcgaataagtgttgatgctgagctttgtaccctggtgtccgtgagcctcccaggtccgtggtctaagccactgtgcaacatccctcctgtctctgttttcttcacctacattgtttgaatacaacaattaaaaacaattaaccatcttgtgattttagtttaaatgaaattgatttaaataattagtcaaaggcatgtgatttagtaacagtttttaaattagtagtgatgtaatgtaatataatgtgctaaggggtatattgcaagttgaggcagaatgcagggatttatagaccatgttatgaagattccagtttgtgcagaggcagggagaagcactcagttttcatctttggagtcaagtggttacatttttgctttggaaatatctctctcgttgcaatgaggggtttgtattggagggagtgggagatgaagatcaatcaggactcttacaatagtcaagatgaggaatgagatggatctgaactaagaccagggtggtagcagtggacagaaggacaggtgcaaatctaagaaagataaaggggtcaccatttggtttctgggaatggaggcaagaccggaaccatgtaagtctcccaggattctgagagtaccacagggcagttagagatacagttcatcaggatggattctaataaaatggaattttataataatgaatatcacttctcaagaaaaaatatgtgcattttttccacttttccattttgatttttctttacaatcctcactctgttttctttgagtcaaatccattttcatcttatcagatatgacattctttttgcagaagcaattccagcaggtttaatactttaaacttaatttatgaaaagtctattcatgcccttctgggtcatttaaacaggcagcatctttttgcaatttcctggacccatcgagtttgcccaagtgcttacaaatgcacattgttcaagatgayaaatgacttaactaggaaattgatagctaatttgttgaaaacctcttatgattccaggctgctctctcaggaggcaccaccatgattattgatttcgccattcctcagaaaggtggctccctcattgaggccttcgagacctggcgaagctgggctgatcccaaagtttgctgcgactacagccttcatgtggcagtgacgtggtggagtgaccaggtaaagcacctggatttcaatgtgttcccattgtcctcttgtcctcactctgcacaagagcaagaaactggtgacattgattgcttcctagacaacaggaggacagaactggcaggaagacttttcattgcatattcttttgtatcttttgaatttttaattctgtgaagtattaccaattttaaaaactaaattaaaaaaatcatataaagacaataggataaatcttttatgctcattcataacagcttctcctaatatttaatcaatgaatcatcaatgctttaagtgtaatgtttaatatactgatttctctttttcttaaattcaatatcccccraatcttttaaacagtattttcccacaggttagaacttcaataaaaaatgtttaatttctcaaaaataaaatcaaggaaattctaaatttagaattctctagaactagaagcctgccttcccactcatgagccttctttagagaggaagggacaggcctggactgtttccagagtcttctccaagctgtatcttgaccgagtgatcttcctactctgctaatgttaccacacctggtcagatgatttcataatagagcttaaaacaaccttccatgtccactaattgcccaggccatggcagaaataacatgatttagatagaaaagacagttctgagagatgttaaaatatgttgatttcctcccacataaatgtgtgtgtgaattttggaagaaacttttacttggaatttaaattgcaacatgtttttccacattgcacttaattcagcaatctttttaccagaaagagttcaccattaggacattatttgagtatcttataatctcacatcccccacaaactcgggctttagacagcaagttaatctaaaacaaataatcaatctttaacaggtagttcagcaaacataatagcaaggtttatagtccacagctaacgttagtttttctccaaaaatgccatttttagtgatgcatctgaactcttatgcttttaggatcgtccctccttttcttcccttccctcccctcccttctcttcttcttttccctccctccctcccttcctcccttcctyctttcttttcttctcttccctccctcccttccttccttctcttcattttcctattctcctattttataagatggagcaaaggtgatggtgtttgtccttatcagtgcttctcacactttagtatacaaagagtcacctggtaaaccttgctaaaatgcagattgcagattctgttcaggggggttattcgtttgctagggctgctgtaaccctagcaaacagaatgtacgacaaacagaatggcttaaacaacagacatwtactgcctcacagttgtggaggccagaagtctgagatttaggtgtcagcagggttggttccttctgarggctctgagggagaacctgttcctttcctctctcctaacttctggaagtttgctgacaacctttggcattccttgtcttgtagaagcatcatcccaatctctgccttcatcttcatatgatgttctccccgtggaggtctgcatcccagtttccacttgatataagggcagcagttacattkrataaagcgcacatgctcgtgtcctcatcttaactaattacatctgcaaggactctatttccaaacaaggggttaggacttcaacatatgaatttttggctcacccaagtcaacccatagcagtaggttaggagcaggtgggacctgagattctgcatttctagcaagcaaccaggtgacgctgctgatgctggttcagttgccacacttttggaggaggaaggctgaagctaatatgcttgcaagttgtataatgagattcttccatggatgtggatggcagggatgattaatgagggctcttctactcagggagcaaaagatatttcatgtaagcaatgcagatcataatcccctttggaagcccattatgtgaatatgctaacaatgtttcaagcatttttttttctgactataaaactaatgtactcattgtaaaaaattagaaactgttagggggaacaaatgaggtgcactgtcccatgttctgtcccttgctgttgtcacttaacctaacttggagcacattccatcacttgtccactctcaatattttggtgcttttttctagattaattaagtagcaattaatttattcaataaatagttattgagtgggcactatgcaccaggcactgttctaggatacagcagtggacaarccttacaaggccccttctctcatggggctgaaatcctggtggggccgacaggtgatcagcaagtaaggactgctatgccgggtgataagcaccatcaagaaaagggagggacatttccaagggaataaacagtggtagcaatgagtaaattcacgtgtaatattatcattcttaaactttgctgactcaatagaattacgctgctttattttgcactttttagttagtaggaaatttcttgcatgtgtttttagtcatttattactccatgaattgttgccaacatttttcaacatgtttttcttatcaagttgaaagaacttttattagctaagagcaataatcctatgcttgttacacttttcattgtgtgtgtgtgtatgtgtgggtgggtgggtgtggrtgtgttttaacatatagaagttcaaacagtcttatttggtcaaatctatgagtttttcctttggaatttttgatccttattgagacttgaatctgacctacaaaagcaattattgaggctgggcgcggaggctcatgcctgtaattccagcactttgggaggccaaggagggcagatgacttgaggtcgggaatgcaagaccagcctggccaacatggtgaaaccccatccctactaaaaatacaaaaattagctgggcatggtggtgcacgcctgtaatcccagctactcaggaggctgaggcaggagaatcacttgaatctgggaggtggaggttgcagtgaaccaagatcatgccactgcactccagcctgggcaacagagcaagactctgtctcaaaaaaaaaaaaaaaaagagcaattgttgcgatagctttgatactaacttgcccctgacccctggcaaccctgaaggcctctgagcttccaacggatccagagtggagtctccagctgtcacctcctaggagctgccaatgggtcccatgccaccacggctggctctacagctraaccatgagtttgtgctttcttgggcatgcccgggtccatctgcatcttctactttctccttctaagaactccacccatggctttcagattggaacctgaatccttacctcacattaacgttcattcctgctggatccatgattgcttctgttgctgccaacatggcttcaaggtcattttttagaataatttcctcraatcgggagatagatgcagagaattttacatccaagtacagaaataaagcactttgggaaaagctattcactttttcatgatttaaaagtatgagagcagcagcagtttatcagatgaaatggggtataacctgggaaaaagatcaaggccttaattgcatttttgtggaactaaactattgtccttattttccttattttacttagttctcttccgaatgcaamgttttagagaakgttgaaattatcatttaaattagagtaacatattgttgttatggttgctgcttccttttaggttaaagaagaaatgaaaatccttgtgcaagataaaggtgttaactctttcaagatgtttatggcctataaagatctgtacatggtgacagacctggagctgtacgaagccttctctyggtgcaaggaaattggagcaattgcccaggtccatgcggaaaatggagacttaattgcagaggtacgcatttgcattccaaagcttctacagaaatgacagcagccataacataaggtgaagatgattgggcctacataggtaaactcatttaatgcattggaagatgagaaatccagaaatggattttccgtggctcggaaacggattttctgtggctcagaaactcccaactccatttccttgagtccctgctctcagctttatgcaggtggtatatgcactagaatgaggatttcccctttgcaaaccagctcttagatctcaaacatgtgcagttatgaaaacacaaatacttttctttgtgtcctccagcatacttttggctttgttgttgtttttcagaagcttaggctgctggttcagaataccaaagcgtggtcaacatcagtgtcatctgatgacttaagcagtgtattaggtagctgtttaaagccctgctcttttcagaaactggatattaaaatgtgctctggaggaaactagatgatatttatttctcatgttagtcccattattaatgcctgaaggatacaccatctgcaagatttaaagagctgtctcttgccctttatattagctgactttttttttaatctccttaggctcagctcccattaaagtgagtgagattgaggctcagtggccacaaggcagagaggaataatgagaagggagcgtgagctgtaaaaacaaaacaaaacaaaaaacagaccagggtttaaattggacttctgctttatagtttcatgacaacaggaagtatttttaccactctaagtctggactgcatgctctttttgtaaggaagaaataacattttgaagaagaaagataacaggtccaataccatttagtgggttggattggggagcaagtgaagaggattattccgtaataaaagtaaaactgattacatagtatgacagtgagtcacttcaacaaggatccacagtatttttattttgtttgtctgaatcaatattgtcttaaatatagatattgcttttcaaagaatgtgattagaaataacttcatatctttttcaccttttctttttaaatttttttatttttgtggggtacatagtagtgtatatatttatgaggtgcatgagatattttgatacaagcttgcaatgcataagaatcacatcrtggaaaattgggtatccatcccctcaagcatttaccctttgtgttacaaacaatccaattatattattttagttattttaaatggtgcaattattttttatttgttgttattattattattttttgagatggagtcccgctctgttgcctaggctggagtgcagtggtgcgatctcagctcactgccagctccacctcccgggttcacaccattctcctgcctcagcctcccgagtagctgggactacaggtgcccgccaccacgcccggctaattgtttgtatttttagtagagacagggtttccccgtgttagccaggatggtctcgatctcctgaccttgtgatctgcccacctcagcctcccaaagtgctcggattacaggcgtgagccaccgcgcccggccaaaaggtgcaattattgactatagtgcccctgttgtgctatcaagtactagatcttattcattctttctttttttttgttttacacacaaaccatccctaccttcccccctctccccaccgccatccctccccactaaccttcccagcctctagtaaccatccttctattctgtatctccatgagtttaattgttttaatttttagatcccacaaataagtgagaacatgyaatgtttgtctttctgtgtctggcttatttcatttagcataatgacctccagttccatccatgttgttgcaaatgactggatctcattcttttttatggcagaatagtactcccttgtgtatatgtaacacattttctttatctattcatctgctgatgggcacttaggttgcttccagatcttggctgtagtgaacagtgcagcaacaaatatgggaatgcaggtatatctctttgatatactgattttcctttcttttgcatatatgtccagcagtggggttgctggatcatatggtagctctgtttttagtcttttgaagaacttccaaactattctccagagcagttttattaatttaccttcccaccaacagcgtacataggttcccttttctccacatccttaccagcaattgttattgcctgtctttttaatataagccattttaactggggtgagatgatatctcagtgtagttttgatgtgcatttctctgatgatcagtgatgttgagcaccttttcatatgcctgtttgccatttgtatgtcttctttgaagaaatctctattcaaatcttttgcccatttttaaatcagattattaactttttttcctgtagagttgttttagttttgtatatattctgcttcttaatcccctgtcagatgggtagtttgcaaatattttttcccattttgtgggttgtttcttcactttgttgattgtttcctctgctatgcagaagctttttaacttgatgtcatcccatttgtccatttttgctttggttgcttgtgcttgctttttccccttttcaataaaaaaaagtgatggtaaaatatgcatatggaaaattaacttatatgattagaatatcaaaattatttttaccaaatatacatgttatatatatatgtgttatagatatatttacacaaatatgttcatatacacacacacacagacacacacacacccctatacctaacagatcaaaagcctggcattgcatttaatttatgataaaataatgatatctgtcattagtaaaccttccttgcacatatacacattcctgctgtctttttagggagcaaagaagatgttggctctggggataacaggccctgagggccacgagctgtgccgcccagaggcrgtggaggcagaggccacgctgagagccatcaccatagccagcgctgtgaactgtcctctctacattgtgcatgtgatgagcaagtctgcagcyaaggtgatagcggatgcaaggagagatggtaattctckaatgtaacctcacttagaactcagtgttagctgaagagaaaagtccacgtctgtagcctctgcttcagtttaggagaaagtgcatgtggatttccactacttttcttcctccctttttattagcctcctggtttcatttatccttatgtgtgtctgttttccmccacttttgttcatcttcatccttgcctctctaccttcatgttttatttgttatttcttctccatccttgcgaccccaggacatttcctttagccacatgcccccacactcaatgccactagcagccacttttaaatatgatagctraatgcaaagctctccggtttttgtttgtttgttttgtgatggagtctcactttgtcgcccaggctggagtgcaatggtgtgatctcagctcactgcaacctccgccttctgggttcaagtgattctcctgcctcagcctcctgagtagctggaattacaggtgagcaccaccacacccagctaaattttatatttttagtagagacggggtttcaccatgttggccaggctagtctcaaactcctgacctctaatcatccacccgcctcagccttccaaagtgctgggattacaggtgtgagccaccatgcctagccctctttcgttaattttgaagaagcttccctatctcttaggcagctccactacccttcccactacctgaatcagggcagtgcaaggcacctagtacatgctcaataaatttcttttgaattgaattgattcatctgacagccacttggatgttggagcaattgaagcaattatccaaatggtatttttatgatggttattttaagattttaaaatctaagttatttttaccccaaactgcctaattgcctcagttctctggttcagcctagtatgtaaatactcatcttaaaggaaagagaaaatctcctatttttgataagcactgggcaaagaaatgatttcactcttttgccaatactggtagagaaaggaggaaaaataaataaggtgcattttactcaawgactttagtcccatggtagcttctgtcatctcaattttaggaatgcagataatcagagacagtgttataattcaaccttgctgtttttgtttgttttttattaaaacaggctgtatttttgtaagattcattataaaaatmatgggtctcactctgttgcccaggctggagtgcagtggtacaatcttggctcactgaagtctctaacttccaagtgatcctcccatctcagtctcccaagtagctgggaccacaggcatgtgccaccatgcccagctaatttttaaactttttgtagagacagggtctcgccatgttgcccaggttagtcttgaactcctgggctcaagccatcctctcaccttggcctcccaaaatgttgggattacaagcatgacccgctgcatggttttggcatgtatataattgataccaaaacaaattttgtcaaaatttcttcttgttgcattaaggttcagtaatgattttgtgcaagctgtgtgcacttttaaaatgtaatccatcaacatcttgccttaagtgtaggcttatttcacctaggatttaataatatcttactaaccaaccatttctgattgctactctcgcatgtaaaagaatttcgccccttaaaaaagaaaatataagtactgcgattttaaagttataggtttttcccaccagatggtgctgttgccaacgctatgagatgagtcggtctataattatttcctttgttaagtcgtgtaccgggtccataatgtcagaatattatttaaggaacagtgaaatcagcagaaattttcacttctaacccaccttcaagctccaattttgactgttctgtcaggaagcagtttcttgatcttgggtatttgttttgcattgggatagaattccattaggagcaaagtaaaagtctagggagggttttagaatacagaacataggcagaaaactagtaaatacagacattttaattttattgtaaattattttaaaattcaatattatttcttgtatctgtaaaatatttacatggcccaagagtcaaaattatatataaaaatgttcaatgaagttttacttgccttctctagctccttcttcccatacagtataagtaatgatttttattaatttatttctggcctatctttaccatgtttctctttaccaaataagaatatagtccttctttcctacataaaaggtagcatactatacaccttgtctacacattgcttttttttccacttgaaaatatgttctgaaggtsagcccacattagatacagagattttcctcattcttttttgtaagtgcagggtatgctactgtatttattcaacaagtcccctattgatggacatctgggttgtttccaatctttagctgtttcaagagaaaccacagtgatggccttacgcatatgccatttcaatttgtgaaagacacattagttctggaggtcagaagcctgaaatgggtctcaccaggccacagtcaaggtgtctgcagggctgcatccctttctgaggtcctaggaagcccttgccaggcccctccaattacttggctcgtggccccttcctccatcttcggcaccagccacaatgggttgagatcttctcacatcacattattttgacctctttgcctctctctttcactttaagggccccttatattaagcctaccgattaattcaggataatctccccatttcaagggccttaatttaatcatatctattaatccctttgccatgtaaagtaacatattcacaggctatggggattaagatgtggacatctgctgggctccatctttctgcccaccacaaaatgggtatcttgagggtagattcctagaagtgggattgctggttcaaattgcatatgtaatttttgggacattgctcatattttccccaaggaattgtaaacatgaaatatttaaaatacctccctaaacgttgtagttgagtcagacttactgtgacagtataatacttgtgaaaataccctcatgcgcagttgtcaaagaggcaaaattgcttcagaataaaatagtttgaaagatttcctrccccatgcatgtgaccaaggcatgggatcaagcaggggcccaaagaggaagcgttggacataaactgtgcccagctgttcacatggtgactgcatcagcaaaccaaaggacagatccctgggtagtactgtgggacaagagctgttggaccacactgaccttttacagaagatgctgtctgtactcatttattatctaacatcatttctaaatgtaaaagagcaagatagatgtaaataagaaatcattcagttttacacatttatactatgaaaatctcccatctgtaaataccattgccagcccattcttttttttgttttttgttttatgttttttttttgagacaggttctcactctgtcacccaggctggagtgcagtgtcgcgatcttggctcactgcaacctccatctcctgggttcaagcgcttctcctgcctcagcctctcgagtagctgggattacaggctcccactactatgcccagctaatttttttgtatttttagtagagacagggtttcaccatgttggccagactggtcgaggtggctcatgcctgtaaccccagcactttgggaggccggggcgggtggatcacctgacgtcaggagcccattctgtcttcaagggccttgactctcacagtgtggtccctagaatgcagcctccacattgctccttagacatgcagagccttggggcccatccagattccctgaatcagaaagtgcatttataactagaatcccaggtgattcatatgcatatgaaagcctgagaatcacggctccaggagrsacaaaggagatccaattattgattgcttcattgtggtagcctagaaatataatgctattaaatttgattttattgttcaattgccagctctatatccagaagagcgggatagtaatgataacaactaacagcttgttgagtgcttaatatgtgcctggcacatagtagtattttaatctcttttatcttatttcaggttttactatatttttatcttatcaatgtgttttaatacacattgtcttttaaaaaattgtcataataatgcttcatgctcaattttaccactcttttgtgactgatgaaattgaggcttgggagagattggtgaattaagccaaagatcactttattagtaagtgctaaacttggaattcaagtccaagtctatgtgaccccaaagcccaaactttttctgtcactctccactgtgttaaaggagaaattgatctgaagttgggaaaacctggatatcaagtttgtatttaatgggtttggggtttatttatttatttttagagacagagtctctctgtcacccaggctagagtgcagtagcacagtcttagctaactgccacctcaagctcctgtgctcagatgatcctcccaacctcagatcccaagtagctgcgactactcatgtaagccaccacacccagccaatttttaaaatttttttgtagaaatgaagtctccatttgttgttcaagctggtcttgaactcctggcctcaggcgatcttcctgcctcagcttcccacagcactgggattacaggagcgagctaccaygacccgctggctttggtgttttaaaatttgtaattgtaattggtttttgggttttggcattacatttacattttttatttaagacgttatcattttgctatttttatcattattaaaagattaattttgggggtggaaatgatgaagtattaaatggaaagtaagtatcttctatctccctcagctcattctttagagccagtgattttaaacttatctatctttagtttttggtggtgacctctaaaatcctaaactataagtttgtagtgatttgtaacttttgacagtatcacttgactctcaactatgaaaaatgaatgacttagttcctgtaaacttctcacgtcctgagttttgtcagtaataaatgtcacttcaaatgatatatttaattttacgtgttttattttacctgttttaggtattcctttttttttttttatttaagaggcaggatctcacaggagatcttgcagtggcaagaacacaggtcactgtagcctcaatttcctgggctcaagcaatcttcctgcctcagcctccagggtggctgggactataggcatgcaccactgtacatggctaatttttaaatttcttgtagagtcgggatttcaccatgttgcccaggctggtctcaggctaacctcccaccatggcctcccacagagctgggattagagctgtgagccaccacgcccrgcctgacatctcttctctacaggctgaagaagaaacttagaggccctaagtgctctctctctctctgcctcctccagatgtctaccagctgtattattatctttacacagactctgtaactctaattaggtcttccatgctttgtctataggttaagtctaaaatttagaactgtcacagggtaaaattatggaaatattcttctctgtagaaacaattagtgagaagagaacttcagagaaattyatagcactaacttgcagtgcaagttagtgttattcaaattgactctcagagaagcaatttccaagtgtcaaggtcaagtgagttttcttcattccagtaggactcaaaagcatgccttattttagtttgctacatatttagaccattattgtcttgcaaagtttctcgtttctcctgacatttttccaattagctctttttaaaataggttgagaaaagaaatatatgccttctttaccatatcatgaagagttctagcttcttcatcatactttctattgaatagaatcagctctacttgcagagattctttgtgggaggagaatctgctgactttccctttcatttttgatagctgcttgctaagcctgcagtagagatgtcattctgggataatgaggttggatatactgattcctggtttccatatctccctttttcttgaattactttgaagattttcaggtaatttttaaggaaaagtgtgtaaaaggtaaattttctgattccttgtcttcacgcttactgggtgatttgaatgggcatggaattcttggttctgaaatatttccttctgaattatgaaggcacagtttccttctctgctggcatccagtgttactgaggaacaggaaaaccctatacaatttcttgtcttcttatcacaaacttttcattatctgtaagatttttatactttctcttcattttagatgtccagaaatttcattgagactattactggaaaggagttccagtccagaccccaatagagggttcttggatcttgctcaagaaataatttagttgagtccataaagtacagtgaaagcaactttattagagaagtaaagaaacaaaagcatggctactccatagacagagcagccccaggggctgctgattgggtatttctatggttaatttttgaatatctgctaaataaggggtggattattcatgagtttttcaggaaaggggcagggaattcctggaactgagagttcctcatttttttaggccatattgtgtaatttccagatgttggcatggcatttataaactgtcatagcattggtgggagagtcttttagctaatatattttagctaatacattataattagtatataatgagcagtgaggatgaccagaggtcactctagttgtcattttggttttggtgggttttggccagcttctttaccacatcctgtttctgcagcccaggagatttcagcctcattttacccagcccctcttcaagatggagttgctctggttggaacacctctgacaaggctatatttagtagtaggccttttaaaaattcacctgcatgttcagagggctttatcaatctgacgactgagctttgattctgaaaatgtttcttctgtattttcctccatattcatgtcctctgttttcttttcctgggactccatcataatcctccatgtcttttaactattttcacctttttaaaaagatatttgaatttttgctatacattttaggaaatatttttgtttactttttcctgcccttctaataaacttgtgtcttggtaatcacacctctatttccaagaaaacgttcttgttctctaagcgctctttttttccatggttcygtattctttttaatgtttttctttcaatagatgcattactttctttttaaaaataatttggtactttatttgtttttttatttatttttatataaagacatagtcttactatgttgcccagcctggtctcgaactcctgggctcaagtgatccttctgcctcagctgcccaaagtattgggattacaggcatgaaccattgggctcagcttatcttcttaatttaagagtactaatgaagatttttttttaattctcttctgtttcctgggttactctgtttctttctagttcaatttttcagggttttgttttgttttgttttagatggagtctcactctgttgcctaggctggcacaatctcggctcactgcaaccttcttctcccaggttcaagtgattctcctgcctcagcctcccaagtagctgggattacaggtgcccaccaccatgcccagctaatttttgtatttttagtagagacagggtttcgccatgttggccaggctggtcttgaactcctgacctcaggtgatccgcccacctctgcctcccacagtgctgggattataggcatgagccactrtgcctggccaatttttcagtttttaaaactcctggtcttcttttttgtgtgtgcgtgtgctgtttgtgttttcttcaaaagtctggtgatccttggctgtccgtatgttgacgggacagttcagttggtcagtgtgggaacgggcatggatttcctcttccaccaagcgtgtctgtttcctgaacttgctgtgtgaatgcacatggggcatagtcactggacagcttcagtttaaggtgcagggacctcaatctagcatcaayaccacctaagaagctttatttcccagcagaggtaagggtgagtgttgacagacccagacctcctcttcccctccccttcactgccctttctgccccaggaggaaagctcttcatgactccctctactccttcaggttaggctgtcactccccctaacttttctttatgaattattgccatcccatctgctttccacattcctaaaatctaccaaaaccccggtcagccatgatccttctttcaaccccagtacagctctggattctttcccttttgtctgtcttcaccaggatttttttgtgaactgggaaagaagaggtgggcaatattcagtgcatccaaagcctgagatttctttttgctcatgcttgatattttcttttagcattctgcaataaaaagtgaaaagcaggttacagaaataagaaaactttcaagtccaagccatcaaaagtggtgtcacctttgacagtttgcaaagaatgcccatttcatgcttaagtattttttcatccaagttgagtaactattaggctggtgcaaaagtaattgtggtttttgccattactttcaatgggaaaaaccacagttacttttgcaccagcctaataaaactagattagttctcatccacccttcttgtgagaagacacttttgcagagatgaggcaagggaatccggcatttctccctaaagcgttatccttttcttccagaagcagagtttgtctcccttgctccatagcccaagtgtgaagttgaacaaacaagttgtcattgtgtttcatgtggacagtccagtctgccagcccctgacttctatcacccacttcagtccagtttttgtccgaagaatgtatgtgtcaatgtgtgtcattggcttcagtgaccctttttaaattttggtctgagtagctatacatgttctttttctgccacagtgttggcatatgggatcattaatggctttttaggaaatgcattgttcacttcacctttgtacttcccagtagaacctgtaggctcatgaattcactacctttctgtgatttgtttagaatggtgacaatttctcaaagcaatttaacttgatgccctaattgctatgtatctggcgttgtttctcatttatgactgaaattgtcaatgcactgctttgctgttgttttggtttacagttaaacttgttttagcttgtcttaatwaagtttacgtctattttaaatccatgttcctttytttasggtaaaaatatgatgctcatttgaacgtaacaaatattttccttatatttttcataaacaacaaagttcttggatgccaagcgcatgctaggtactgtgctctaggcattagatttgctaagatgattaagacaatttcagatctcaagcagctcacagtaaactgggctagattgtggttgtttaatgtgtttgtatatttgattgttgtttatttgatttgatttcgtttggttttggttttgcttatagttttacttaataggcatatctttgtaaaataaaaagttctcttgcagagaggtgtaaaccaaaaataaaattctaaggccccttaaccatctgaatggacccctcctctcagtcagggcattccaaagttaacccgaaaatctgtttcaggccatgcggggaagggagggttggacatgcctcattatgtcctcctcccttttggaattcaggaaaggctgaccagcatttaacatcaacacagaccttaagtctaataaaaaccatttacaatttattctctctgaagcctgctacctggaggcttcatctgcatgataaaactttggtctccaccgccccttatcataatccaaacatttctttctatcgataataactttttcaaccaattgccaatcagaaaattttgacatctacctataaccaggaagcccccactttgagctgtcctgcctttctgtccagaacaatgtatagcttacatgtatttgattgatgtcttgtatctccctaaaatgtataaaactagactgtgccccaaccaccttgggcacatgttctcaagatctcctgagggctgtgtcataggccattggttactcatatttgccttagaatgaatctcttcaaatattttacagagtttgactctttttgtcaacakaggctttggaattcctattttccattttatgkaaactctgtctcccatatattcctcttgtgttttaaaagatgcggagaaaaatctacacagtggcccctctcttcccaagtagtcacgctgagtgctgcttggcaatgttgaacaagaatacaccaaatttcatttactcatgtgcaaygaactgatgcttaggcactagtgctgtaggaagaatcgatgtgcaactgwgtcaaggtgattttgagtctcaagtttcctttcttctcttttttttggaaaaagagtcgcgttctgttgcccaggctggagttcagtggcatgaccttggctcactgcaccctctaccttttgggttcaagtgattctcatgcctcagcctcccaagtagctgggactacaggtgtgcaccgtcatacctggataattttttgtatttttagtagagatggggtttcaccatgttagccaggctgcctttcttctttcttgcatatgaacatcagaacactccattgtcctttaaatttagaacaagataatttacattatatccaattgcatagcagttaaaagctagccattaaaaaaatagaatcgtgtggctatcaggaaactaacgtttgtggagtgtatgaattttctatggctgccgttgcaaagtgccacagactgggccgcttaaacaacaggaatttattttctcacagttctggagtttttaagtccaaaaccaaggtgacaacagggttgaacagggttggctccttctgagagctgtggaggaaggatgtgttctaggcttttcttcttggcttatagatggccatcttcttcctgtgtcttcacgttatcttcccctctatgtgtccaaatttcctcttcgtataagaaccacagtgttattgaattagggcccaccctaatgacctcactttaaattcactacctccataaagatcctttttccaaatacagttacattctgaggtaccagggttagaacttcaacatgtggatttgggcagaggacacaattcagcccataacatgaaatgtctccagggtcccaggaagattctgggtactttcataaacattaatttatttgactttcacaaaattgccacactagagggacactatgatcccatttcacagatgagaaaaacagactaagaacaatgacttaccttgtacaatgtcaccagctaaaaagtagcaaaagcaggatttgaacctaaatctgtatgatccattctaccaagctgcttctatgtatttgccttctcaattcttttcttcctttgtaaatgtaatgttttgaatcaaaataaagtccaggaaagtttggctgtatccttttggctaggaagatttatttctatgaatatgtttggcctcctatttagtggccagggcttttggtcctggatgcctatgctttttctgtgcatctttcaaccttctctagcagatctcaggactcaatatttagcgttgcttgcagatccagacaaggtgttaacatctgctctatcaccgtcatctaataaatgggttgtctggtcagtggagagtttggattggtttgatctgcttcattactgggaaatcttgagtatctctcaaagggtaaaactcctttaagtgggagattgcatcataaagggcagaatcttttgtttgtttgggtttgagccaaaaaatggagaaataaggagagaacatctatgggtagagacgatacaacctaatgtgaagcttgctaagacagtgggaggagattaatgatgaagatgttcctttctcctaagagttgttgaaaccctccagttgtgaatgtaatcaggatagtaccaggctgaagacagatagagcactcttcattgccaaccagctaagtgtagtaaatgaaaccagtaaatgaaattggaaaaatgctcagccacatccacaaacagcctgtggttgacttaaacatttagaaatacatgctctttcccaagtaataaaaaatggcacttttcctagtaacatagtgcatatgatatgatattataatactatgactgtaattctggctgtacaacttagtgccagtgtgtgttgagcacattagtctcattgaacatcaattttttcatctgtcaaaccagcatgaaggcggctatgaaggtcaaatgagattgtatttgggagccttgcaaactatagaatggtatgcatgtgttagctatttttattgttattttatttttagcccaaatctaacacaacccataattatgctgaattatccagtttgattatccaatttatggattatccaggcctcctgttttccttcccctttttagttcttgcatgctttttagtcctttgaaaatgccttagaaatagtgaaataggaaatagaatatgcagttaggaatttttactttttaaattttattttggatattaacagatactagatggggagaaagttgaaaatagcccagttaacgaagagtttgttgtatataccactaaagtggcctgtcacattttaaaggagctaagcccttccaaggaaattacctgtcatctggtttcaaaacagtcctggcagactcccggtagatgctgacacttttaatttttcctgagtgctgttaaaattgcagaacttttggaaccatattcccgtatcaccttgatgggccaagtgattgaatagaacatgtgataaggatctttcctcaatgataaagcaccatggaaaatcctcagtcagcgacttgtaaagtgattgcagatcaagtctctgagttttcattgtccaagcatctgtaagacgttcccttggaataggaaggtctcttcatacttgcaaataaaatatcgtgtccatcttcccagttctccagtagatagtacattacctcttcattcactaaaaacgattgggcatattctatatttagaaagagttgctaatggtgtttctccttttctggggatagggcagtaagaatccgaatggagatgggattcatccagtagggtatgtcacggaagcaaagtaacttagccatggctaagtccctgggggataacttttattgatacttggttacttaagaattgaagttcttaggcttcaataagccttgctttcatggtttttcaaattcctaagctagctagtggaagatggctagtttgaagaaggatctatgaaataatagggtgctgtgttccaatttgatatgactcaggcaactggcggccatctactgtcagtactctctgaggaaatcgttaatttcagttatatatcaggattttaactaaaactcagcatctgatgaaccagagtgaactaatttggtatgccagcatctctctactgtgcactctccttaatgattgcctgaatttgatcaggttgatgccaacaaacctattattctgacaaatgctaatcagagataggattctgattttaatttcaaattcactgtgcactattaacttttctaacattgtacgcttttttttttgatggcctcatttgcatgatttttaaaatacgcatttctggctaagactttattatctgagtgttctttcatttaatacacgttttttgaggagttctttttttcaagggcatgaaaagattatcaattgatttgcagcagagatatgctgtggttgaattccatatgacctaactaataattatctgtcatcagggtagtaaagcataaaagttagaaccactggagtcaaattctgggttcaaattctaccttctccacaccacatagactgtatgtaatgtaaatgtagagaaattattactccatagctttattttcatctttttatggagataacaatagcatttatctggtagggttttggagaaggtttcattagaatggctcttgtaccagccagctttttctaggttatatggccataaaaatggatctaaaatatgaatagcttatacttacagaagtttatttctcattcatatttatgttcatcatggatttttaaatcctgtccacaaaagtaaattatagtttgggattctgctaaactgtagatattaccctctgctaggggagaaaagattaatatttatgtgtttgtcatatggtcctcttaagaataaaattaaagtgatgaatgcttcttttaatctttccagggaaggtggtctatggtgaacccatagcagccagtcttggcacagatggcactcactactggaataaagaatggcaccatgcagcccaccatgtcatgggtccacctttgcgaccagacccctcaacacccgacttcctcatgwatctgttggctaagtaatcattttgcagatgactgggaagtgtattgccaaaagaaggtttgggtagaagggagctcgtcctcccatctggatcctccactaacctcccagtattctcttctacttgacctgtcaggtcctgggtacccctcacctgcagagcaaaaaacattgacttaattatgctgtgatatgttgtcaaagcctttcctagactctcagaaatcagatcgttttcactgaaactttactcttttctgacttttttcatctcttgttgcccaaacccagggctcttcattacaccttactttttatcagaatattgttgaatttttttctatgctgatataatatgggaactaggttaaccctgttactttctgggaacatatgatcatttttcttgaaaattctaccattcttgggccagatgcagtggctcatgcttgtaatcccagcactttgggaggctgaggtgggcggatcacatgaggccaggagtttgagacaagcctggtgaacatggcaaatccccatctctactaaaaatacaaaaattggctgggcgtggtggcttatgcctgtaatcccagttactcgggaggctgaggcacgagaatcacttgaacccaggaggcagaggttgcagtgagyagagatagtgccactgcactccaacctgagtgacagagcaagactctgtctcgaaaaaaaaaaagaaaagagaaaagaaaattctatccttcatggacatcccgacactccccattcacagatactcagtctcaagctaagagtttttcatgacagaccgtacaagagttcacttacccattcttttcagcttccttcctccttcatgattcagcatccccaagattactcacaagtcaaagcaggattcctgtccctggtaatatcagcatcsccagccagtctcaccctctgttcatcccagtgtggccgtgtggctagggactgccccrgagggcctgccctccattcatgaggatcaccatggtgatgtctttgtggatgcagcattctgctcacaaggagttttctctcacatatttgctggtgattctgaagttatcttcatcaagtacatgtgactattcatttctagatgagaaatggagtctcrgacaagctcatatcacagagctagttaagtgayggagctgagcttagaactcaggtttcctaacccatcttggatcatgcttccgatcagtgtgtcctctgaaagtgcttcctagaatagagacaggagagggatgaaatatgttcttgaaaaaactgctcattctccattggayttttctgacttcaattgagaagggagccaggagattaggaaaggttatggcagtttcctcctawcatattctgtatactcaccccatcactctcgtgttttttcttttacagtgatgatctaaccacaacagggactgataactgcactttcaacacctgccrgaaagctcttgggaaggatgattttaccaagatccccaatggggtgaatggtgttgaagaycggatgtccgtaataygggaaaaaggcgtggtgggtttyacaggttccagccttgctttgcctagttcttcagccaggatcctgcccatttgaggaccagagtggcacaaattttcatagagaagctttttgattgtttttactagggaggatactaggaatgcaatactatcacctcgaccaccattccatccctcagtatagcatcagcaaagaaataatcttctctgcatagtttattttagtttagacgatgcatcgcactattttgcggagacattagaggatgaattaagattgcatacaaagagggttattcttcaattctctgaaatggcatagcccttctgcttgatttctcatgctcttgaattccagtgcrtcatgtgtcattggcacgaatgcttgaaatgataaaaaatacacgaaggggcagggtgcagtggctcacacctgtaatcccagcactttgggaggccaaggcaggtggatcacttgaggtcaggagttcaagaccaacctggctaacatggtgaaaccccatctctactaaaaatacaaaagttagccgggcatggtggcacgtggctgtaatcccagctactcaggaggctgaggcaggagaattgcttgaacttgtgaggcagaggttgtggtgagtcaagatggcaccattgcactctagcctggggcaacacagtgagactccatcacaaaaaaaaaaaaatacacgaagcgtattcgttatgctcatacctcctttccatgaaatctttgttgatgtcagttctttttttttttttttttttgagacggagtctcactctgttgcccggactggagtgcagtggtgcaatcttggctcactgcaacctccacctcctgggttcaagtgattctcctgcctcagcctcccaagtagctgggattacagatgtgcaccaccatgactggcaaatttttgtatttttaatagagagggggtttcaccatgttggccaggctggtttcaaactcctgacctcaggtgatccacccgccttcgcctcccgaagtgttgggattgacaggcgtgagccaccgtgcccagcctgatgtcacttcttaaagaatccttggatatcatgtttttaaaattgctatatgaagtcacaaaagtaataatttaaagtctggaaaaaaatttaaatgtccatgactacaaaacttctccctgwggacggagaagaatcacatgactaaatgtctatgtgttaacttgtccagccagttgacatgtggagctgtgaagactagcagaggggacttgcctggttagacttctggtccccagtgtcatgcccttttcacccatctcctaggatgcctmcctcaaatgacacattaattatatctcacacttcagaatcctcttcaattgcttttaccctacacataccacctacttctaactctaatgaattattcaccaagtcttgtcaattttgtttccaaagggcctccttatttctttcttcgttgctaccattctagttggaggctcatattttgtttggacctttgcagtaatctcacagctggtccccatctccagagtctcacttgctacagtgtattctttactccagtacaagaactcttgttctgtactgagaacagctgacaatgcttttattattatttttacaatattatagagrgaggataggttttgaatgggagttctcatttagaaataaagttctgtttgtgctattgttctctcaaaaaccctttacttgcctccattacttattggatgatagttgaatcattaacttacaattagatcttcaaaacatctctatagcctcatcttctgctgattattttcctcaccccccttcctccaccctaactytaaccatcccagatgacttctcttcacttagattttcttgataaaagttcaagcttccacttgaacttctgttttacaatgaatatctttattatagcagattttcataatctatatagttccctggtatataaatggctttacagtgactgaatagttcttaataatatatagaaaaccatgtcattttatgaaacattaatatggtttacttatgggaatattactttcagggcatggttcttagtcatttttaaggcaagcattgtttgataattaaataaacctttagtaccctcttaccatataaatagggataaacccctaacactttccaattttattttagaggagccacacccctctgaattctgtccacattaaaatctcttgcaatagactatccataattgttggttcatgtaaaacttcaattgcataaaattgaacctcttgagttgtttttttatcttttcaaaaggattgcatctgggtgtggtggcttatgcctgtaatcctaacactttggggaggctaaggcaggtggattgcctcggcctcccraagtgttaggattacagttccagaccagcctgggcaacatggtgaaaccccatctctataaaaaattagccaggcatggtggggcataccccaccatgtagtcccagctattaggttggtgcaaaagtaattgcagtttttgccattaaaagtgatggcaaaacagattbctttcgcaccaacctaatgcttgggaggcagagtggggaggatcacctgagccaagggaggttaaagctgcagtgagccatgatcacaccactgcactccagcctgggcaacagagtgagaccatatctcgaaacaaaaaatttaaaaaaagcattgtcacctgattcaaaagtgttgtcacctatcctctataatattcttttaaaaataataaaagcattgccagctgatttaaaaatgttgtcagctgggtgcagtggctcacgcctgtaatcccaacactttgggaggccaaggagggtggatcacctgaggtcaggagttggagaccagcctggccaacatggtgaaaccccgtctctactaaatacagaaaattagccaggtgtggtggtgcatgcctgtaatcccagttacttacttgggaggctgaggcaggagaatcgcttgaacctgggagatggaggttgcagtgagccaagatcgcaccactgcactccagcctgggcaacgagagtgaaattccatctcaaaaaaaaaaaaaaaaagtgttgtcacctattctcactctataatattctatctaatgtctacatgattatctcataaatcttaggtctgtaataaataagtcagatcataaatgtggtattgtcaaactttaaaggagaatcgaaaataccattaccaaaatttagctgtcacctataacaatttttgtgattctaggatgaatgggaagaattagtgtggatgctaagtagtggggtttctgaaaagtcatcttcaggcttccatatgttaccccatcatctccatcattggcattatgactgtttaatacttaccagcatcctcagatgctctacaatataagaaattaggtgcagttctgtttgtttaagagatgcaagtcttgtcattttatcgataggatamtttttagtatttgatcattagaatgattctttgaattgctttacagcatagtggtaaaatggatgaaaacagatttgtggcagttaccagcacaaatgcagccaaaatttttaatctctatccaagaaaaggaagaatagctgtaggatcagatgctgacattgttatttgggacccaaaaggcacaaggtaagtctaagttcttgtattccttggcttcattgtggagaaaatgcactaacttgcacagaaataatgctttggcattaatcagccgcttctccttagatgacttctttagctgtgctcaggtattttgatcctgtacacaagataaaggttttgatgtgcaaatattcctttgtttttcttggcatagaggatgtagaagttgtgttgcattctctgacaatggatctgtatataaaaccaatatgaatttaccacttcagtgcctggcaaatgcccgagttcacatggaagaaaggtaaagcgtgatgaaggaaataaaaggcttagtttgaaaagggttgaattgaaaactcaaaataattacagcctttttaaagctttcagatagaaaaattccagcacaaaggatgtcactttcagttagccaaattttccagttgagttcatcttcagcctatcattcctagtagattccagctttttgtttccaatttccataattctatgttaatattgcaagtctggcaaattccaccaactcaggaaagcagtcaatagagactggagctctgttattgtctccttataggacgttagtacaggcaacacctgcagcctgatttgtgtttttcataaattttgcagtcgtagtggagaaaatcccattaaatgctttaataatctgtatgtatgtgcacttgcgtggacttctgcctcctcgtacaggcatttgttcaaagtctgttagggtttttattgtagtaagaaaaagtctacggtttcttgggctaatattgtcacaaaggcccagcttcaattgaagtgctcctgggttacctttgggaaaacgatgatcatttgaaacactaaggtaccatcactataagcctaaaaacaagccccagatattcctataggaaatccttgtttttttccacttgacactctctgggcacccactgttcccactcagggaccagttcacatggttggcaggccgtagtcatagcaagcaagcagccttcagttaaacacttcagcatatcacctcatcactggttaagatccatgcaatgccataaagggtggtatacacatcttactcacataagtatcttaagataacaacaagacatggttcaaggtctttcttatgttaataaggaactattgcccatttaaggactaaatatctggttgcatacaaaataattacatgcaaaatgaagacaagtaaaaccaaatgtaggcagcttctctacaaagctagaaaaattgtgcttggaaaggcaatggaaaaaaaattgcttggattttgcttgttctgtggctgaattgagcatgctgtgtttagagaactcctgatatttaaaatatcactctacagcgggctgctgtacacccagcaggggcctgcccagggccatcttggctgtaattcaaacaatttaggctgcttcaagggctgggaccaggcagaccttttgaaataacttgtggcttaaggagattgtgagctttaatctgaaatcctagaaattttcaaaagggagaaaactattctgtaaagaaatatttctgaaaaatggtgtttttgaagcataacatcagggagcatcatactaatgttaatcatcagtaataatctgtacgtcacagctctcgtgggtttttaaaatgttttggtgccttaaatgtaattttaccaggaaagacaaatattgattaccttatgacaatgagaaaacggtagctgtacaaccgtgtaagtgacaggtttgctatgagaaccctgacctagtgactttgacttcataaattcagatgtttcttcatgagattcagtaccaggctgtctgatagcaaagcagagcactttataattttcttgatttttcatattccatgttgtcttccaatcaggtgggccaataactaaaagcatttttggatttgatttcattctctgtcattctttatcaaaggtgagggaaaaaatgaaaatactttattgtgtggtgagactctycagtctaattcttaataatatggagaatctcaggaggccatttgatgtgcttcttcttttgaatcctacacctgagtatctccaacagggcccagcctggggagccctcgtctgccgttttaatttctagggatgacaccagctcaggggtagagcattgtcttccctagacaactggacaaagagagatgacctgaacctaaggttgtgaataattcacttgctttatttaccacatattgctgcttggaggatatttataggctgtgattatgtctctttgagtcacgttttagactatataaatttagaccactttctcacaagttttgctactgatttctataacattgtcttgcccttcctttcctattcagttgtttcagaatagcacataaagatccagatgtgtagattttttttaaaagatctatatatattacctgcttaatttccctcatttctagtctaagaataactaacttaaggtcaaactaaaaagctcctatgtttttacatttctttctattgctttctctcataagttctttcacatttcttttttgtttgtttgtttgtttgagacggagtctcgctttgtcgcccaggctggagtgcagtggtgtgatctcggctcactgcaagctccgcctcccaggttcacgccattctcctgcctcagcctccctagtagctgggactacaggcggccgccactacgcccggctaatttttttgtattttttgtagagatggggtttcaccgtgttagccaggatgatctcggtctcctgacctcgtgatccgcccgtctcggcctcccaaagtgctgggattacaggcatgagccaccgcgcccagctgttttgcatttttgtatgatttccatccttcactttatgaaggacattatttatcacattaatgatcaaatatatttatcacaataatgataatagaaaattaaatatttacatttttgtatgtgtgtcttttgggagaaagatacatattctgcattatcttactagtatgaagccttctttatctatgtctgctgattgtgtacacctcggtgccagacataaggaaaaccagcataggccccagagcctgatgtgtaagttctggtcccagatccatcgaaggccatttaaagtctctgaaaatccactctctcatatgtaaaatgtgatcattaagaattgttatgcctacctcataaagttttggttagaatcacatgagatacatgtgaaaatgctttgtcaactaagaacgtgttacacaaagacaagatatgtattattatggttattttctatttctctagtttgactagtttcattctttgcaggacattttcatttttagatgttcttagctattttgcctgtggtgatcagaaggcagatgaaccatggggttctatttctctgactctagatccttttaaaaagctggtgacctttttgtctttcttttcttgttttatcgtttttttttttttttttgaaaagtggaaaaatattctcagggtatattgaattgattgagcctcccttggatttctttgacttatttgacttactctatatcttgcttctttactcctctaatttaacattttcctctaaaccatcatcagaatgtttttgcactatcattattcatttttttcagttacagaatgtgggaaaaaggagagaagggggctgttgaagaggaggcttcatagaataatgaatctggaagaattcaaggagaaagcgtgtttgttgtggttcacgttaaaagagagagatcgttgcagaaactgtatgctgagcccttrtctgggtcgatcacagcaccagctttctctattcttggcctggttgttatgagaaagttgctcatctgggctggctgttcccgaccaaaatttatgctgatgacctcaactaggacctttctgaagtgcaataatatttttagccttttctaactgtccatgaatcatccatagctttccactgtccttagacactacccctaccatcgtcactgtctgcctcttctcaccttgcagcccgagttctactgaatccagaaaacccacttacaatcctgtaccacaatctgtcttccttttctttctcattaatattcttgaggtctagttccattttttaaaataaatgttttattttagaatattttagatttacagaaaagttacaaagatagtacaagacactcctatgtaccccacagctggttgccactattattatcttacattagtatggtacacttgtcacaattaatgatccaatattgatatgctattattaactagaatccatgctttatcatatttccttagtttttgcctgttttttcccttccgggatttaatattacatttagtggtcatgtgtccttaggctcccctgacttgtgacaatttctctgactctgtttttgatgaccatgacagttttgaggaatatcgatcaggtattttgtagaatggcctctgytgtgattttcctgatgtttttctaattataagcttcgggttgtgggtttgcgggaggaagatcacaaaagtaaagaaccattttcatcaaaagacatacggtgagcacgacttaccactactggtgttgacctggatgaactggctgaggtcgtacttgccaagtttctccaccatacagctgttttccccacccctttccatgttgtattttctggaaggaagtcaccatgtacagcccatacttaaggagtgaggagttatgctctcgatttttgttttaattgatcctatttgacgtgggccagttcggttcagcatagagaagaagcacaataaatgttgaacaggtgagtgagaaggatgcagccttccacacggcatggaagatcggcaggactaagaaacagcataaaggaaaattagaaagattttattcagcactggctatggtgagaggaaaagtaagaatagcatcttcccatttcatgctttttacttactgcatgtgatcaatacatgactgtgttagaagaatgaatggataaagatgaatttaagtagaaaagattttccaaggagaggaggaagaactgtctcgctggtcttattttctttaagtgccccttcattttttaggttggagcaacgagtttgttaagcagagctcttagagagatgaaatgaagccaaaagagtcacctttgtgtgttccttcattcacaaattcactctgcacaggagcacctcggcaagccgcaggctgagggtcaagcttatacaacagccacaccctgcctttaagaagctgacagtctaggagaggagaggagatgtaaagtcaaatattctcagcctaagaagggatgggttaagaatatcacacgagaggcagaaacaagatgccttagaaattcaaagaagaaagatcattgtggagttagagcagtcatcgacatgaaatcgtacgagagaggtgagtagataacgtggccctgtgagtcaagactaaacatggaggtgagataaaccaaggcattgacagggggttctaggaggaagcagttaaggctggggattgcactacagagagaacagcttcaggctgtagaaggaaatgagaaggtgaagaggttgtggctgtctccacttttaattgtgtttatcacagacagaggcaattttaaatagagttcaccttgtagagaagtgttatttaatcaaatgaataaatgaatatatctatacggtttttttttcttcttgcaatgaaggcctcccttttaaattttacgtgcctgattttaacattaaatgcaggctggtaatgtgcaggatttttgtctcacaccattagatgttggcccaaattttcctacaaaatttccttaaacagttttagcaaaaataattgcccagccgtcttgttagtatctaacaggaaagcaacatgcattgcaccctagatgctgaagggggcgcccgcagcccgagcactgagctaggctggctccagccaggccattcgagctgctggttatgcaagaacaagccagcctctggagaacggatgcatttgctaaagatttttggcttcatggtacatagatgttttcgtttttaaaattcttgttacttattaatggcatgtagacgtaagtatgcttgccacacaatctgtagccttaaaaatggaccacgttaaagttaccaggggagaccagtggaaagaaaagcagggcagccatgcttattttttccttttaaatctgtaaaaagtgagatgattccaaggtgaggaatttgacatatggtgatggatggcgagagagaattgggagtgggcgtagtagggaaggtttggacatcctgatgaaagatyacctaagacgtcactarcctgtaaaaagttcctgcaaaaatcaactgcaatagctcttctgtgtcattgcacaataaagaacaaactgcatttagtgtaaagggagcattcacctttttcggaaataaagagcctgctgtattcagcctgacagctcattgaactggtgtctattgcttatgacggaagtatgtgtcctactgcttcactacttgggtcaaagtttcaaatttaaggacgttttccatatctgaatgtctgacccatttctgtagaagatcttggtacttagagtcaggagaagaaatcaggaacatgcttttcatgtgatgtaaagacagaatcttgtggtgtcatgtggtcaagacagagatcagccaaattggccaacttgttaaaaatcttattagagagagtgacatgtcagttacttgcaagcccatagctgcagcagtaagtcatgttctggcaatttaaaaccatcctcggagcttcagttctttggtattcattaaatagcacttagttactatggtaactgtcccttttcagtatttatgagctacaggatatctcacagaatctcaagcacacaaacacacagctaacacattgtgtgtactggaacatttaatgaagacttctagctggaccgtattctgccgagcagacatattttcatttattattttttaactcaattatggcaggctttgaccttgaatacaccattcttgaaagcattgtgccatctttcttgcttaatttccttccttttctcattgaagatagagataaatgaatttaactttatattcagtgaagagtaatggcttgcggcttatgatggtgcccttctggattctagagggggccttttgtgtgaaataaagcgggggaagaatgactgtcatccttgggtagtagggattgtagggcgtggggagggagaagaaaggaggagtcaggtaccctttggcaaagagtgatggttatggcttattaggatagctacatcaccagtgactgtttcacagaagctatgaagcattttcccttgaagttgcacattgtgtatcctctgactaatttgtgcgttataatcctcctcctcttcctcaaagaaagcgtgcacacacacacacacacactcacatgcacatcagcacagcagcctgtgttcctgctcataacagttgatcggcctaaagatgctgcttttcatgcctgtttctaagagtgtctgtcactaacgcgcccgccactccccacacccacaagcatcccagtgtgcattgtgtgggtcttgtcatgggtgcataagtggaaatgaatatgatttatgccatgatttgtcactgtgatgtcttgtaacacaatatcagggctgtaccatggtgtcagggctgctggctgaggtggttcaggttgtgcttttgcaaagttacaggggcactcttcacatcatagttaccacagatatatgtggatagataggtagctagatatagatacaggtagtaactatgccagttttctagcatatgatagcaaagcaccttgaggaacaaatatctgttgctaatccacacaaaatcaaacctgccatctgggctattgggggggagcagtaccatagagtgaagagaaaggctttggtgataaattcctagtctgccacttatgagctgggtatgaccttgggtatatcatttaatttttctgaatttcaatttttttatttgcaaaatgggcatgatgatgatatttatttcctagctttgttgtgagttttaaggtagcgtcataagatgcttggaacatagttagtgttcagtagcagttggcatgtagtaggtagtcagttagtggtaatagatagtagtagtaggtggtcagtttgtgaaatgagtgggagctcttattagctatagctgtgagtcagaaatctttgtataatgacttaattcagacaggaccaaaagatactataattatatttcatataaaaactctgtctcccaggtttcttgcacacctttaattttcaccactaaatttcagaatgactaaaattaagaagcttggatggattattttrgctaagatagcccgagcctccagaactgacaccttttaaaaattattagcagtgaaactgttcaaacaaacctcctaagattcattttgtggccttcagaagacatttgctttaaaaaaaaaaaaaagtctgggctatgcatgaaaaaaagctaacattgttgattacatatgcatacaattttaaccactctttattccaagttgtttatttaaacatatttttatgcaactgaacctttcaagtgaactagaaatgatttctagggactttactactaataactgcattttcccccaaattataaaagaaaagcagcttagaaatgaatcacagtaacccattctatcactgatcatttggcttggccagagtaagcagtttattttcagcattagcattgggcaaaaaataagcaccaagcgaggctgtgtgaaaggcataggctttcctaactaagcacctgctgtatttttcttcctacctgacatagattctatgtttttatatctttgacatttgcttgtattatttacaactgtatccctaggtttaagcacagctccaggtatatatagaagctcaatagtcatttgttgagtgaagaaaccagatactawtggacaaatgtgtgatttaacatttttgtctgaactttatctgcccatggaactggttcaagagccgtgttttacattcttcccccctttgaattaaaaagaagagaattctcagcacttctgtcttcttccccaaagcagtgcttgacaaagatgcattccagagacagtggctagttagtgtcaccagacctgttcgtgaatgtggtttacaccaggtcagatccttctgtgggtcaaacaacactgttttttggactcagactcatctctaattctggccagttattttaaaattatggccatcggttatggaggaaacagaggacagagtgaaaatggctgaaaagaaatttaatatcagtatctgaaaagaatcccagggtccttatatkcttattgtacagcaaagaaccttgtcttcctataaaggccttagaagaaatcacctataaaagtggtcccctccctctagaagactacagtggaagtctatttggaggcagtgagtaattcaaggaagggcctgcattttaatggcctgaccaaaacaccaaaaaacttaagttgatttactattttttttttaagagcagaggttctcaaagcatggtttctggactagcaacatcaacatcatctgggaatttttcagaaatgccaactctcagaccctaccccagagctgctgcctcaaaaactcctgtagttggttccagcaatctaggttttcccaagccctccagcggcttctgatacacactcaagtttgagaaacactggtttagagtcataaaattagataacactttggaactaaaaaagtccaattagcgcccccaaatggagttctctatacctttgcttgattgctgctagtttcagggaacttactacctaaccaaacagtccttttctttctgggatgcctgtaatkakgaggacattsttcttctggttgcattaaaattatctcctcttagaccttcacatgtttagcctttggaattatgcagaatatatctacattctcatatgatagtcctttcatttattcattcaaatgtttgaagaaagttactggctcccagtaagccttcccatcaccagatatgsattcccaggttcttcaccagatccttaggcccatgagtagcaaaatcccaatcacctgacctctcctgtatccacccttctcttgacacacacttgtccatgtcctgcaaacatgtgagtcccagaactagacatgttcctgcctgtaataccatcagagcaggaatatctgaggctgattagttttataattaaatgcagaactttgcaattttttaaaataacattttccttgaatacaccttgtacatccaaaacagtaattgtgagcaattgcatgaggtttgaatatcttaccacatttattcagtgagtaattaaaaaacttatattgggtcttctctgatgtttatgttaaaatgactaggattatagtaaatggctggtttctgtgttttaagtctctttgagtagacagtaacttacaacgtccataattttttwaaaaagtacaatatttaatataaacaaaaggtacaaagagtactatagctaacacttgtgtattaaccttcccaggcctgtctccttcctcatctcaacaactacccaatttggtgtttatcatttccatgcatttctttctatttactatatatatataggtgcatttctaaggcatgactatatatttacataatatatattatatataatttttgtgtattcttagcttcatatgaattgtactatatgtattgtgcaactttctcaacattataattgttagatttatctatgttgaaatgtggtttttttattttcactgctttatactattatgctttatgaatataccataattgatgatatattcttttgctggtggacattcaggttgtttgcaatttttcactatttyagacactgtatgtctttgtatatatgtgtgagagtttctctggggcattcatctatcccctggtttgttttatatgaaatgctctcacattttctcaatagaaacgtataaatttatgggcctttgcaactaaatgcagaaattcccatttctctctcttatgcttttatcttgttccacattcatttattcagccattacaaaccatatcttgggccctaccatgtgccagagacatagtaggtggtggagacaaagtgattaggcataatcccattctttaccagggtggtaagggcatggccagcagagaagtggtrgcttttgctttttgccccagttgtcttttgaattgtgattctgatggtccaggtacyagctctcactgccagagtaagcccaccaatcagacagtgggttctctgaccagatctaccacaccagagccacagaaacaaagctggtgggccctgcaaccctggcaggggtgggcctggagctggaatatgaatgggggaggaagtgaagacaacaaagctccagaccccttccagtcccctgaggygacacagccgaatattcacctatttggtgacttgagtctgcacgtatttcatcattctaaccgcacacacaatgcttgaaatatataatattggcacccacccaagacacacgcacatagacatataactgtttcctattaatcagtacctctctttatagccacattttcacaaacattcgcattggcccttgattttctgagctcatcacatagaagctaagatctgtgaatctgaggttagtgctttctttctgtgctccagggcaacagattgcgcattctgtccttggttacaagtgtgcacttggcaggagcgtggcctgcatccctgcaaatctgccaacgctcctggacatcggtttcaagcatatcctgctggcagtggggcttctttgaacaccagcagtcagttgacttctaagtttaaaagatttcatgtacctgcagaacacttccttggtgccctccccaaaaagtggcctgtgcaacccagagagcacatgggaaggagagtcagagtacattaggtttatttcacaactgcagctgcagtcacattaaacttattgcctaatttcctttgtctaacttgatttctctttggctgggaggcaaatagattgatatttttttttatgctgaggttatgttgcctgaagaaaattttccattggttcactatgcctgcctttagtccagtaaatggggccgcgtgctgtctgggcaaggaagggcctccccagatgtgctcttgaggccagctgtctgcgtggaggaggcacctcctggaaggggtaacaggggctgcccctcccatgaggggtattgctgagcatttgtgctgggctctcagctcatttctctggctgtcttctaataaatagctttgttttattttttcctttcctgtgaagtccttttctccctatgttttctctatcattttgtatatttgcaatgctctttccctctccaaaatttcttaaaggtggtttcttcacgtttttgttatattttcttcccgtgagccctccactatcatcctgtgctatgattgtgcccttttcttctcaccagagaagggaaatgttcttactttgctctcagttctgtcctcctaccaggcatttatttaagagagctaagtttctggaggcagaataatgagaaggcaatttacycacaagaaaaacaaatggagcctttatctgtgtagaaggattgctgaattcctcacatggtggaggcgagggggatgaggacaatgttaatcagttatctgaaaacatatattgattgcatgttcattgtgtgtaagaaatgtgtgagaaattactgagtactgagggagacataaatataaggtgtaatacctgtcatcagagaggttgcattttggtaagacaaagatataaacatagtgaaggataactaagttttggaagagaaaaatatcagctcaacacatcagtaccagagatgaaggaggtctcacgtgctggtctccttgacaaaggagtagtccaaataattgtcctaagttgaggtcrtctgtgaagacttcacagatgactggtttgggcttgggaaggggctttgcactaacygaatccttggaggtggctctggacaggtggatggggacagtaaagccatccagatggtggagtcaggggcaaatgaggaaaatgggaaagatacagtcrtgggataataaaaactggagaatgagagaggggtcaggatgggaaggagttgaagatgagatttgtccttgtcagactgccaagggctttgaatgttaggtgaagtatagcagattttatgtgaggcagcatgagctattgaatgtctttgagtgagggtttgagttgatccaaatctgtgcttcccaatttgcctggcaccagtagaaaatggtgttatttgtagagtacatggctgtaaagagaaggggctttggagatggggaggaggatgtagcaaaaccaactcaccctggtttgcctgggactttcccagttttagcactgaaactcccatgtccttggaagcgctctcagtttaagcctaagctgtgaatgtcactctaggaggttgcttttggtcaaaggtgttggcctaggatctctacacctacctggtcaccctagagtctgagggttttagtcttgtgtctaggcctgtcggctggggaaatctgactaaatcgtattttagggtgatgagtgtgtaggatggattggactcacagagaatggtcaggaggctattgtaggagtctggccggaggggataagtcaagatgaaagcaaacaaaatgaaggcctggaaaatgggggaaaaaaggagttaatttaggttggtgaaaaattggaaatggactgaaagagaggagtcagaagtgacttcaaaataactgcagccttgctcatgtatgaaccaagcatttatcgagtgccagctggatgcaatacattgtactcaaagttgagtgaaaaaattattaccctaagggaacttaggatctaattagacagataaggaacaccccaagtaackcaaataactataatacaaggtaaaagattaggcmcaatggttaagggacatggcatttagagccaaattaggcaactgtatttaaatcttaactgtgccagtactggctgcaggaccttgggcaagttactcccctcttcraggctctttcctccccagtaaaatgtagatatgataataattgtagcaacttttggggcttgttgagaagagttaatgcctttaatatggtgcctggcatatagtagaactttaaaaaccattaatatcatgatcatgtatcaagtgataaagcactagagagttatacagtagtagggagataccaaagtaaatgacttttataatgtgggattctaggaaaaaaagcttagaaaaattcaactatcccaaatttcagtttgttttgtcaatcacagtttcatccttgtttatacatttcctgtcctgcatatttagtttgtatttttttaagattttttaaattttatttaattaattaatttatttctctgtcacccaggctggagtacagtggcaygatcttggctcactgcaatctctgcctccctagttcaagcaattgtcctgcctcagcctcctgagtagctggaattacaggcgtgcaccaccacgcccagctaatttttgtactcttagtagagacggggtttcactatgttggccaggctggtcttgaactcctgacctcaagtgatccgcccacctcggcctcccaaagtgctgggattataggcatgagccactgtgcccggccctgcacatttagtttgtgactggcatgttggtgaggcacagtggtaaccacaattttagtagaatgccccttagacatttaattgtacagtgccattaaacatgtgtggccgggcacagtggctcacacctgtaatcccagcactttgggatcacgaggtcaggagttcaaaactagcctggccaacatggtgaaacctcgtctctactaaaaatacaaaaattagctgagagtggtggccggcgcctgtaatccgagctacctgggaggctgaggcaggagaatcatttaaacctgggaggcagaggttgcagtgagccaagatcatgccattgtattccagcctgggcaacaagagtgaaactctatctcaaaaaaaaaaaacaaacaaaaaaacatgtttggaggatccaaatgtattttagaatcctttgattttaaaggcactctgtctgacagcatggactagtggcctcaaggaatgactctgtatataatttttttaatgttaggtccttaatttagatttcatagtaatgggtaatttaaagctttaaaattttttgctatttgaaaacttaaaaccaaatttcttgtttttccgttgaatggattactaaaagaaaattactgtttcaaagggtacaatcttttgatacagcacaatctcttgctcttccttttatttttgctacttttgcaggtaaaaattgttacctttcagctatgaataacatacatttgagcaataaggaaattgaacactttttcatgtttattagtcattgaggtttttttcttatggagaaatatctattcatgccctttgttcatgtttcttttggtaacataatattatttgtgtctttatttaaatggtctgtcacatttcttgcaaaatccctaaggcttttttgagaaataaatgctacagttacatgaaagtgttttgtataaactgtaaggtactacaagcatgttactattattgaaacattgactttgttcactaaggtatgtcagaatcatatttataacaaagagattcttccaaatgcagaaatagcatggctagggtgtgagctcagatttttatctttgttcactgctgtatccccagcacctagaaccgtgcctggcacggagtaggtgatcaataaatgcatgtaaaatgaatgagtgtatgataaacccattgaatggtagggattttctacattcttccaccaagatgactttttttttttcttcctgtcttaagccagaagtgaaaagggttgtgtatagttcgtgggctagagctatggaattgtggtcttaagattctggacataggaaacccatttattagaacctaactttctttatggtaatattttaagcctagttagtatattattctccctcatttaagagagaaaccagagacaagaagagtttaatgatccaagaatgattttcaacaatgataaaagactaagttgtagttttgtttttaatatagcagtgtttccaattcctaaaatatggcaaacgttgttttcttctcctctcatgcctcatttgttgtttttctgttacctatgagaataaattgtatgcatggcctaaaagaaaacatgacaacttgccttcaatggattcattttttggttgcctatttttgggtaaaggttttgtatagaagtttctgctaatgagtataatctcctatgtagacctaaattccactactcacaggtacatggtaccgtccttttttctaatgttttcctgttctgtttttatccctaatcatcctacctcctgttatgttttccttttaaagtactttagtatttctggaagaagaggggttaaaattttatataaatgtgcatttagctctagacttgtgttctggatggatcacttatagtgagagacactatacagtggttaagcacttactatttgagtcatatacactgtgaggtgagttacctggcttctctgagcctctattgctccatttataagtatgaaaaaactctgcttccatagggttaaataaaataatgaggattgaataaaataatgtatgaaaaacttctcacatagggtttagtagcatgcagtaaatggaagctccaatggaatacttttccttattagcatcgtattcataatagatggccttggccatggcttccaaccactgaagtgctattagtaaatgtaagaaaaatgaagtgaaaatgtcaagggtgaatgcttttggaagcaaaacgatcaggaaactattccagaagtaacccagccaggatatattagtcagggttcaatcagaaaagtagatccacttggatgtctgtgtgtgtgtatgtgtgtgtgtgtgtttatacatatgcatatgtgtgcatatatacgtgcatagatatacacatacacatccatatgtatgacttgaccttccacactcatagggactggactctctgcaaggctactgccttcatgtctgatgctggagtctgcaggccagagggcaagtggtcaggaagggaagatggaggtgaagtgggaagarcaaggaccaggtcgaaccccaaccatgagctggagccccacagggaaagatgaagacctgagcccgttcttgtttgcctttgccctgggtatgtggtgtgggtggctgcttttggtcatgaggccaaactcacacmcctggcccaggagttggagcaggtgaaggaggatccgggggaaggtggagcattgcaaacctgaccacattctcacactacgagatgagtcagcaggtatcatgtgtgcaaaatggctgctgcgtcacttccaccctccaccagagctctaggtatagatgccatcatcagtgcaggtaaccattttaaggagaaaacaacagaggttcagagaggttaaatcatttgtcccggttcacacatctggaaaggacagagttgggattcagagcaggcctggttgactgcagtatctagacttttaaccactgcagagcttacagcctcttagaagggcaggcaaggaggggccatttacagcacaggggttcatacttggtctctggagcctgactgcccaggtttgtaatctgtccctccacttactgacggtgtaacccagggggagttacttcactttggtttgcttcaattcccttgtctgtcaaaggggaatgattataatacctatatcaaaggctgagagttgatatatgtgaattctttgcaacagtgcccagagttttaagcaccccatgaacttggctgagcaagtcagcagatcccggagcatctggctgtggcgggcagctcatcatgccctcctgggcgctgctcccctccaccccctccagcatggatgtcctcaggcgtgctccctggtgaagctgagtcagtttcgaggtctgcagttctgcagcttttcagcatcaccgccttggactcagccttgtgcctgctccaggcagacagaggtgatgttacagtgactacattagcgccagctgattgtgcttcctagaagcagacaccttttagattggccaaagctcaaaccatacaacttagttgctaattgggaccctgaggctgagcttctagctctgacagagcctccaagatgctttatttcaggagtgtcaatgaaatgttagcatgcaccaccactggaagagatgattagctgtcaccaagttctcacccagatggaaagtagataattactattaaaattccagtgtaggtaattgtttgaatgagtgaagagtatagtgctttcatcctttgagcagggggtgaacactgatggctggagtactggggcaggagaatagagtggggtcagcgtcaacctgctaagtttgatttctggccctgctgactcaggacaagttactcaagctctctaagtctctgttttctcatctgttaaatggaaatacaaaggtggattgttgagagattcaatgaggcaatgtacctgaaagtactcggaatacagagatgcttcatggatagtggccacacccgacactgtggggacagtcattcgtgtccctctgccactgcaacttttagtggtcacttttttttccccatcccttttgttctcgctccttttaggtccttgcctgtcgtttttttttcttatttgtggctctctcacaccaagttttaggtcttccaattactcttcagagccttgtgttgttattgttgctttttgtttgtttgtttgtttgtttttgccactagagatattcagagcaggggaagagcaaactttttgtaaagagccacatagtactttctttttggctttgtgggccatatggactctgttgctagtactcaactctgctgttgtagtgcaaaagcagcaacaaataatatgtaaatgaatgtgactgtgtttcaataaaactttatttacaatgcaggctatgggccagatttggcctgcgggccatggtttgccaacctctggtttagaaatttgaggtcagactcctgtcattgaatatccaaggtcatctcttcagatggacatcctgatctccagttcacaccaaggagcctttgatgcctggaagsctttttgccttatttttccacggcacagtcttcagacagtgaagcatgaagttactttgttattcacaactgttactttgtttactcatttaagtttagaagattctaaacaaattccacttaaacacttagatcataagtggcttcatcaattcaaaaccaactgatggttttgagcagtgagcattaggtaaaacttcctagccttggcagaaatatataagcttagtactagtacagtgagcattgcatggttactgactgattgtctcaggtcacttccaaaacagcttacagaccctgcgttgaggttcaaatgagctgggaaccctttttactacatagatctgagttcaagatctagtttttccatgtgccaactgtgtcttaggcaatctcattcagccttagtgttctcatccataaaatagggataataataataataatagtattgatatcataggttcattgtgaggattaaagataaggctttaatgcctagctcagagcaaagaggccataaatatttgttatgcctattataagaacatgtttgtggtggctttggagtttctgagtgccccttcagctgtgacttgggaacagaatcaaaggcacttatgtttctgtttgccttgttaccttctcaggaaagctggaggccaggtcttgattcttaggattgcagaacttgaagttctctctgacttttaaaggagtgcttcagcccatttttgtggatttcacacaattctttagcattctggatttcatggttgtctggcttgactgtagactttccttctctcttttactaacatacctcactccctggttgtcagaaagttattttccagtgtcaaactacatttcctctgtcagcatttatgcttactcactcttttcatttccctcagtagggatggagggaaaataggtcatcttcttcctttcaaaaaaaagagttaagtttagaagtcccccagacatttctgttatccagcttctcttttccaacccttaaattgagagccctccttcctgtcttcccttcacagtctagccattctgttactggcggcagagatccttgctcccagagctcccaagatggtggcaggctgcttccaagatggtggcaggctgcttccaagatggtggcaagcctcgtgttctctgacctggggttcttggcctcacggattccaaggaatggaatcttgggccatgcagtgagtgttttagctctattagaagccatgggtcatggaagggaaccatggaacccagtgactagtgttcagcttgattagggtgaacccgggcactcagctgtgcaggaatacccgatcaggagcagcaatgggagccttgctggatcaggagtacagtggacaccctgccagatctggagagatggaagtcagcagtaggtctgtgagggtggcaaacagcagtggtggacggcaacaaacacggaccagaagagagtgcagttgcaagatttaatagagtgaaaacagagctcccatacaaagagaggggaaccaaagagggtagccattgccggcttgaatgcttgggtttatatcccgatcattgtccctcacgctgtgctctcaggcgatagatgattggctatttctttacctcctttatgcctaattagcattttagtgagctctctttactacctgattggtcgggtgtgagctaagttgtaagccccatgtttaaaggtggatgtgatcaccttcccagctaggcttagggattcttagttggcctaggaaatccagctagtcctgtctcttaattcctttttcttcctaaaatatggagctagaactgaacataccaataagtccctggcctattgtgtactttcgggaaggatgttgtgtgagttttacccagtgtatttctatataggaaactgacatcttttcctgctcaagttgtcctcatagtctgtcaagcaatgtcagcttgccaaagacaacacagcttcctgggaaggatgacaataaaattataagaccaagtccacacatcaccccagaaagttatttctaactctcaccagtattcaggctaatagcctagctttccaaaagctaataatcgtaccttacctataagtacttatctgtttaatattcataagacatacatcctagtatcatgctagcttggctgattcacattcagttcctgttccttaaagacactaaattatttttagtttcccactttctaaaaactaccgtatagaacaaggaatatttatgctaagtggaaatccagaaatttgctaataacttatttgcagataaacaaatacatatataaaatrcctctgtttgctcagtactgtgtgaggcataggaggtgaaggacatggtacctacatacaaggtcagcttgctcatgtctaaatccaatttatctcaccatgacctacatcaccatccatgacctatattacatacctccaaggacaaaatagcagagtgaactttattcctttaagtcaatgcttggggagcatttttataaacctgcattaagtattttgtcatctactgagcaccggtagagttccaagttattgtccaatttagatttaataacgtggctgaagcaattcccattttctcttctgcaggaggcgggtgtagaagtctcaatagagggtggaagattgatgggtgcagtgagtggcaactttgcttaataatgacaatgtacttgaagcagcaccatttagcatttccagagatgtggctgctttgctccccatttatataacttgtcacatctaagaaactgacagaagaggtagtttgaaatagacagaacacacacttagaaaaagtcttctatggtgattacatcaagaatgactggtcaattttggcttaaggaattcttaatagcatcctaaatcctttactgctaaacagaaaacagaccaagaaacatcatggagtatgaaacaagctgcttcctatttattttctggtggattaagaatgttttcatcaaccgcrtgctttccaggtagcttcccataaagctttcgaggggcagtattgtctagtggttaagagcacaacctctgaagcgaaaggcccaggcttatctcatatgtcatatttatatctcagctacatgaacttactagctgtgtaaactggggtgagtgttattaatctttctgtgcctcatcatccttatctagcccatgggrataataataataataataataataataataataataatacctacctcataggaagatgtcatgattattattgtttcacactgaatacataaggcatcacacaacacaatgtagagagatgaggtatatttttaaagatgccactaataatcctgacatgattctattaactttttttgtttctcatggcaacctggtaagaatctatctgttccaaggccaaagtgcctgagtgggagagaatataacagaatacctaaaacaagtcatttatctggggttggggagacccacattactctaggaaattctcttcctctccacaatgctccttctgaatgcatatgggtggtgttgctatctcctgcaggctctgcttcagtgattttctcatctgtaagagcacgcggctctttgacagaaagctatttgcaaagggacagaatgtttttctgcagctgtgatgtgagtggtatcaaagttattggctaagttggaaaatagcttaatgttttcagggcttctgcttccatatctgcttctgccttggagatgtgtataattgggactcagtaagacaaccttgacacccctctgcagcaagatgtgcctctttcatacaggcttaaagtgagcttgacaaagagtagcttttgccttggggcagagtgaccatggagaacatcatttctgtgaatctgctaatgagtcagcggccaggaactcagcctcactccctagatggtcaggcttccatcattctgtatccttcctgttgctgccagagcaggccaaaatcctagctgtccaatcagtcattagagagaatgtatttctcacaattgccactctcttgagctgctttgcgtttggtaaatttgaaaactatttagtaatgaatcttgaagctctttgcttttgcctacaaatgtagtgataacatctccccacatctgcatctgttctgcaggaagatttagttgaaaagatcttcttggttctttttgagtctcaggccttttgaactctgcctcagaaacatccatgggctcttcattaagggaattattctccagaggacaaggtgtctatcagtcagggactttggttgcaaaccctggtaactaacctgtgctcacttcagtaaaaacacactctgtgggaaggccatggggagctcacagatggaaggcacagtccctgctccagcttggaatgttggagcccagggtgaccccaggcagcttgcagcaggaattggtctgagctcagggatgtaccctccaaccacttttaattatttttgtcaccatgcaaaatattctaaattcctgggaaagagaatgcaattgcccatctcttggttagggaaaagcagacaaccatgcctaagggtcttgtcagattatctccaaagcaggaaagtagtttctttcttttttttttttttttttttttttgagacggagtcttgctgtctcccaggctggagtgcagtggtgcgatctcggctcactgcaagctccgcctcccaggttcacgccattctcctgcctcagcctcccaagtacctgggactacaggtgcccgccaccacacctggctaattttttgtatttttagtagagacggggtttcaccatgttagccaggatggtctcaatctcctgatctcgtgatccacccacctcggcctcccaaagtgctgggattacaggcgtgagcaaccgcacgcagctgcaggaaagtagtttcttaaagaaaaactggggtgctgacaccagaagatgggagaatggatgtcaaggggccaaaccacagttcttgttctcctgcatgtctcaggatgggatagtgtgtggggcccacttaaaagcttaaatatgctgcaaaagatacatgatgcctgctccaaatatctcagtgtcacagcaccctatgacaatagcgtattagtccattggctgaatatcttagagcctggatgtgggttttcttggtttttttttgttgttgttttttttttttttttttttgagatggagtctcactctgttgcccaggctggagttcagtggtaccatcttggctcactgcaacctccaccccccaggttcaactgattctcctgcttcagcctcctgagtagctgggattacagctatgtaccaccatgccctgctaacttttgtatttttagtagagacagggtttcaccatgttggccaggctggtctcgaactcctgacctcaagtgatctgcccgcctcagcttcccaaagtgctgggattacaggcgtgagccaccatgcctggcctgttttcttgctttcttccaagattatctcccagccttcaaagcatggcctgctcatcagatgacatgaggcccatcagctctgcaggggaggttatgtgagtctgactttggccttcacacctgcacctcagctgcttcaggagaagccactttgggcaagttacaagaacctgggggatgtttcattacagtgaaataaaggcatagggtgagttttgaaaggatgggtctgttcccatgtgctatatgacaatggccctagatgggtgttaagatactgtgctaaacactcacctctctccagggcctctcttagggacaatgcctggagggcagttgggttcagccttcacattcaagaaaggcctcaaatttgtgtttttcaaattatcacaaaagcagatttttctaaaagttccatagatacattgcaagaattgaaagaaaaagctgtgtcaggcagggttcttagctgcaatcaagagaaattcactctaaatagttaaacaaaaagggaatgtatcaaaggatactgggtggctcatagactctccaggagggctagaggagcaagctgagaggctgagcagccaggactgatgccccaggcatcccacagggcatcggagagctctgctcctgctcctaggcacagatactgcagatcacctcactgcagtggagctcagatcctgctgctagaatctctgtcacagctggccctaaacccaggattgacccatctctaccctccacatggattcctgtggtagctgcttcctgtgtcaccaacttgccaggcaaagtctggtactagggcatcattttgaaggagcccaggtcacatgcctgggccctagctgcaaagaagtctgggaagacatgtttttggcttctgccatggggagaattccccagaggaagtgtgttcaaaggaatgacagatgtccttacaaagatgtgtgactctgaacttgcgtttgttccaataatggaccacatctcccaaastgcacaacaaatgcatagattttaaacactgtttggtagtgatctgataaatcacgtgatgatattgcattgtatttttatgtttaaaactgtctataattaaatattgaaaatgtaccacaatttttaaaactttctgatggcagggttacaaatataacagtattctcaaaagttggaagtggtttctgcctctcacaagttcattcaatattaaactatgtgaaccttgggcaagttgtgaaacggcactatttcagcattatcatcttggaaatggagtaataatactgagctgtgtgcttattacagttggtaatattaaaattgccaagtatttataggtattagtgaacaagtatttcatataagctaagatgccactaagaatgatagttataacaattttacttatttattcattactaatcaacctgtacagcatgctagaaatgttgggtacccaacaraaatgggctggatgtttacctctcatttacttcagtgttctgttcccaaaacacagtcatgtcccagaagacagtggaggcaggaatttaaaccaacctgactaaacaggaggacaatcatgcaatcttttaatttgatcatcacataaatgtttataaagcacctagcatgtgctgaagctaaaccaacctagtctctgtcttaaagtgtgtaccaagtaggaaaagagagccttgtcaagagatcaatgtgataccttcagataatgctaaacgayggaggaaaatgttcagtttcaccccatgtcgtcagggtcagcttctagggaccagggttcttgggtggagttttagggcagggagaagggcagaagtgaggagggcctttagggaaaagacaacttcatgtgcaaggattcagaagtgtgaaagctcctaagattggagaattacagcttcagctggaaggaaaaagttgggtgacaaatgacaccctgtcagacaccttccaatgtgaaagtggaagcacattccttttgctgctggtgatagtgcctcaaatttacattttgtgttaatatgacttcatttacataatgacttaatataaagaatctcttagatgttgtctaattgtcctctttctcttgctaaccccaagtctgagaaagtcaacataatgaccttttttttttttttttggtatgaggcaaagaaatctgatttgatattttgctgtgtcaacctcattttaagatcacaacttacatcaaggaaacagtataacaagaacactgaagatacctggaatctgccatcttccttttcttagccacaaaaaaagctactttgtatattccctcttgtatttgcccacatgcatatatatttttctggtagacataatgtacatactctctatcaccrgtttttccattgatattacataattgtcagggtttttgcttcccagagtatttttaattctagtctttcataaatgcctaatattctataggatagactttggaaaatagttatgcttcagtttttaaatagtttaggcaacattgtaatgacaatatttgtgtataaagattatttcttctgttagatgttttccctaagagcttcagtaactcttaagaatttcttttttcctcccattcatgtacttcaaataaccatttcagcacaaatttttaattcattttactttcttcatatagcaaccttactaatgcatcagtccaaaaatcttctttatatagtatgctgtaatacaatcccaagagtccctcccatcaatataactgtgatgtgtaggaatgcagcagcccaggctatggaaatatttggcagattataatggccataaaaagtcttttcaccctraaggtttgaagcccctctctattgtttcctagctttattttctttgagtttgtatctttcatcaccataattcatcataactcattctatacttagtattcctttaaataattttcttgtttcagtgatgttatttaccacttgattaatacccctccatccttcttaatgtttgaaattattgtgtatttgtacccgcctcctgcttcttggtgattctttgacatttctttatatcaataagttggttcctaaggtcactgaaagctctttttttttttgctgcagcatacacttaaaatatgacccagcaatttcactcctgggtatttacattagagaaatattcatgcaaaacaggtacctgaatgtttataacagttctattcatattcatcaaaaaactatttagaaacaacccaaatggccttcagtgggtgaatgtatagcactgcggtatgtccatacagtggaatactatgcagcaacaaaaaaggagctattgatacacaaaacaaattggatgaatctcaaaggattgatgtggaattagataagtcagtcatactctatgattctacttatatgacagtcttgaaaagagaaaactatagtgatgaagaatagatcagtggttgccaggtgttagggattgggggagggcgtgactacagagggatagtatgagtctagggtagtggtatcactgttctgtgtcttaattgttgtgatggtaacacaaatctatgtatgtgtaaacattcatagaaatgtgcaccagaaggtcatttttattgtaaatttaaaaaatataaaaagatccaagtttccaaccaggtgcagtgactcatgcycgtaatcccaacactttggaaagccaaggtgggtggattgcttgagccttggagtttgagaccatcctgggtgacatggctaaacyctgtctctaccaaaaacaatataaaaattagctgggtgtggtggcacgtgcctgtagtgccagctacttgggaggctgaggtgggaggatcgcttgaactgaggaggtagagattgcagtgagctatggtcacaccactgtacttccagcctaggcaacaagagcaaaaccctgtctcaaaaactaaaaattaaaattaaaaaaaatcttagtttcatcaaagtggtcatatgtcctttggcaagtgatataacctttctaaatctcaatttatttttcctataaaatgtggaaaatactctctaccttggagaggcattctaaagatgaaataagatgttataaacgatctccctgacatactagatgctcctctttctcttttccatggcagctatttctcactgagagcagwttattttttattattatcatcaccatgcttttttacagctatttggctcttaggtaacagcctggagccactgagggtttcaagcaggaaagtgacatgatctgatcttcatttttaaaagacaatttgagcarctttgtggagagtggtaaggaatgcaggagggtaagaattgaaacaaagaagccagtaagaagtgttggggttgtccaggtgagagatgacggtatagactccagtgggagccatggagtggggagaggagaagcggggggtttattttgggagaaggtagaacaaagaagcttgatgctggttgaggggtgaggaaagatagatggtgatgtcatttactgagatgagaactcaagggaggagcaaacttgagtgggtgggttgtggtcarcattacaagtcaagaattctgtctgagcatgttgggattggaaaccaagtaagcagttagaccaaggaacaggccagtgttatcttgttcattactaggactgcagcacacagcagcgggggcttcctcatcagcccttccaaataaggctrggggaactttgagctgctcctccttagastcactcagccttgacgatttttaaaaaatktatctctttaatccattcctgagagggattgtagaaccttctaccagaatttagagtatgctattattctaagtgaagtaactcaggaatggaaaaccaaacattgtatgttctcactcataagtgggagcaaagctatgaggatgcaaaggcataagaatagcaccatggactttggggactcagcgggaaagggtgggaaggggtgagggataaaagactatacattgggttcagcgtacactgtttgggtgatgggtgcaccaaaatctcacaaatcaccactaaagaacttactcacgtaaccaaataccacctgttccccaaaagcctatggaaataaaacattttaaagaaaaaaaggactcagattatgctcatattagtcactgctgccagatttttttcttttccatttaatgagatttaaggaaaggaggcatgtagcattttcaaatacccagyctgaaagtcatcaatcgtattatgtaggattgaaaagtattaataaactactgagaatgatgacaaatgtatgacacagaatatgctaagagattatattccaacgtattttattatttctgttatcttcaaatttctagttttgctacagacaatgaaagaaattccatayatacttttccttgataactaccaagtccaatttgataactaccaaatagctatttcctttgggaaggcaggaacrggcatgggatttgggaaggggtattgaagaagcccccattgtatctataaaaagttaaaatttcatagagctggatatagggtcagtgtgttcatcagtcatctgcgtttaaaaatattttataatttaaaaatgaaaaaatgtgttgttaacatataaataaaaataattttaaaatctgaacataaaagacaatgccctccttccactcactccaccctcattaatcaccttaaagagtgatctcttgggtttttctctcrgaaaaatgtaattactttgtaatgaaatgttaatgttatgttctattcttaaagttacttgttacagtgatgaagctatgacttaatagagttgctaagttttcttctaagtcattcttcttttaatattttatatttatcaagtgagctggtgatgatccagaacttttttgttgttttcacaaatataggactatctcagcaaaaactcatcatcaggctgttaacttcaacattttcgagggcatggtttgccacrgggtgccccttgtgactatttcaagaggcaaagtggtatatgaagccggagtgttcagtgtcacrgcaggagatgggaagtttattcctcgaaaaccatttgctgaatatatttacaaacgaataaagcagcgagaccgggtgagtgtgccacagtgggatactgccacaagtcggactgtctcctgcttctggatgtctggctggttattgttggtagtagtggtgttgacacatcacacttggtttaatgtattcctggggtgtcaggattgatatgagagattagrgatgccagtttttagataaaggatcattattggatgcacgcatttccccttgcagactgataggtcagttcgggatttccagattgtggggtaatctggtgggggcttttggcaattgtgttagtcagggtcctccaagaggcagacaccaagatggataaaggtgtatgagttttattaggggaaacacctgtgaaagaaactaggaggtggctggaaaagattgggagagccctcagattgcaagttaagtctgaaaccagtaaagaaaagaaagagakaaaatgggtargagcatcctggaacaccctacagtctaggggaggctgaaaaaggccgtyagggagtccttgagccaagtctcagatctcccagctacaggccaggcccagtcattggctgagagccactgtgggaggtgtgacctctgtgtaaaagtgtaatgaagttcagaggtcagcagcagccccttgaaaaaatgtgctcccattagttgaagatctgcaaggtcagtttttatgaccaccagagcaatggtggagttttgggctggagaagacctaaattctctcttgccctcgccaccatttcctagctgtgttgccttgagcaagtttctcgatcctccttgggctcaattccctcatctggaaaatgacaacaatgtttccttcctaacaaattgtgacactcaaatgggtttttttttaaatgaaaggcatggcccaaagcagtagctcaccacacctgtaatcccagccctttgagaggcagaggtgggagaatcacttgaggccaggagtttgagaacagcctggacaacagagtgagaccccatctctacaaaaaatttaaaaataaaaaataattagccagccataccagtgcactccagcctgggcaacaggttggtaggaggtcaataaatgtcacttttgtctctttgctttccccttttgatgaccaaatctctatcaaagacccctgttattataaaagagatattggggctttcacacaagttttgtttagttcacacagagtttgaaatagttttaaaattttactacaccaaatacactaaaatatttgagaattttagatttaaaaaatctaaatttctggatatgggggccggggaggcaaccctgtgtcctcaatcccacatgggtccaatgggccagagctagatggcaggcccctagctaggaggtatttctggttttcacccagaaggcttcacacattacttgcctggccatgtagatggtagtgtttgccacccttggactagttctaaggcttctccctcttctttccatttttcaaatgtacctctccttttccagagctctctggctgtttttttgattcaattcatttggatcttgtagaggctttggtttctcctttaatgtcttatgaaaaatttttacttgtggattctcagagtccattatgcaagatttatccatttttaaacacttcctaaggctttgattaggtaawcaagttttctcacgtgctttaaattctcagaaaactgcagttctttatatgctgtatttatatgctcagtcaaaataggtggtttaaggttacagttaatatttctggggagttagtttataaatgttaacattaatgggtgacaagtaggtggtaactataagaatcctaggatcctcggtgtttctgaagatgtatgtgataaataacagcagcactaacatttagtgagtgcttactgaatgcaagacacactgctaaggtctctgtcactataataaccctgggagggagggaggtatttttttcacttaaaattagagaactggccaggtgtggtggttcacacctgtaatcctagcagtttgggaggctgaggcaaacagattgcctgagctcagtagttcaagaccagcctgggcaacatggcaaaaccccatctctactaaaaatgcaaaaaattagttgggcgtggcagcgcacccctgtagtcccagctacttaggaggctgaggcacgagaatagcttgaacctgggaggtggaggttgcagtgagccaagatcacaccactgcactccagcctgggcgacagagtgagactctgtcttaaaaaaaaaaaaaaaagttaaagagaactgaagcttcaagaaattaagaaatttgtccaagtcacacaagcaagtgtatggcagagccaggacataaaccctgcttatatgattccaaaaactttatccttaagtaataatagatgctgtaaattataaacattgagttaaatgaagtaatgaaggataagttactcagcgtttgttttgtaaagtctctcaaggaaaaaattaagttggaggcactgatggcagctgctgcattcatgagactgtagcagtaatctaggagatgaacatagagggtggatttaggatattataaagtagtaaaatcaatagaactggatgatagattatgtgacgcctgaagtggatccaaggtagggccaatcttggcatcagttccagttgcttccagaaggggcgctagactaacagggaaccctgatagaccatatttaaatgcttggctttgccttagtcttcttgtagagaaaacgttttgaggcagcagagatcatcaaatcactggtttcatcagttctcctttgcaaattgttttgtgatttttttggcagaattaatgccaactgmaatttttatgagttcactatcaattctgtgaattattttagtttcttagtatttttttctggtatcaaatttttaggcattttagtgcatcattgttttaaaaataccaataaatgatagttatcatgtgctgttttgagcactatctgccaagctctgtactaagtggtttatattcattattttacttaatccataaagcaagccaagtggtaggtattattgttcccattttacagaatagaaagctgagtctcagtaggattaagtaactttccctaggttaagcattaagtaaacctaagagccaggatttgtgataaggtctttttgattcccactgtaccactggacctctgtagagacaaaaaaaaaaaaataaaaggaagaaaatagtcatgaaacccaaatcatggagaaatgccttattcaaaaaatgttggtgtggaaaagatattaaataaaatggataaaatgaaatgaggtttgggaactgtctggagatggttccctatggcattaggcaaagacaacttacaggataaaaatatcacatgaaggttaagaaaaagaatcataaaaactctagatttttaaattcacatgaggttatcaaagtccttgctttggttttcatttcaaatattcagatttctttgtgagtggggataagagtttgagggcaagcaggaatagcaaatgctatttctttgcttatctgttgtccctaccaagaaaattaatcacttcctattctggactcccaaagcacagagtacagagtcacatcagcatttgtcagtccctgaactcagctggtctcctggctagagttagttccttcagagcagcatcttattcttttttgccagtacttggtacataggtggcatctggtaaatgaataaactgcacacagaaggagcaaaagctatagtttcagagatgcgtagaaggaaatttaactaaatttacccagcagattacccctgccttatttcaaatagtgggattatcttgtgagagcttgatttttatctatgattttattgcataataataaaatttgtcaacaccataccatgcagctattactgttactggatcttttgggaaatttcaaaggaaagagaagacgtttttatctgatttgacagctttggagaattgttaatttatgtattttaaaatgtagacagctgatcctaagggaaaatattgaatcagaagataagccatcaaactttatttgataaatataacataatagaatatatttcaacttcaacttcatataaaagttgtttaaggaaagaaaagcaaaagaaaagagggaggggaaaaatgtaagagcaacttggatgttcaagagaatcctgactgagcaaaactacatattattaattgtttacaaaaaatatatagctctttaagttaaaatggattacgtttcttgaatttttgtgtgtttagagtgttataagttccaacaaaatgtgaaagtacagacatttgttaagtcatctgtttttctctttttttttcagtaatagggaaccccaaccttttctggaaaatcaggatcacattgcattttatagagaaacaggaatagcttcatggagtgatgtatggtttcagaatactgctgccaaagcttttaaactgggttgtatctttgcaatgataagcataatttgccttgyagataagataaaattgagtggatggctgctttggtccttgagatgggtattctccatttctgaaataaccatttgtcaatgtctttctcaaggtggtagctcagagaaaataatttaagacatatcacttgccatataatcctaatttcttcaggttaatcactaccaatacaaggtaatacacatgctggagttggctcattttggctcacaagagacatatgtacgcatctgtgcccaactcttcattcagtggtgtcagtttggtagcttgaaaacagccagagaaggagtatttacaccacagaaataggcaggtgctttaagttagggctttaaggatggtgaggaaaaaggaaggtagagatagttgttaatatttaccaacacatcactacacacaggacactttctaagtactctttttcatgctttatctaatcaatcaacatccgttcagtaaatatttattgatcaccagttatgttccaagcacactttaattctttcaacaacccttggaggtaagtagtgatattcctatttcatatattaagaaatagaggctcagggagctcacatagttaccaagtggcagtgttgggactcaaacccaggtttgtctacctccaaagccaatccctttaacttgtatcactgcagtatcctaaccataaactttaatccctactcaaacaaatagccacccattcccccatccttatgatatcgctccctcagtctcccctctgcacagagggttcacttcctctcggactggcaaatttaccagaggagccagccctgaaatgagacagcccagctttgtagctcacagcattttgtttgtttgtttgtttatttatttatttattgcttcaaaatctttccctctcccactccagccaggatattttaaggattaaattgagatatttggtaaattgtaaacatcatcaaaatgccaatcttcattgttatagatcacctctgttgcacctagggctttctcatgtacaagtgattcacagagccctgggtagctcagttcaatgtgtgctgagtgccctctacattcaccaggccaggcgtggatttcattctcagggagtcactgttcatttggtctgcttgctgttgacccagcatctgctgtttggtatttggaagttctgttgtctttattgatattttagtatcttagcctccatgaacagcattcaatcattaatacctttgggattcttctctgttratcttgctaatttcagaaaatctagcatccagccaggcgtggtggctcacacctgtaatcccagcactttgggatgctgaagcrggtggatcacctgaggtcaggagttcaagactagcctggccaacatggtgaaaccccctttctactaaaaatgcaaaaattagccgtgagtggtagtgcatgtctataatcccagtttcttgggaggctaaggcagaagaatcatttgarctcagaaggcggaggttgcagtgagctgagatcgtaccactgtactctagcctgagcagcagagtgaggctctgtctcaaaaaaataaataaataaataaaaagaaaaaaaaaaagaaaatctagcatcccagcacattccatcctcagcagtcaatatgattaaattttctttttcttttctttttttttttttaagagtctcactcagttgcccagactagagtgcagtgggatgatcttggctcactgcaacctccacctcctgggttcaagcaattctcctgcctcagcctcccragtagctgggactacaggcgtaggccaccacacctggataatttttgtatttttagtagagacggggtttcaccatgttgaccaggctggtcttgaactcctgacctcaagtgatcagcctccctcagcctcccaaagtgcttggattataggtgtgagccaccatgcccagcccaatatgattaaatttactatcaacttatgtcttcctttttccttggtcatgtaaccaaaaggcatttctgcagttatgaaagtgtaatgataattggaattaatgtttatttatagaaccacaaattatataattttcatttctgtctctctattaatttgtcacaatgacaagtatcatcaaatactgagaactcaagttcaattctcatttaccaaagtaaaccaccgatgtcctgctaggtgaggtgccacctatgtcttttgtattacttattttttgtgcttgctgctataacagaatatctgaggctggttaatttataatgaacagacatttattggctgacatttcaggatgctatgaagtccaagaacgaggcgctggcatctagagagggccttcttgctgtgtcatcccatggaggaaggcatcacatggcagaagggcaaagagagaagaagggagagagccaaaggggccaaacttgtcattttataaggaatgcactcctaagataacagcattaatccattcataaaggcagagccctcatggcctaaccatctctcaaaagtctcacctcttaatactgttacaatggcaattaaattttaacatgagtttgagaggggacaaacattcaaaccacagcaacagcctctcatgtggttttaccctcaagccattttatttgattgtgataccatcaagatggaaagaattgctgtcaaggtgtgatcatctaatcttgaccagcatgtactggggggaaaaaataccataatcaaattagccttccaacagtgtgttctcaggacttgagtctcttgaagtattccttgagaaagttgtcaaataattttagatgatgttaccctcaggtgatacaattgcccaatatcataaaaagtttcaagaagtcctatagtcaagaaatctcccttcatttaataaatgtttgtagatcaccaggcaccattctagatgctgaggatataggcattaataagacagccagtctgatcacaaagagcttatattctacttgtttcaaactgtggttcatggtgcttaagttatagttgtgtttgagcaattttacacctctttgtgctgtagctaatgagcacaaaggagataaaggagtctggagatcaagagacatcaaagctggagataaaatttgggagccataacatatagatttaaaaccgtgagtcttaaggtcaccaaggaaactatattagagaagaaagggggcttaagatagagctctgggcccaccaaccttcagaggtggaggagaagagcaagcatcagtggagtctgagaaggctgaccagtgatgcaggaagaccatcaggagaacatggagtcccagaaggcgagaaaagaaacctgctgtctttgttcaatccagagtactctgtttcctcatcctggtttttctatgtgttttatgctgcataaatgtcctgtaagaattaggtatgcttttagccaggagaatagggatggagtctttattatcaccatattcatctgggatgccagagaaagaggctcactttattttgaccctgactgctagtgtcaactacatgcattaagcaatggctctgccatatgctggggtctgtgtcaggctgggcagttcctacttcggacagaggtttgccatcrtcattagagagaaggaataagacaaggattgctaagagttggaggttaagtctacttagaaaacaaatgtgcagctgaacttctgaataacagcagtgatggtttcagattctgcagaaggagtgccatcacttttccattttgtcacagtgaacatctagtgatgtcctaaaacatgcccagagaacaatgccagaagtgacagacagcacaaagatgaagaaggcatgagtctagccatcatagagcttatgtaacccaattctaaggatgagcaaatattaaaaggttaaaagggctgagaggcttgagagtagaacttaagttgtctttgatttctgtcaacttatctatcaaaaggaaagactgtggagagtgagacagcacaggactcctgacaggaggctgcttgtttctgaggtggccgtgcacgcaggtgtggctcccatccatggccattctgagaggaaagcagacctggcccacccagagcctcagaggcaggcaagagagagagagggtgcaggttagacccagccagtcgggtcagagacatgtgatggtcagcgtgaccagggtgacaagccagacatggctggctccatgactgaacagccagaaagcagtttgtagacagccagccacagaaaaagtacagcccaggccaggctcagtggctcacgcctgtaatcccagcactttgggaaactgaggcaggtggatgacttgaggtcaggagttcaagaccagcctggccaagatggcgaaatcccgtctctactaaaaatacaaaaattagctggccatggtggtgtgtgcctgtaattccagctacttgggcggctgagatatgagaatcgtgtgcacataggaggtggagtttgcagtgagccaacattgtgccactgtgctccagcttgggtgatggagtgaaactctgtctcgaaaaaaaaaaaaagtacagcctggagaacagataaatgatgcagcacaacaaaagagcctgacagaaacggagtcagcccacgccaggccaaaccacaaaaagaagaaagcaggcttagatgggaagcccccttcatagctccctccccaaaaatcccttctacccatatctattgagtgcttgttatgaagaaagagagcagcacaccggccctctgtctgctgggggagactgacgagtgaacagattattccagaaaccyggggtaagcaagatagtggataggggacagagggccaaagcttcctagactgatgattagctgagctgagtgataaaagagaagtcagataattacacaaaaatgaragcggcagcccagcccatgcaaaagcatggccctgaccggaagctaccaggaaggattctgatgtgcctggcctgggtggtgcctgctcccagagcctgcaagctgggttctggggaagcatcctctaggtgatagagcaggctgtagagcaagccctgttctgagtgaggaggacaggccctgtgtgtgatggccccacctgagccactggcatgggcagtcagttcccaagacggagtccaggacagacaaaaaatgaacagctgaaaagtgcaagtagtgtaggttcaaggaagtggtgtaggaagagggagacggaatgggatctgaggagggctgcacagcacacagtaggcggcacaaaagtctgctcagttaggtcacatgctccagaggcactcactgcaaaagagcctgaagattgaactgaaatatrccatcggctttgctgagtatgaatgccaagaggagcagagagaagtcaagccctctaggtgataggcaggaacgagctgaaagaaggacataaatcttggtttgctcagacgggcctggattatacttacgttaattatgtttagtgcccttttcatgctaagaagtgtcctactttggatgataaattgtacagtcacyctaggtttaagtgataytcaggcagtctggcttggaaagtcaagtcaggagaagaaaaaaaaaaaaaaaaaacagggaccaaggacctgaaagggaggatgtggccagagagtggggtattagtgagtttaaggtttcagatgtggtggtccaaggtggtagaaatgggaggctggcccttcatttcctggtgtctgtgttcctcaagatgagaacagggctcaaagactgagtagacagtgagccaaaatggaagtccagcaaagcatttagacagatacagaaagtgagcagaggcttggcctggtgagggaagggcaggagtccccccatttcctgagcactcagtgcacacccgatgcagtgcttcaagttctgtggctgcaggagctgtgggccttgttctgtgttggatcctcggtgtttggtgtactctctggggctgtgtgagctcagtaaatatctgctgaatgaatgaagaaaatgctttggctctggaaattctccactatctgagagataggtttatttcccccatttcatggatgaggaagtaggcctggaggcattaattaacttgtcagtttcctatgcgtagtaaatsgcaaatggagaattctaacttagatctgtctcacttcaaaggtcacactgttgatcactacaatgtattagtttgggtggtcaaaatgagacccacaataatttgttatttgtctgtgtgtgtgtgtgtgtgtgtgtgtgtgtgtgtgtgtgatttcaaaactctgctcaagcactgacagctctcgctgaatccagcagagggttctgctgcatagtcggtcaccaacgaggtgagattctgtggaagatccataatgcacagagacaggaaagtggaaagcgtacccaattgctagaatctgaagcaactgctctgagagtgttaggagaggtacaaagaagcactgcaaactcaggtgagtaggactgaaactagaagaaaaggtcggatgttggaaaggacagcaggagacagttgtgggactcagaagggcgtgaggatatggcagaggccccagtgagtgtccctgggcctctgtctgaggcagattaatacccacaaaaagtgggacaatccagattctcaaggttgccaggaatttcygtgaaaggccaaggggatggggaggcaygtgataaatttataagattctttttttaaagctctcgcaattcataaagggagctacacttaactttgaactcaagaaaataaaccacaagagagaaatgaaatgttctctttcagacttgcacacctacccctgtggagcgtgcaccctataagggagaagtcgccacactgaaatccagagtgacaaaagaagatgccacagcagggaccaggaaacaggcccacccctgaagtgtgtgccatcggtaagggactgtaggcaagaaaagtcttcctgcatgacagcatatgaaattagcatctctcctcataagggttgaagagatcaaggtcagaggcttcacagtgatccaagactcaaggacaattgagccaagggaagattgatcaaagcagaacatttagataagccttccagattgtagaaggccttgggcttgctagagagtcattctttaagatgttaggaaacattcaatacagccttggataatcaactatgagcaagttgcactaaggaggctgataacatacagagggaactacttaagacagggagtataatttcatggtcaaaatttacaaatgaattaggaccttatctggagaaatgaatcttcatattgtaaatacaayggtgttctaaaatttagaataaatgaaaaatgaataaaatgttgctttaggggatataatccttcagaaaaattctttgatagtatctgattatttcacagttagttttgggaataatattacagatacagtcatttttgcaaaagtatttgagcacttcatcagttttctctgtcttttgacatgcagatctttcttttctgaagtgcctcgtatcatcatccttgtcaattttctttcttcagttgtcttctggtcctgctctctcagatcctcatttaacagcggctttgctgtaattttagcatctccctaatatcacttccactgacttcatgaaatctacatgttttgccagttttgcaattttgctaggctcttaatttttttttaacgtgtgatatcttttcagacagttcaacacgtggccatctgcacaagacttaaccccagaggttgacctaatggacctggttagacatttgtgttaatgagaggcacagtttgacaacggtctggttttctacatattcaggcactgcaccttttcacattttgacaacctcttattccctgcataaatcctgttcctgcagggatttggataatgagggcttgaatggcaaagccctctgtgctacatgccatgttctttcattattgaatgttgtgtctttaacaggactatctagcccaaagtctcaacatttttgtcattttcagacgaccagaattattcttctaatctaggatgattttgttaaaaattcagggaaagattagcaagagaaaggaatgcgattcaatgctataacatgctattaatgacatttataggagcaggattagtgtttactttgattatagcatttcttgggggttaggtttgaattctgcatctctttgtgagggagaatgttacagtgagttcctttcattctcttcaaaggtaaaaaaatcagaggaaaggaggctgccattcccttcacagccaaacattgtcaacccatggagaagcaggccttattcaactccctaggatcctttagaaaaaattcaccactataggcttctttgattttctttcagaagcaattgctgtctttctcactgtgtttttgttgctgcataagattgaaggtataaatttatattattgtgatggaaaggctgtgtggaaattcattgatgatactttaaaatgtcatctttgcttgtactagatttcttacttagaatttttaaaaatcattttcttgtttaaatagtttctttttttaaaaaaatggttacattagttttaaaatagctctgtgattttactttttattgtaattaataaacattgagatcttcattttataccttattatctgatttatttgtatctccttctaactagtgggattgggattctaggaggttggttttcatttgagagcatgagtcctggccacgtctcttcagcaacttttggaaatctggtcttggaaaacccacctaatcaaattagatgctcaagtttaaaataagtccaaggcaaattatccaatcacaatgatgaattcgagatttgagggaattaaatggaatcagcatggctgaaagaggctgccttaataccttccttcccccacacttcctagtctatggtatgatccttctgtgtgtgcagagaaactaagcttagatttcttctcctaggtaactaggtcaagagggatttttaaaagatggaataaaattggggcgattatgctctccttgcaggtgcatctgcccccagcatactcacttaggagtatatttgcacatttaacaaagggtagtagaaattcagtttacccaattgtgatttgttttgagcacaaagagaaaggacggtgagctgcatctgaagaaaatccttctggttcaatcaaactacagctcttttttctcaggttaagagatacttcaaaatatttatttctcttctctgctttggttgacaatggaaagtctacaataagactactgaatcctgtcgaaagaaatatttaaattgctttcttacccagaagtcaattcccactcatcctttggtatttagctgtaatagcaccccactaagagccttacccagatctgacatgctcctccgtaggaggcccagcatacacccatcaccgtgccttatctcgttgccttataatagctgttctacttgtctgtctcctctaggaaactgaaagcttcttcaggacagggcctgtctggttcactattatttcaccagcatctagcagagtaccatgcaattgatgggtattcaatggatatttattaatattcagataagggaggaagtgaaggagttcctgttcagttctcaaattcataaagttagtgagaactctcaacaaaatagggacaaactttgtagaacattttcatgtaaggctgctttaaatggagagcacaggtcattatctatttgatagatctgttcgggagaataaaatagctataggattctgcatcaataaagacatttgaaatgaatgtggaaatccctttgttgcttttattagattttgtcgcaatatttttatggaaagataggtctaaataataatataaagcaacagaaaaacatgattcaagctattaatatttaataccatagttttcaaggctgcctcactatacaatgaaagatttgtcactaaacaattgcatttttaaggtctgcagaaagaataggtggaatgagtaacattctttttccatattccccttccattgcctccctcctcccctaggtactgtgatggattgggagggaaccatgtattcatggtggggcctaaacttcgctcctctatttactaacgatgaggccttcagaaatttttaaaactaaaatatgagattattgaaatatataaaaagcatcaaaattaacatgaccacatctctgaacctatcacccagtgtggaaaataaaactttaccaatacagttgaagtcccctgtgtttctctccctctgatttgccccttccttccccaaggtagccagtgtcctgatctgctgttttattccagtgtccatcatttatacatttttctttttttttgagacagagtcgccctgtcacccaggcttgagtgcagtgactccatctcagctctctgcaacttccgcctcctaggttccagtgattcttgtgcctcagcctcctgagtagctgggattataggcttcccctaccacatccagctaatttttgtatttttagtagagatgggatttcaccatgttggccaggctggtctcaaactcctgacctcaagtgatmcacctgccttggcctcccaaagtgctgggattacaagcatgagccactgcacccagcctatacctttgctatgtatgtacatatttcttttttttttaaattatactttaagttttagggtacatgtgcacaacgtgcaggtttgttacatatgtatacatgtgccatgttggtgtgctgcacccattaactcatcatttaacattaggtttatctcctaatgctatccctctcccctccccccattgttttgtatgtcagggtctccaacccttgggccatgaactggtgcacagcaggaggtgagcagcagacgagcattactgcctgagctccacctccctcaaatcagcagcagcattagattctcatagtgtgaaccgtattgtgaactgtgcatgcaagggatctaggttatgtgctccttatgagaatctaatgcctgaggatctgaaatgggatagttttatccagaaaccatccctcccaacccccggtctgtagaaaaattgtcttccatgaaaccagtccctggtgccaaaaaggttggggactgctgttgtatgtggttaaatcttataaatgcacaacatagtatgtattgtcttgattcctgcttttttgtagtcaacatgtttgggagttgttttcataggcctagctctggttatttactttattgctatgtaggattccatggtaataaccataccacaatctatgttggtattctcttgtttaataaacatttagattgtttccattcttttgctatcacaaacaacactgtcataggcatttctgtgccggtttcctcgtggacacatgtgacagctcctccagggcacatgccttcagtacaggggagtgggactggtgaatcctaaggtgggccctttctcgcctcacttaaatactggcaaattgtcctccaaagtggtgagttatgccctcattaagagagtgtacgagtttctgttgccccacattctcatcaatagcagatattgtccaatttactaattttgccattctgatccatgtaaaagggatcttattgaagtttgaatttgcatttcctgagcactaatgaggctgagctccttttcattgtgtaaattaattgatttttctaagcctccattttttcatttataagaggagaatgataagggtgtcagcccaatatacaaggacaccatgaggattacgaagcccagactgtatggtcaacaagtgctagctatgattactgtgttaacagccatgcagtgagttaataaatgatacgctaccaagagactgccaaagtcgactgttcttctctttctatggggaagttcaccatgctttgtagttccaactcctttgacagctgcaaaagcatggaagccaagaatgggaaggaggagtgagcccaggcacagggtgagggcgtcaggcgggcctggagagggtcagtgggcctgggtcccaggcactagcattgtgagctgtctgagaaggagtacagactgaaatacgggagcgggtagagcctcactctcaagtgacccgcgcaggtgcagcaggtcccaatgtcagcatgcaggccaactacggcaggcccttttctctccgttctctctctacatgatgcagcatcctgtaggggaatgatcaagagcttgttagaggctttcaagtcacaagagctggatttgaaccagttgagcaagataggtaaacttcctgagcctcagtttctctattgaaaaagtaggagtaattaatcatacctctctttcacgggatggttgaaaggacacattgggatggcacatgcaaagccccagctctccctcagtggtagacagattcaaccttgtctctttctcttgccccatcacgactgccactcttttcgttcccatctatccaatacagagccccctgaagggaaatatttaattaggttaatttttgacaaatgaactttctccctttacttcgttttggagaatatctgtgcacgagttaaaatttaaaaaaaaaagaaacacagagcgtccatcatttattaaacaccgactgtttataaaacacagaagcaaaccccttagtttggctgccactgctcctcaaatgccttgcacagggagtggcacaaagaagtgctcagtaaatccttgatgagggaatgaattaaccttgggaacagaagatgacagaggaggaggagcggaataattcatgaataaaaagtaacactatgacaaatcattatttgtgtccagggctcaggactccatttgtcttaagagccatcctagtgtgaatggtgattgtaaaaatataaatggcactggggagtggccttctgagactctgtgggcttaggtgagcttgcataaccagctgcagtagtgagaaagcattcagggctttttcaagcagtggttctttttttkttgttgttgtttttgccttataataggatgcagtcttcacaagaacataggaccttggctttttctttaacaaaacctataaatgtgctcaatagagtcttaatgaaaatatttattaggcccttattaggtgcccagacttgtgctaaggtctgtatagatgccatcatttaattgtctctgcagccctatgagggcaatattattattttattatatattattttattaatattattaataaattattatttattattttactactattattaacaaattatttttattattttatattattgttattatttaacagatgagaaaatgaaggctgagagaggttaagtaattgcccagaggcactcagcaggtcagtgggtggcccaggacatgaattttggtccatttgacttcacatcacccctctaatgtatctcttaatcaagattttggaaataactcactcctgaatgatgtacatcattagagctcgggagaaaaaagaatctgaacatcattagagctcaggagaaaataccaggagctcacaattattaagggctcacctaatgagccccaaacactctgcaaacattagttcacgtgatccttccaacaacaacatgaggcaagcactgagattatcctcactttatatatggtgaaactgaggcacagaaaggtccattaactgtaagttttcaggctacacaggatgacacggaaaggagtttccaaggtatattaagccatttcagtaaacacagtttccaagccagtatcagtgaaagtgtatcatctcatctctacagtcttgctaaaaactttctccaattactaatacataaaaagccaaagcataagaaatgattttctgaaatcagtggcagttatcatggaatcagacttgattccttatgataaatctagcattcaggtacggatgtctctcttggagcagcctgaaggttggttgttttgttttcttttaaacatcttattcaagagaattgaatccaaatttgatgtttttccctcttgaacccaaagacaagagcacaggtgggaaatggaggctggcgagcagtgggtgggagagacccatggtgccaagggcctctgagtgggctgcttctccaggtgggggtcgctctgctgctgagaaagtgccacagaccagtgggggcctggtcacgccggccctccagtcatccaaaaactgaacttgaagcagagtcaatgaggacacgctgttcctgggctatcccataaccatcagcgcctctgccaggggcacttcccatgatgcagtgtgggcttgactccaggaacccggcattagtcccggctctgcaccatttgcctgtggggctcgtgcaagttatagctccgctctgagcttccctgtcttcacctccatgggaggaggtgtggctggtggtgtagggaaggatacgaagcacaaaatctagaatcaaactgactgggttcaaaacttccctctgacacttgccacttatgtaacttagacaaattacttacatttgcttagcctcacgggtctcatctgt

SEQ ID NO: 93224 - DNA, 344099 bp, Homo sapiens
  misc_feature (1)...(344099): n = A,T,C or G
ttcttgacatgactttttcccaatctttcagccttgactttaccatccaagtcagtagaggcccagaagccttattttcaactttctgtcttatccctatgatctgagaaactttgctcctcatttaagtccttcttccgcttttgtgactcagtgactaactggagggtcatatttggtagtgtatctttgctgacacaacagccagaagagagtggtgtccctccccagccttctcattagctagcatagctcagatcacataaggctcctgctgggaggggctttcccggtcatctaaggcagcccctcattttacgaaagttggcaactaaatcccagagacatcaagtgactcacccagggtcacacagtgagccagaggcagaactgggactcaaacattgttttcttggcatcccacttggtgctttttctactctgccactgtgaactggtgctgccagcccagggctcagttgatggggcttgttcagctaaggctcaagcaggatgaatgcaaacttgaccttgttttttaatcccaactgctgtggtttgactagttgctcaaatggaaacccctccggccagatcaaccattaacttttgaagtgaatggagcttaaaattagtgtcaagagtttaaagtagggctcgccccgtaagctctcctctttacttacctatagctctctatctcagctctccaagcatctcctccagtgccctattttctgtgtttcctagtatcccatgggaaggaccattcattagggttaagcaatgccatctcctcttttcttgttgatatatcttggaaggggacacgtgtatttgtcccatccctcaatgtgacacagtggatcagaggctttcctcctccatgggacatgagccaggagagcactagagagacatggagggagggtgagaaaagactgcagataaaaaaataggatgtggcaaagccagcctaggacaaaattaggcccatagccagttgcctgtcattaagtatatgtgtgttgctactgtgaagatataacaaagatatcaaatcaaagacattgagtcaaaagaggcggaaaaaagcaagcattttctgaaggtctgctttttcaagaactagactaagtgttctcagtagattattttagttaactcgcatgacagcccactgaggtagccatcattaacctcattttcatggatgagaaaattgaggttctgatgaactcacagagccctaattaaaccccacagggcagtgtgctctccaaacctatgctctcttctctttaaaagcactcatttgagattggattcctctttactatacccctaaaccagctttttggaggtacctggtcaggctactttcttcttcttcttttttttttttttctctttttttgagacagggtctcactctgtcacccaggctggagtgcagtagtatggtcatggctcactgcaccctcaatctctcaggctcaatggatcctccaacctcagcctcccgagtagcttggaaccacaggtacatgccacgacgcccagctaatttttggtattttttttttttttttttttttttgtagacacggggtttcactatgttgcccaggctggtctcaaacttctgtgctccagcgatccacctgccttggcctcccaaagtgttggaactacaagtgtgagccaccaaaccgagcccaggatattttctaagagtggaaactgaggcccaaagaagtgagatgactattccaggaacagtctggcctgctgcctatggttgctaggccttggcttattgtagctttaaaagccctgcatgagctgactcttccattcgttgtcagtgaaaagtgggaattttggctgggcacagtggcccatgcctgtaattccagcactttgggaggccgaggtgggtggatcacctgcggtcacaagttcgagaccagcctggccaacatggccaaaccccatctctactaaaaatacaaaaagtagccaggcatggtggtgcatgtctgtaatcccagctacttggaggttgaggcatgagaatcgcttgaacccaggaggtggaggctgcagtgagctgagaacataccactgcactccagccagggtgacagagtgagactccatctcaaaaaaaaaaagggaatttcactgctagtgaaatggtgggaacccttcatcagtagagggccggtcattgggctgcttgttcacagggttgggtctactatgagccccattccagtgcttatcctaccttctcagcacatattcatttagcatatacagcaccctggcacctccttttttttaactccttgagccccacgttttgttaggctagaaaaataaaactcagtgttctgtgggggaaactaaatgactattgagagtgatgcatataacacacccagcctgtttataatattaaagcctgaattgccggacagtgttttcattaagtactgctattcattccgtttggagagacacgtaagaacagaaaccagtcaactcagtagtttgcatgccttccatctttgtgacagaattgcctattattgagagtatgaacgttttcacaaaatgagagacagctagaaagccagggttgaagagaatgctcaggatgaggggaaggcataatctatgctttctggaaagaatgtcatgctttctttaatatgaagtttccactatttctgttctaatttgaacagggtaccctgctgtcacccttgtaatatgggcccagaacaactgcagctgctgctggcctggtgggatccagtgatgcaaatgccacagaatgcaggtagaaccaggtctaagtcattccccccgggctaaggccctgagtctttggcagtccttcagcctttgaggaagacagtaaaggtaaacatgtgacaaggaatgtcagatcagggaagtgcctcttgaatcacaaagtcaaccttgccatctcacagataaggaagttgagcccaaaagtgagcaagtggcttcctcagggtcatatatatatatatatagtctcattagtgtcagagtcaagacatgagcccaggtctctggactcccaggccagtgctcttgtaactacctcccactgttgtctcagattacaggaaccaaatgcatgtctggccttgtgctgcttcgcatgcaagccaggctgacctttatgctcccagaatcatcagccttttcattggaaaccatggaaggacggttctgggaaaataatgaaaatcataccacaccatagagacaaccagaagccctgctcagatgacagagttctcctcgccttccaggtactgaatcccaaatatatgcatacacagcaactccagttggtgttagaattaaggagatggaaaaccgaacacttgacagttcggccagttctcttcccttttttttttttttgcctcctacccccagtctttccccaaaaggccaaaatctagagcatttgagcctttgtcattcactgcctgagaggaactggctcctgggagcagagaccagccgagattacaagaagcctcttcaacatgcagccaaggcccagccttggcctcgggagaacatggctcttgggacacacgtaggaaaaattccctgcttctcagcaaaaagcctcttcaatcctggagggatcttctgaggtttgtgggactccctgctccccacaaagactgttttcttatacttccaggagccctgatatatgaattcctgtatgagagattcatttctttgttcctcacagcatgagggggtggaggaagggcttctaaatgcaaaaatcctagtgacatattatatctcagaaactgaactttacagccccaccttgtccctcttgctctgcaactaccaacctcactggccctttctctgaaggttggactgtgagtgtgtgtgcaggtgtgtggacaccttccttttcacaactcaaatgagtaaaacctgacttttccccccgtactgtttaccacctcccccttccctccacccaaggcactttcttgtgttccaatgccactaatccctcttacagtagaaactccgtagtttagctgctgagggcttgaatttgtgacccacctgtttcagaaatattttcctagggacccaatgaatgccattacatacaaaggtggtgtaatggcagggaatctttatgcgacaccatgaggagagccacctattgggtaggctaaagaggttgactgcagtgagtggccaagcagaaggcaggggcagctggcaagcagagctccggggccacccccatagcttcccactaccctggctcacaccctaagctgccctcagggggagcaggcctaggactaccagcctgggcaccaggggagctcttggggaagctgagaggtcaaccttgtaagttactgcatctggcttcttcgcacaagttcattgggttttcagagtgttcctggaacctcaggacaggagatgcctggagtgctagaaattcaggattcccaaaaaatccactatcccttatgtctgcagctggacaaagggtccctcacggtccccagtaggtttgggggcacgtagaagtctagccagggctgggaattctagggggtggtaaagacagggtgcacagccacagaattgcctgagaacggcctgttccttatttggcctgtgacgcagttggcacattgagcttagagcaacaggtaaacacagcctcacatttggagtggcctaaaggtttctacatttcatccccacggtgactcagttggtcaaaacaggggacataattggtcctatcttacagacaagaaaactgaggctcaggaggggcaagtgattatcccagtgctgcccagggacagatttcccaggacttctggactattcttaggcttgccgcttcatggcatagatagaacaggaaacggatggagcagagctcagcaagggagatactgggagagcctgtctccaggagggacatgcccccaccccaggactcagctcgtggtctgcattctcccactcagtggccccagtgccaacagcactgctcagaaacactgctgccaaccggtgccccttctgtagcagtgggactggagggagttgcacactcagtcacggaaacaccagtgtcctgatgtacagcaagcccctttgatcaatcagatggggacagactgactcctgagttcccagggtccttttcctgaaggaacatccattctttccctgttaaaccctgcattcctggtccagcagcagaaaagagcctttcggacactggagcttgaggaagatctgtgcctatttattagagaaggtggtgttagtatcaggaaataggtggatggtgctgggtttcttgggttcaaaccctggggctctgctgtgtgaccttgggcacgtccctacccctctctgggcctcagtttcctcatgtgtcacattaccttggattagacggtctcactctgatggagtttttagttatgtatccattcattcaacaaaccttttatgagtcaagccctcctgcaggcacagggtttggtacacaggattcagcaagaagacagtctgtgctctaaaaaaggtcagattctcattctgtaatgctttttggtcctgctgtctttttatcatgctgacttaccttttcagaaaatgcccccgcttccgctggagaatggaaattggcaaagagagacggaaaagctccaatttgcgcctttgctattttaggagaggttgaaattacgagccaaagtggagtgatgcgctaagcggagtgacctccgtactccaagaaaagagaaaacccaggttctctgcttgtgaagtggctcgagctcttaggcgtgaggcattattatataaattcaagctcgctcgtgatccttagtaccctgagttgcctgaaggggggaatggcactgcctgcgtgtgcagtccgggagttcgagccgccgcggcaaccggagcgaggagcgcccgtccgcaccacctgtccccgccggcattccagagtagaggccgaattggcagcgagccggcccgggtcggtcgccgcctcagttcgcgcgggccctcctaggggtgtgtctcacggattccacacccggccgctcctggacaagccccgaaaggcgtcttcttccctggcgggagccgcgtgcgccccgcttttcgcgctgctgtcccgggggcgccgcaggcggatgcacgttctcaggcgacgctgggactgggctccctctgccgggccctgctcactcggggcctggccgccctgggccactcgctgaaccacgtgctccgtgcgatcttctccaaagaatttcggccccatggccaggtacgttctaggtgaaaaccgggtcgcgcctccaggcaggcgcaaggtgctgttacggggagggaaggcacccgcggggtagagaagggcgtaagtttcagctgccattggtggcccgggctagggtttccggaagggtgcggcgcaatttgccaacgccgcggatccgttgtaaatgttccgcggcaaccggcagggcaggttctccgatagcaagttgggtgccgccggctatatccccagggtaatatgagccccgggttccgagcttccttsgaggccgcataccggatgaccaagcgggcgcgggcgccggcaaaaggagggtttcggggcatgcggggagaaacccggacagaggtgtgcgctccaaagaggataggggcagaagagcccggagagtccggcggacgaagcgggatggggatgggagcgggagccaccgagagtggagcgagacacgcgggggcccggactgggggcgtgagttgaggagtggggcgactgggcccggaggggtcccactggggctaaaccccgtggaggggctccggggagctccggagagctctggcggggggagggggcgaacggcccgcgggaaggagtcggggtgggggtgtgtgtgtgccgcagaagccacagcgctgagcctgccgggaaggaaggaagcggggaagggagccgccgccgcagccgccgccgccgtggagtactcggtgcggaggggagggggagaggggcgcagcagcggctccaggggaagggggcggtgcgggggcacgacgagcgcgggctgagctgcgggattgacgtaacgagcttgggtttcccccagcgtcgggaacatggatgagaaatccaacaagctgctgctagctttggtgatgctcttcctatttgccgtgatcgtcctccaatacgtgtgccccggcacagaatgccagctcctccgcctgcaggcgttcagctccccggtgccggacccgtaccgctcggaggatgagagctccgccaggttcgtgccccgctacaatttcacccgcggcgacctcctgcgcaaggtagacttcgacatcaagggcgatgacctgatcgtgttcctgcacatccagaagaccgggggcaccactttcggccgccacttggtgcgtaacatccagctggagcagccgtgcgagtgccgcgtgggtcagaagaaatgcacttgccaccggccgggtaagcgggaaacctggctcttctccaggttctccacgggctggagctgcgggttgcacgccgactggaccgagctcaccagctgtgtgccctccgtggtggacggcaagcgcgacgccaggctgagaccgtccaggtgagtgcgcgccggtagtcgagcgggacccgggcctaggcgggcggagggctgggaggcgcggctggcccaagccggggacctagcgcgcaccctgacgcccgggcgtttgcaccccggctgggcaggtgctgggcgcccagtagcgcacgttcgccgcgctgtggcggccacagaaaggctttccgctccggccccggactgaccgtctgtctgtccgcagggtggcctgcgtgatggttggcagagcgtgcgggggaggcggccgagcggccggaacggggccgctgggacggggcatcgtactcagtctccgcactggagagccctaaagagccgcgctctccgtgcagcgtctctggatccctgctttcttctactctgcacccgggttccgaagtctcctttcagcgctctcttcctcctttcggcgcccgcacttcttccctccccccgctttcccccctatttcgtctatttgccttgttctccctctttctctcttgtgtcctagatgttgtctgctcctgtttgctcgctgtttccttctttccattcccctctctcgcttttattctttttctctcttaccctttctgtttttctcttcttgccggacttttatcacctcgctccttccccgctctggctctggtcttcccgggcgactgggtgtccctctgtcgctattttccgacatccaaggagagctcatggttcccaggcttgcttatcactactggctgcatgagaggcatccgtggctctttgggagtggcggggggcaccccgcggaccgaagggcgggctgggatggtgccctggaccccatgtggggttcagtcaccaggagcctctcctgatttacaaaaaatatttaaaaagcttgagccccagcatggggcgctgccagcccatgttctgtgagcctgggctgatgcggtaaaagctgatttattaatagtctgtagccagaagcaagggtattttcctccctccagacgcgatgtccagttgctagaggtcatgcagtactgtaaagtgggtggtggtggggtgggggaagtgagtgctatggggtgcagttagtccagccagggctactgtttcgcaagtctccttaaaacaaatctgggctgaagcagggagtccagggggtgcacaaggtgagtttcatggcctggaggcctctggatggggtctctgggccggcaaggacatgtctgtgtcccatccccatcccccgggtgcacttggtaccctggacaaggggatgctttgcaggtgactgttagaacgcaacaaccagtgtggatttttctgtccaactgcagcaaatagagccctagagccctctgactttcagattaccattgagatttaaggggaacatcaccccctggctctcctcttcactctctcttctctcagtttacactgtcctttctcaaatgctggaattgtgtcagaatctgccaaacttgtatttcctttccaatactaacaaattttttcttccaccccaagaaaaccttagccccaggacctcaatccattggtacaattgtgtaagtcattgtcacaacaatattctggtgtttaataagttcccaaacaatttggcaatattgaaaagaatttctcatactgacagaccttgtaggtgtattgagaggtggtaatatttaaaaagctcttctgggcaaaagtagaattccacagccatgactatagcagagaagtgaaaacaaggtcttggtcaccatgaaagccatggccttgtctggagttccatggggcacatgtgcctttactgatccttttgaacatgtaggtcagagtatgatgtctataaacacacattattaatgtggtctagattatctgtttggtggctactgtcctctggcagattccttcccgcattctccagaagataaccagaacccctcaaagcctcttggattgtcccaaattgaagcaaaattatttgaaatgacataggattttcttggttattaaaagggtgatactacagtagcatctagtctaatcaaagagcaaccatgttctaaaaagtcacagttactggattttacggtgtttgcaaaaatgaaataaaacttgctagagaaatgcattgctacctcaagggcacctttttatttcattcattcctgcccacctccagaaatattcactttgaagaatagggatagcctaggggttccagaatttctctggatgttgacagatcccctaggaggttgcaggaccagttctgtgagttctgataatctgtaagagctaaggtgtgcatgtgtgtgtgagaatgagagagtgtgtgtatgtgactgttgtatgtgtctgtgcgaggcaaaaatttagaggtaaaggcagctgcaccgatggtgaaatgtgggggtgagaagctggtgtctggaaatgggagagtctgcttttgggagttcctgtgtcaaacagcctctccatgccagctggtggtctctgtgctcctctcaactgaggggaacaacagttccacctttctggcctgggagttcagacagctgggccttagttctaggccagccactaaccagccatgtgaccctcgaccagatcctgtgtagagagtgcactccagtttatgataagcgttcatatcccttatctctggtattcctctgtaaacctgcaccatcttcagcaagaggccagagtggacaaaaggatccccatttatcagatgagaatgaagcccaaaaaggctaaagggcttccccggggtcactgagtttttttagcggcacagcaggaatctgactgcacttctgtctgactccacaacccttgctctgttgactgcaccttgatgaacaagggttttttgcaaaaccacagtgaggtcttgagttagtcattcccacaaagtgaatgaacacaataaatgttggctgttgttgttatcacctacatcattatcatcgtcagtcattttacaacatgtgagtttggatgagtttttgggccaggattaccacacccattgggagaagaacggatttctacatccctaaggctttctattcactggggataggttttgtggctagattgcagaggggtctttcattgccatgttgggaatccctgcaaagctgagcaggatgggagcgggctgaggcctggttggatgagcttcagtaggagccttcagctgcgacaggaaccacctactgactcacagccattcatccacattagggaggtatcagaggctattgtggctgcaagccaagactctgaatcctgcttccagtgctacatttgggatgcttctctgcctccgcggatggttaagtgcttgggtgatatataactgctgaatagaaacaaccgtgatcacgttgcctggagaggacaaagagagagagagagagagagcttggctggtgaaaggctcaagttgtttattaagaataatatttctttaaaaaaaatcagaaattggatttcatccatctgtctgccagtatgttgtttgcagtcactcagggtcctgctcattttagaatttctgagaccatttttgaaagtgtatccaaacattgttgctcacaagctgttaaaagtcccaaattctgcaggcttttcttaggccaaatttcctctgtttgtagccaactctagtgtgccatttgttctgtagagggaattcagaactgggcccaaagaaatagcactagcccccttcttcatcactaagtatcatgctggccagcatgcacagaatggggttgagaggtcagggtccatggctatacaagtcaaagaatctgatcatattcatgttgtaccctagacttttagcatctctaaaattttcagtttggatgagtgattgggccgggggtaccacacccattgggagaagaacagatttctacatccctgaggtgttttattcaccaggggtaggtcttgtggctagattgcagaggggcctttcattgccatattgggaatccctgcaaagctgagcaggatgggagcaggctgaggcatctggaagagtaattaattatcatctcaaatccagtagcatatcattgatgggaaaggactaaaaagtgtttgtttagatggagaaaagctttttttggtcattctatttttttttaattgtgggaaaagctttcttttattcccatttgtttttaaaaggtggctctattttgaaagagctgtaactatagagtgtgtgtacctgatcatgcctcacaagcccacgctttccctctttcttctccttgattttgcagtgaggcaaaatgacacaacaggcttgtgatataggctgaggcattaagcagaatggactgttacagccagtggtcagtactggtcgtgtggttcatcaggctctaagctgttgggctcagttttacttagctgaggatacatttcttcagctgtctttgagagctgtggtaccatcttagctatttcatagaagagggggagaaatctaccattacaatatctgtagaattccagtagtattaattagcatctttgcatggatgtcgaacatggtgttggagtccttacaaagctgtaagttctcaggtagtacaaaaggctattcagaattaacatcacttaataataattttagatcagtgctatggggcaattaaaatgctagagcttgtctttcatggatatcagtcatcaactgaggtagtatgtaatgacattaaaagaatagccatccgtttttttctgtcattcattaagcaagattttgtgaaactgttcattatattccagggaagagacatcattctctgtctcacagagcttatggtagaacagaacaatttagtactttagatatttaattaaaaaatggattttgtttgaaaacaatttgaaaatcaataatgtctttaaaatgtcatacatttaccagaatatacaaaaaatagacaaaagtccatctgttatgttgtagtttgggtctaatcggcaaagcagatggagtaactattatgtctctggcatggtgctagcagttgtggggagattagagccaagaagaaaccaaaaaagccaagataaccatcttcagcctcaagtccataaagattagcatgtgaagtgcaggactatgtcatgtagacaggtgctgggagaggaaatttagattttggacaggcccttttccttcccttggtctcagtgtcttatctataaaattggagatttaaatgacatgctttccagggccctttcctttctaaagtatgaggaacaggccagaaaaaggagacatccttttgagaaggcctctgggagtaggagagttgtattaagaagaaaggaggcattgtgggtgggcacggagtcctcatgaccttttgaggtccagcaacctcacctaggcaggtctggccagacccgaaaggttcatgcttggagtaataatggttagggaagtagatggggttaggctccactgtggaggacttgaatggcaatgaggaaccccagtaagtatgagaagctcttggatggaaagagtgcaaaaacaccatgaaagtaaataaaggtcggagtctaggtaaagctatctccctgatatctagtctggaatgtaggtggtaccagccaccaaaacagagaggttgagaaggggatctggttcgggctggagagtactaagaagtcatgactggttcctgttgcctagatttctagtggacaggacttataaggaggtgacaactggggctctggggcaggttagggctccatcgtacattatatgtgggaatctgtggacccagttaatctgaattcacaattggcgttgttatttaagtgatagctgcaattcacatatgggactcttagccaaggaaaaggatgtttgaataaaggaaaaaagatcaatagttatgattacataagaataagatatgcttatctgtcaaaaaaaagccaaaacgaaaargtttcaaactggtaataatatgcacaattacaacagacacaaagttgaaatctttactgtacaaagaactctcacgagctgattagagaatcaaaggacatgaccagacaatttacaacataggacccccaactagtttgcagacatggaaaaactgttttatttcactggtactaaagaaatgcacatttaaacatagaatactttttttgcctctctaaccctgattaaaacaaacaaacaaacaaagcaaaacccaacatatatcaccaccaaacaaaaaaagtagacagtgctgacaagggcatggtaaatatcaaaattctcatacattgtcagtgggaatgtaacttgaatgatctttttggaaataaatagtgtaaacacagaatataaaaatatttatttctatgacccataatttcttttctgggattttgcagaaaaacatacttttatacatgctttcattcattcactcatttatttattgattcagcaaatatttattgagtatctggtatccctgtgctatgtgctggggttaccgggaagaaccaggtagatgtggtccctgccttcgtaggagtgggaaagatagacagaaaacaaattatcaattacttaaaattatatgaagtgccatgggggaaaagtacaggatgctatgagaacacatactaggagactaactggagttatyataagtgcaacaaattggaaacaatctgaacatccacatggagaagaatggttcaagaaatctcagtacatccacttgaaagattattacaaaaccacttaaatgtcctttgatagagcatggaaaattgctagtgatttaatgctaagagaaaaagagatagaaaattatggacccagtacgactacaattatattaaagaaaaaaagatagcgagcgagcgagcgagagaaatcatctcctacccctcccaaatctaagcataaaagacagagactggaagaaaaaaataatagaatataaatagatctattagtgatttattttcttattctgcttttctgaaggttttgagttttctttgagtctacattacttatataataacaataagcattaacaatttttaaaataatgttttactaagctgtgattaattgcacacaggtctacttttttggttcctggctggttatttcattakcctcttgatatcctgggagcctttaatgaggagagtagcctcagccctaataaaccctcaccctgaaaggcagaggtgatgagtcagacattggctgctgattttcgataactgacttttatcatattcccacacaatgcatggaactctttttataccagtatggtatagagctacttgagtgaattgctattgtttctttctcatttataaattataaattttaatttataaattatatggaacaggaagttaatagtggtacacagttggaaatataaagcttattctgctcagccagagccatccgagatagtctggactttggatctccatgagcttctttcttagtgagttgacaccagggctgatggtctggctggaagagttaaaatcttggggttggtaaagggctatagttctaaacatccataactgggagcttagatcagttagtgtatgtgttgctctcgtccagcagaaaaggagagttcactttgctaagcagcgccccctagagaagtttcactgcataagagtattacccccagttaaccataaataaagttgattagaaatgtcattgtccaactattccaatatctgagggaccactctatgcacatatagtgaggtgcataatcttattgttgaaactccactgaaactacaccgtaggtacaagttgttttgacagtgtaaagaatgtccctcacagttgaaaagctaatattaacattctgtgacacatgaaatgaggtatttagtcactgagtttaaaaagagatgtatggatgggaatttccccctttccattaaaggataatgaataatccacttaatggcgtatgtcctctaaaacagtgtccttgtaagcttagataaatatttgtctaaactttagtaaaatatttattggcaaaagagcttttctcatttactaggtattgaactttgcagattattcagttggtcttattgcatcccatttgttatttctgccattttgcctctaaaaactgtgctgaagactttgacacatttcagagcattacactaaataaatctgtcttgcacattccactgtgctttttctggaatattataaatattcaaatataggcacacacgccgattcaaaatacaatttaatacatgcaaattgtgcataaattccatatttataacttggcaatagtttcgaacttgttatcctatgatataaatgtatcaaataggagctcatgggaattatcaataaatgtatttttctgattaaactgtgggctctttttcagtcacaatttaagcttcaattctgagttatattataagagaataatttgcacttcatttactctgaattgtcaagaatcttgttcttccccaatgtaagtgtctgcaaagaggacttcttattcagtttgattgctttttaaattttactagtggagatgccctagtgagtctgagagaattggtctgtttcttatgaagagtttagttctaatgagttgcttccatgcactgttctgtgcgaatacagagcaattgaaatgtgcggtgtattgatttacctcaaatggattaggcctgtgtgcaccattccttgcattaattgactttctcccataactgtactaataactgcaaatcttcagtatagtattagcttcaatttactcataaagatccttgggtttttgctaacttactacaggagagtcaatgcaagcaagagtatttagaaattgactagggggaccaagttacatcatacaacccagaaatacttttaaagggctctttgatcatggcagccaactcttcagttattacaataaataggagttgactaaactcaccagttaagacctagattatcacaatggatgaaaataaaaaatccagctatatgctgtgtataagagacaaaggtaaaacataagaacataaagcacacaaaaaggattggaataggtacactatgcaaacactagccagaagtaaactgatgtggctatgttgatatcagacaaaacagactttaaggtagaaccattattgggcataaacagatcactgtgtaatgattaacagttcagtttttttttcagataacaattctaaacttgcatatgcttaataccataagtttgaaacgtataaagcaaaagttggcagagctaaaagcagaaattataaaatctgattttttttcagaaattgataggtaaaatgaacaaaaaatgaataaggatacagaggatttgaacaacatgattaacaaactcaatataatgggtatatatatatacacacacacatatacatatacatctaaaatacacacatacacacacatacacgcacacacacacacatatatatatataaaatctgcacccaattggaagaatacacacacaagtgcatatgaaacacttttgaaaatagaccatatactgagccctaaaattactcttgaaaaacttcagtgaatgaattatcttgtagaccatactatctgatcatatgcagtgcttagacattgggtgttgtgttaaacctgagtgcgtgtgaaggaacgttagtagtttgctatatttgtaagtattaccaatccttcaccgaccacataacatttcttaattgacatacaaaagtgaagaactccaagacttaggtagtttgacccaggtaacttggccttattttccaagaagatctattactattttggggtacctattgagacaggtcctgtgcaaggagcatattatatattttctcatttaattctcacgacaaccctctgaggtagattttttaatatatactttaagttctagggtacatgtgyacaacgtgcaggtttattacatatgtatacatgtgccrtgttggtgtgctgcacccattaactcatcrtttacattaggtacatctcctaatgctatccctcccgcctcccctcaccccatgacaggccccagtgtgtratgttccccaccctgtgtccaagtgttgtcattgttcaattcccacctatgaatgagaacatgcggtgtttggttttctgtccttgggatagtttgctgagaatgatggtttcyagcttcatccatgtycctacaaaggacatgaactcatcctttttatggctgcatagtattccatggcatatatgtgccaaattttcttagtccagtctatcaatgatggacatttgggttggttccaagactttgctattgtgaatagtgtcacaataaatgtgtgcatgtgtctttatagcagcatgatttataatcctttgggtatatacccagtaatgggatggctgggtcaaacggtatttctagttctagatccttgaggaatcaccacactgtcttccacaatggttgaactagtttacagacccaccaacagtgtaaaagtgttcctatttctccacatcctctccaacacctgttgtttcctgaaattttaatgatcgccattctaactggtgtgagatggtatctcattgtggttttgatttgcatttctctgaaggccagtgacgatgagcattttttcatttcttttttaattattacactttaagtgctagggtacatgtgcacaacgtgcaggtttgttacatatgtatacatgtgccatgttggtgtgctgcacccattaactcatcatttacattaggtatatctcctaatgctatccctcccccctccccccaccccacaacaatccccagtgtgtgatgccccccttcctgtgtccaagtgttcttgttgttcaattaccacctatgagtgatgtgatgtttggttttttgtccttgggatactttgctgagaatgatggtttccagcttcatccatgtccctgcaaaggacatgaactcatcattttttatggctgcatagtattccatggtgtatatgtgccacattttcttaatccagtctgtcatcattggacatttgggttggttccaggtctttgctattgtgactaatgccgcaataaatatatgtgtgcatgtgtctttatggcagcatgatttataatcctttgggtatatacccagtaatgggatggctgcgtcaaatggtatttctagttctagatccctgaggaatcgccacactgacttccacaatggttgaacyagtttacagtcccagcaacagtgtaaaagtgttcctgtttctccacatcctctccagcacctgttgtttcttgactttttaatgatcgccattctaactggtgtgagatggtatctcattgtggttttgatttgcatttctctgatggccagtgatgatgagcattttttcatgtgtcttttggctgcataaatgtcttcttttaagaagtgcctgttcatatcctttgcccacttgttgatgggtttgtttgtttttttcttgtaaatctgtttgagttctttgtagattctggatattagccctttgtcagatggctagattgcaaaaattttcccccattctgtaggttgcctgttcactctgatggtagtttcttttgctgtgcagacgctcttgagtttaattagatatcatttgtgaattttggcttttgttgtcattgcttttggtgttttagacatgaagtccttgcccatgcctatgtcctgaatggtattgcctaggctttcttctagggtttttatggttttaggtctaacatttaagtctttaatccatcttgaattaatttttgtataaggtgtaaggaagggatccagtttcagctttctacatatggctagccagttttyccagcaccatttattaaatagggaatcctttccccatttcttgtttttgtcaggtttgtcaaagatcagatggttgtagatgtgtggtattatttctgagggctctdttctgttccattggtctatatctctgttttggcagcagtaccatgcwgttttggttactgtagccttgtagtatagtttgaagtcaggtagcgtgatgcctccagctttgttcttttggcttaggattgacttggcaatgtgagctcttttttggttccatatgaactttaaagtagttttttccaattctgtgaagaaagtcattggtagcttgatggggatggcattgaatctataaattaccttgggcagtacggccgttttcacaatattgattcttcctatccatgagcatggaatgttcttccatttgtttgtgtcctcttgtttcatcgagcagtggtttgtagttctccttgaagaggtccttcacttcccttgtaagttggattcctaggtattttattctctttgaggcagttgtgaatgggagttcactcatgatttggctctctgtatgttattggtgtataagaatgcttgtgatttttgcacattgattttgtatcctgagactttgctgaagttgcttatcagcttaaggagrttttgggctgagacgatggggttttctagatatatagtcatgtcatctgcaaacagggacaatttgacttcctcttttcccaattgaataccctttatttccttctcctgcctgattgccctggccagaacttccaacactatgttgaataggagtggtgagagagggcatccctgtcttgtgccagttttcaaagggaatgcttccagtttttgcccattcagtatgattttggctgtgggtytgtcataaatagctgttattattttgagatacgtcccatcaatacctaatttattgagagtttttagcatgaagggctattgaattttgtcaaaggccttttctgcatctattgagataatcatgtggtttttgtctttgvttctgtttatatgctggattacatttattgatttgtgtatgttgaaccagccttgcatcccagggatgaagcccacttgatcatggtggataagctttttgatgtgctgctggattcggtttgccagtattttattgaggatttttgcatcaatgttcatcatggatattggtctaaatttcgctttttttktgtgtctctgccaggctttggtatcaggatgatgctggcctcataaaatgagttagggaggattccctctttttctattgattggaatagtttcagaaggaatggtaccagctcctctttgtacgtctgaggtagatgttttaaaaccccatttaaagatgagaaaacagaactggacaagatacataacctcctaaatcttcacagctacacagtattggagctggcatttaaaatcaactgggatatttggcctgtctggtatattttaatgtctactaaattctcagacaaatctccaaaaacctttttcttttctgtggctaagtctatacaagctaagtggaatggagacctgaagtaactatctggagataccaagatccaacatattagcttgtttttaaaaaaacaccttttaaaaatttaataaaagtcactctttcaaggtgaactctgcagctcttttttcccgtcttaaagatttagatgccgaagttatttcaaatactttttacattgaagatttacacataagtatgatgttttaatggaaatgaaaaaaggcgctagagaaaagattcaggttttcttttttcaaataagaaaaatgaggaccttaactgtattttaatttctacccccttgtagactgcatttttggtacrtacactatgcaaaatttgtaagaggccaaagaatcttgctccttttagaatgttggcatttgtctcattagcagttagttgcattgctttgaccaattgtgacctgtttctataaatgaccattgctttttgctgcatttggtaagtgtagacacagcctttggagggtaatataaatgagttcaggcagggcatctcttgtaatctgggaacagaggagccagtgaaataaagatgctttctttcaaaaaccaagggaggagtcctagatgaaatgaatcctgaaggctattcttattttgggggctcatcatgaagataataagaatccattttgttgctgaaataaccaaataagagtggcacattcccataggagtgaccattctcttccttttggaaggggcagctttagaaaagtgccattatgcaaagctgaaggccataaaaaagtgccattaaagagaatgcaaattagcatgggcctaccagcctggcaggcattattaatgttggaggtaaagaaattaggttgaaggtatggaagaaccataaaaaaacaaccagaggccagtgtgacattgggctgatggccacttaagctgatgcctcatggctgagactttgctaagtggaagattaactgacaaaacagcttgaaggttgacgaactatttgagctcattgccagatactctagaggcaaaaatacttatttttgtgatttttttttctgaaagtggcacagtatgttctaagagtataataggccagctccagagcattaaagcaatgttgaaatgaagcatattggtgtgaatgatgcatagtaggctatttatgaaaaattacttcaataaaaaacttcatgaacatgtaaacatgattttatgtataaacacactataagatttatgaaagataatcatactaatatgagaatatgaagctgaagcaaggtattttttaaaaattacattgttgaacaaaatggtctgaatatttctgcttttaggtaaggatctatgctttgcagctgcctccttcagtttgtttttatgacttaagcaaataaaaaaaaaagagatcattttagcattagtatagcattctacaatcttctggaagcttttatatttatcgccatatgggtgtacattaaatctgcatctccctctcgtttatatgtttatgaagttataaagatatacacatgcgcacacaaaataattaagcaagtgatgtgtgtttgacaacgattggtgacttaatgccaattagagggtgttaaaaaagaacacttgctttcttaatccaattgttcccatgctttttggtttatgcacttaaggagagaacccatttaaagtgccagaatttgcatacatgcagctttgactgagccttctatttaatccagtggtcttaaaaaattattagtgagggttttagagacctacatgtcatgagatccattaggacgagactgaaagtacactttttggctgcctcctttatgggaaggggtgtgcttttgatatggggagagctaaaggtatgtggatcagctggactgtttaatgcagccagattagctcagctcatctcagttagagcatcttgtgttgcagccaccttgcctaatgccattatgggaaagtggctcataattttccagagttcagctgaatgctaagtgaaaggctacatacagtgttcgtatgtatgaaagttagcagttgcattgacgaactcttctgttttaaaaattctggttggactggaatgggcaggattgtgatattcccctttcaatgtcatgtttgttttgctttaaatcatggtgatgtaaccattattcattgtaggaagattatggcttcagtgtccaaggactgggtgcggggtttcaggttgtgacctttggctgagaatgccttctctagagaatgtcacagaggtcagatttctatgctgactgcaaacaaacctgcgaccacaaaattcagctcttctgatttgctaggatctgactccaggatgcagtactttctggttaacagagggggctcttgtatgcagtaaacctcccaagatggagagatgtggtatcagctattttcattatagccatcttaggagtgtgaagttgtatctcattgtggtattgatttgcatttttctgatggctaatgatgttaaacattttttcatgtgcctattgcccatttgagtatcttctctggagaaatatctatacaggttgtttgacattcttaattgtgttatttctttttctttttaatattaattggttttttttaaacatattctaggttcaagtctcttataagatatacgctttgcaaacattttacccccattcagtggttgttgcttcactttcttgaaggtacccattgaagcaggaaagttttaaattttggtgaagtccaatttaatttttttctttgtcacttctgaaggctttgcctagtgttcacaaaaatttactcctatatctgcttttaagagttttatagtttaaccttttacagtaaggtcaatgatctatttcaggttaatttttgtgcatattgtgaaaaaggagacacacccataagattggtataactttatccttttttatttaggtaatatttgtcccagaatcctttgttgaagactgtttttctttattcattttccttggtaccattatacaaaaycggttgatcataaatgtttggatttatttctggattctattttacttgtctataaagctatctttaatcaagtgacacacagtcttgactactgttgctttgtagctagttttgaaagcaggaagtgcgaatcttttatttattttttctttctctagattgttttggctattcttggcaccttgaatttcattgtgaattttagcatcagcttatcaatatccacaaagaagccggctgggatttttttagggattgtattaaatctgtagatcaattttggggagtattgccatatggacaatattgtttttcaattcaaaaacatgggctatttttccatttgtttaggtcttctttaaattctttcagtgctaattttgaagcctttagattgtaagttttgaatttattttgttaaatttatttaaaagtattttactcttttgatattattgtaaattgaatttttttcatttttggattgttcattgctactatataaaaagatagttttttttgtttgtttgttttgcaacggagtctctgtcggccaggctggagtgcggtggtgcaatctcggctcactgcaacctctgccccccatgttcaagcaattctcctgcctcagcctcctgagtagcygysawtayaggygcvcgccwccatdccyggctaatttttgtatttttagtagagayggggtttcaccatgttggmcagtctggtctcaaactcctgacctcaagtcatctgcccgccttggcctcccagagtgctgggattacaggcatgagccactgtgcccggccagttaatttttaaatattgatcttgtatgctgcagccttgctgaattcatttttaagttctaatagtttttcagagtatccctcaagattttctgtatacaaatgatagagtttggatgtgtgttccccacaatctcatgttgaaatgtaatccctaatgttggaggtggggcctggtgggaggtgtttggattatgggagcagatctctcatgaaaggctcagtgccctccctgtgataatgaggtcacatgacatctgtttgcttaaaagagtctagcacttccacctctctctcttgctccctctcttgccatgtgacacactggcttcccttcaccttccaccatgattctaagcttcctgaggcccttgccagaagcagaagccaacactatgctagctgtacagcctgcagaactgtaagccagataaacttcttttttatgttacccagtctcagacattcctttatagcaacacaaatggactaatacaacatgcttatgctatctgtaaatagacactttaatttcttactattcagtgttgatgaattttatttccttttcctgccttacttccttggctaaaatctccagtaaaatgtgaactggaagtggctataatgaacttctttatcttgtttttgatctcaggggaaagcattcagtctttcattattattattattattattatttgagacaaggtctcactgtcattcaggttgggatgcagtggcatgatcacagctcactgcaccctcaacctcctggggcttgaggaaacctcccacctcagccttccaagtaggaagaactataggcaaggatcactatgcctgactaatttttaaattctgtgtagagatggggtcttgctatgttgcccaggctggtcttggactcctgggctcaagtggtgtactgcctcagtctcccaaagtgttgggataacaggtgtgagccactgttctctgcccagtctatcactattaaatatgtgagctctaggtgtcttttatcagattgaggaagttctcttattcctagtttgatgagtgtttctttaaaaaaaaaacaatgaatggatattggattttgtcatgattattctgcatctcttgagataattgtgtttttttctctttattttttatttatttgtttttttttttttgagacagggtttccctttgttgcccagggtggagtgcagtggcatgatcatggctcactgaagcttcaacttcctgggctcaagcaatccccccacctcagcctcttgaatagctgggactacaggtgtgcatcactattcccagataattttattttttattgtagagatggggtctcactatgttgtccaggctggtctcaaactcctgcgctcaggaggtcctcctgccttggcctcctacatgctgggattacaggtgtgagtcaccacaccctacctctttattctattgatatagtgttttacattaatttactcacaggtagtaagccaacctcgcattctcttgacaaatcctacttagtcatggtgcataatctttttttatatattgctggattgcttagattttcttctagtattttcatagtttcaggtcttaggtttaagtctttaatcttgagttgatttttgcacatgatgagggctaagggtccagttttattcttctgcatgtggctatcaaattttcccagcacaagttattgaagagggtgcccttttcccaatatatattcttagtgcctttgttgaaaatcagttagatgtaaatacacagattttttttctgggttctctactctgttccattggtctatgtatctgtttttacagcaatgtcatgttgttgtggttactataactttctagtataatttgaagtcatgtagtgtcttgcctccagcgttgtcctttttgctcagtattgcttcggctgttcagggtcttctgtagtttcatacaaatttcagaatttgttttttctatttctatgaagaatgtsattggtattttgacagggattgcattgaatctgtagattgctttggryagtgtggacattttaacaatattaattctttcaatctatgagcatgtgatgtctttccttttttgtgtcttcttcaatttcttcagagttttattgtttttattttacttccttgattaaatttattccttgttattttatttttttgtagctgctataaatggaattactttcttgatttccttttcagctagtttgttaatggtgtatcaaaacactgttgacttttgtatgttgatttttgtgtcctgcaactttactaaattcattaaatagttctaagatatttttgatggagtttttagggttttctatatataagacaatgtcatctgcaaacagagacaatttgactttctctttttcaatttggatgcattttctttcttttttttttttctttctcaacttttattttaggttcaagtgtacatgcgcaggtttgttagatgggtaaattgcatgtcactggggtttggtgtacaaatgatttcatgacccaggtagtgggcatagtatctgacaagtagtttttcaaccctcatcctcctcccagtctccaccctcaagtaggccctggtttctattgttcctctctttgtatctaagtgtactcagtgtttagctctcacttataagtaaggacatgcaatatttrgttttctgttcctgtgttaatttgcttagaataaatggcctccagctgtatctatattcataggagacattggtctatagttttcctgtgatgtctttgtctgaatttggtattagagtaacactagtctcacagaatgtgttgagagatattttctccttttctatttttttaaagagtttgtgaaagcttggtgttaattctttttaaatttttggtgtaattcactagagaaacatatgggcctgggcttttctctgtggtaagttaaaattatttatttgatcactttactttttatagttcaattgagttttttatttctttgtgagttaatttcagtagtttattgtctttctggtaacttgtgtgttctttccaagttatccagtttattggcatgcagctgttcatagcattaccttataattcaatttattgttaaaggatagtattaatgtcccctctttcattcctgattttaataattgagtcttttctctttttgttcagtataagttctgttttatcaattttgttgatctcttcaaagaatccatttttgttttcatggaatttattattctttttcaactctcaattccctagaatctataatatttcttttcttctgcttgctttatgtttagtgtgttcttcccttttcagtatcttatgatataaagttatattagtgatttgaaaattttcaaattatagttgtaaatgcctatattttcaaaaagaaaatatttcaaatcgcttcatcccataagctttgatatgttttgtttcatcccataggttttggtatgtttggtttcattttcatttgtatcaaacaattttctgatttcctttgtgattttttccttgacttattggttattttgcagtgtgatgtttaatttttcacgtttgtcaatttcccaaatttccttctgtaaatgatttataatttcattccactgtgattggagaacatacattgtatgattcaactattttaaatatattgagacttcatgaccagtctgggcaacatggcgaaactctatttctaccaaaaatacaaaaaattagctgactgtggtggtgcacacctgcagtcccagctactctggaggctgaggtgggaggatcacttgagtcctgggaggtggaggttgcagtgagctgagattgtgccactgcactgaagcctaggtgacagagtaagaccctagctggaaaaaaaaatatgttgagacacatcttgtggcctaacatatgctctatcctggagaatgtctgtgtgcatctgagaagactattttgctgttggtggtggagtgttctatagatgttgctaaaacttggtagtttattgtgctgtttagacttctatttctccattgatctttttctagttgttccaccattatttaaattgggataatgaagtctccaattattattattgaattatctgtttttccctttggtcctgtcagtttttacttcatgtgttttagggatctgttgttagctgcatatatatttataattgttttgttttcttgatgcattgtttctttatcattataaaacttctttctttagtaattttgtaatatttattttctctgatattagtatagccattccatatttcttgtggttcttgtttccatgatatcttttctcttctttttcctctccaatgatttctatctttttctatctataatgtgtgtttcttgtagacagcaaatagctggatcttgtttggtttttatttcattctggcagtctgtgccttttgattggattgtttcatccatctacatttaacaatattaatgatatagcttgatccatcttattttgattttccatatatctcatgtcttttttgttcccctattgctcctgtactgctttgtcttatattaagttaatgctttccagtgtaacattttaattcccttaatgattttctactgtattttgttgttattttctcaatgtattctctagggcttaatctatgtatattaaattatcagaatctacttcatatttatagtaacttaattacaataagctctttaagtgttttcctagatagctctgtttcttcttctctctttttgtgctgttattgttataaattttacatctatacatgttacaaactcagcagcacattgttataattattacttaatgaaattttatgtcttctaaagaaggtaagagaagtgagagaacaagtatatttattgagtttcttataaaccaccttatgtaccattactggttctgtttgtttgtttctgtgcatttaagttaccattttgtatttcctcactccagtacagccttgctccaacacatttcttttggtttgttattgtcatatgttaaatgtatatattttatggtcccaacaatacaattatatacctatttttttattgcttttcaaagtttgttatgagaaaaggggagtaaatatgcatttatactgtattttgttattattacattattattttattattacattattatcttcaaatgagctgattttttctttcatgtggacttgaattaccacctggtcccacttgctttcagccggagaatttttctttattatttcttgtaatgcaggactgttagcatgagattgtctcatgctaacatgagatactttgttttctgtgaatgtctttatattgctttcggttttgaaaatacttttgctggatatacaattcttaattattggtttcttttcctaagcatgttgaatgccatcccactgcctttgtcctctattgtgtctgatgagaagttagctgtcagtgttattgaggttcctctgtgtgatgggtcacttttctcttactgcttttaagaatttctctttctctttttaacatttttagtatggtatgtctgtgttaggatctctttttggttatcctacttgcagttcattgagctacttgcacgtgtagattaatttttcttccagcttagagaaagtattagccattaagatttttttttcttttctgtttctttctctttctggtactcttccattaggtgtattctggtgtgctttttggtgtcccatatttctctgaggttctgtccatttttataccttctttctctctctgttttcagattgcgtaatgtctactgaaatatcttcaaggttgctgattatttatcctgccagctcaaattgtctgcggaagccttgtagtaatttttttttaaattgagacagaatctcgctctgtcacccaggctggagtgcactggtgcgatctcggctcactgcaacctccgtctcctgggttcaagcagttctcccacctcagcctcccgaatagctgggattacagacgcatgccaccatgcctggccaatttttgtatttttagtagagagggggtytcaccatgttggccaggmtggtctccatactcctggcctcaagtgatctgcctacctaggccccccaaagtactgggattacaggtgtgagccactgcacccagcccttgcagtaaatttgtaatttcaattattcttttcaatttcagagtgttcattagtttcatttttataatgtctatattatataacatagacattatattatagaaaatatatatagaaaaatatattatatataaatatatattatagaatatagaatatatatagaatagaatatatattctattctaaatacagaaatatatagaaaaatattatatattatataatatagacataatatccttttatggatattatatatttaatgagacattgtcattataccttcctttacttctttaagtatggttttcattagtttcaacactatttctaaaggctactttgaattctttgttaagtctgacatctgggctctgtcacagatagatcccattgcttgcctttttctcttgtgtatgggtcacgcctttctacgtcttttcgtgtctcataatattttgttggaaactggaccttttgaaactctggataatgattctcctccaccttcactgggttgtgtatttgttgctgtttgcttatttattctgggacttgtctgaactattttactaaaacctatttctcccctgtgtgaatcctttgatgtcagagggctgtcttgggcatgtgcagagtcacagtgggataacagttttagcagggatttctttgggtctttccctgatatttctgttaaacagtctgtctctgttgttatcatgtctatctgttggactccactaattgttgggtgattgctgtattgtttttgacagtgtcctggggcatcaattgctccacagtctgatcagatttggacacttttgctggggtattttttttttttttttgaggtggagtcttgctctgtcacccaggctgaagtgcagtggcgcaatctcggttcactgcaagctccgcctcccgrvttcacgcyattctcctgcctcagcctcctgagtrgctgggactacaggcgcchaccaccacgcccvgvtaattttttgtatttttagtagagacggggtttcactrtgttagccaggatggtctckatctcctgaccttgtgatccgcccaccttcggctcccaaagtgctgggattacaggcgtgagccacctcgcctggccttgctggggtattttttgaggccagtctttgagatttgttctaaccccaaaagggctcttctttgctggttctttttctggttatctaatgttagctttcctatgatttagcttgtcactgttacacatcctcttaaatgcttaccaccaagatttccatttttttctcagaggacctttagggttttactttcccttatgctataataaaaagtcagttcctttggggagagctttggaactctctgttttatggcttgcctttctgttggtgtacagtgtctgagccattgctttggagttggaggcaaggacaggggtcttgtttctctcaaaatgacactgcttcttttctagctgggtattcatggagtcagtatcctctggtcttctcagtttgcctctcctgatatggagcttctttgctgatagcgagctacaccagtggtgactggggggtccagtgttgttgctctgctatgcctgaagtacagtctccatcctataactggagacattgttgaggaagggagcccctgtcttcttggccatgcttgcctggagtttagcctttgcaacaaagagctgatgttgatgagaattctggaggccttggtctcctggggagatacatagctcttgactgggagctaggaattgtgggtatctcctctttttgtccacacccacctgtactggtcctgctgtgtgaaggggagggagtagatcatggctcaagtgctacagactctccctctttctaccaaaggttagtagacttccttgaataaatctttccttatttgctatatgcattaagaacatttccagagacagtaaatggctgctttagaattttcaccggtatggttgttttactggggagaggcctgcagagctaagtcacaattttcttggttttaggtatgatggatgatttttttttattggctccaagacatattatacattatgttcagggatgctgggtcctatttaaatcttttattttagcaagcagtctccctgtttaggtttagcatataggtcttggcctactttttttgtctgtggttccactgtgagtttaattttcacagcatttgtgttgttatttaggtctcctctgtttatttagtattattggacttttcactggtctctcttagtgctgcctaaggaagccaaggactttccccaagccaagcccttgggtgtcttttggtgggggagggttgtattgagatcctcctaatagtattatccagcctggtgtctcaggtttggggaggaaattcttgggtccatggggactaacaggcctcttagacccatatacttgctgcagttgtctcttttggtagctcttccagcctgcctcaatgtctctggtcaggggaggagagtgtcaggccaatagggacaaagagcctttccagtggctgggcgcagtagctcatgcctgtaatcccaacacttygggaggccgaggtgggtggatcaccagaagtcaggagtttgagaccagcctggccagcatgacgaaaccctttctctacaaaattaaaatacaaaattagccaggcttggtggcacatgtctgtaatcccagctactgaggaggctgaagcatgagaatcacttgaacctggaaggtggaggttgcagtgagccgagatcatgccaatgcactctagcctggacgacagagcaaggctccatctaaaacaaaacaaaacaaaacaaaacaacaacaacaacaacgaaaaaagcaaagcgaaaaaaaaaagcttcccagaatgggctacttgccacaattgggtctcttttattggttctgcccacccaccttgatgcctctgggaaagggaagagagtcttaggctcatggggacaaaggagcatcctatatctagctgttaggtataactgagtccctttttcaatctccgtctgcttatcctgatgtctctgggggaagaggggtcttgagtcctcgggggacttcctgaaataagtctcctagctgtggttaggtcctgtttgcttaatttggttttgtggaccttttgcatatccttgttgtttttctctctagtttttctatcagttttccagagaggaggtcgaagtttctaactataactgtggatttgtctatttctccttttagttccatcagttttcactttatatattttgcatttctgttgtttgttacacacacatttagaatggctgtgtgttcttggttgattgacccttttatcattatgtaatgtccccctacattcttggtaattttgtgttccaaagtctactttatctaatattagtatagctacttattgctttattttaattgatgcctacatgatatatctttctatttttcagtgccttcttttgcttgttttatgtattatgtcaggctggagtacagtggctattcataggtctgatcacagctcactgcagcctcaaattactggcctcaagtgatccttccacctcagcctcccaagtaggtaggacggtaggctcacaccatggcacctggcttgtcatgtgtgttttctgtaaaatctagaattagttggaggaatagagagaaatgtgtatactctgtcttgtccagaaccagaaatctagttcacctatttctgttttcttgaatgatctgggttggctttttaagtctttgaggctccgtgttgcactcacctaattttagctcaataagatcatgttactgagtctactactctgtacatcaagggctgtagtggctcaattttttttttcaaagatcaaattttcaaagtccatatatttttatcaaatatgcccttagccttttgttgctttggttgcatctgtccctccactgcctttgtaggcatttggttttggagagttgcaatgatgtatgatctgcaaatctccatctgctgcctgccactgactcagcatgaatagaaacaaaaattgactataaactggttgacaccaagatagacctaataacatggcttatttgtatgaagttggactctgctattaattcattcagtatgaagtgcttactgtgtgccaggatctgtgttaggtcctggggttacagagctagcagtgccataggtactgattttggagagttcatagactactgagaggagacaatcaaatagggtattcggtgctatgataaaggtgagcacaggttgctgtgacaatagagaacaagggtactcaaattagggtaggctctgttgatggaagtgacacctgagttgagtccctgatatagtttggatatttgtctctgcccaaatctcatgttgaaatgtaatccacaatattggaggtggggcccggtgggaggtatttggatcatggaggcagatccctcatgaatgccttgggccatccacttggtgataagggagctctcactctgaattcacatgagatctggtcatttgaaagtgtgtggcagctgggcgaagtggcacatgcctgtaatcccagcattttgggaggctgaggtgggagtttgaggccagaagtttgagaccagcctgaccaacatggtgaaactccatctctactaaaactacaaaaattagccaagcatggtggtgtgtgcctgtaatcccagctacttgagaggctgaggcaggagaatcgcttgaacccaggaggtgcagtgagccaagattgccccactgcactccagcctgggcaacagagygagactccrtctcaaaaaaaaaaaaaaaaagtgtgtggcaactactcttgaccactgtctctctcctcctcctgcttttgccatgtgacatgcctgctaccctttcaccttccaccatgattggaatcttcctgaggcctccccaaaagccaagcagatgctaacactctgtttcttgtgcagcctacagaaccatgagctaattwaacctcttttctttataaattacccagtctctggcatttctttctctttttcttttttcttttcttttcttttttttttttttttctgagacagggtttcactctatagcccaggctggagtgtaatgttgtgttctcttatcactgcaacccctgtctcccaggcacaagcgatcctcccctctcagcctccagagtagctggaactacaggcacatgcctggctaattttttgtatttttggtagacacggggttttgccatgttgctcgggctggtctcaaactcaagcatttctttatagcaatgcaagtatggtccaatgcagtccccaaggatccataaccagtcaaggattgggggaaaccttaggaagcagcatgagtaaagggagtttcaagaggaagtgttgcttgtacttatgggctagaatgagatctgtgacctcagaatttgatagaaaccaggacacctagagcccagtaggatatgcgacatattttggactttagtctgagagcagtgagaaggcattgggactttttaagtagaggagtcatttaatttgatttgtgtttttactgaattcctctggcttctgtgtgaaggggctggagagtggcaagaacatggcagtgagttagaaggctgcagggagcagcccagggagacagggttgtggcttggcttggggaagtgattgtggggatgcagagaggtgaatggattcaggaggtttaggaggaagaacagaaagaatgctgcgagtaaaagatatagatggtagggatgagagtgaggaagcaaggaagtttctgccaaggattctgccttgagaagactggagaagctgtgataagcagggcagtgggagagagtctttgtttacatgtggaatttggggagactgtggagtcgccatgttgagatgcccacgggcagtggatctgtggatgggggggctcagtactgcagacatagactgggagggttttttgtttgttcgttttgttttgtttttgagacggagtccccctccgtcacccaagctggagtgcattggtgcgatctcagtttactgcaacctccacctcctggrttcaagtgattctcctgcctcggcctcccgagtagmtgggattacagdyacacaccaccatgcccagctaatttttctatttttagtagacataggttttctccatgttggccagactggtctagaactcctggcctcaagtgatccacccgccttggcctcccraagtgctaggattataggtgtgagctactgcgctcagccagactgggagttttgaggtgctttgtctcatttatctcacttaaaataatttcaaaatatgttaaaaggaaatgttatttgcaatgcatagacaggttttcctcgctagttgctgaggataaaatccaaacaactggacctaaacagacaggattggaagaggctgttctggaccaaatgggatgctaaaccttagaatggattgacaagagaaggccatgcagaatggtgagaaggccctacttacctcagcccagcttcaaggccctaagtgagggatacctggaatgcctctgaagactggcatttggatgcccattccttcccattgcagttgccaagcccaagagcagtggagaacaactgtaccttcttgtcatgaagtgtgtacaccggaaaaaagtaaatgcttgtattttctttttcctctctttcttttctatatacagctctccaaaaacgcagatttctctagatcacagttgttcgtggagaagtgagagtgacaattttagagtaaaaaatttaatattgtgggaattatctctaaccagtcaaattactaatgaagatatttattcttgggaatctagaatcagctatttaagctttctaggatctggagtcacacagacttgagttcacatgatggctctttcacttaccaatcatgagactttgggttaatcactgcatctacttctgaccttcagtttcctcatttgtaaaaggagaatgctacctcatgggactgttttgaggcccaaatactgtatgtaagtgagagggctttataacgtataagttgctctttaaatgttatttaatcattatttagcttctggtttcattctattaataacattttaaagtgttattagaaaaattgtaagattcttgctaatattaaaatatgttgctttatttaaaagtaactcctaattcatgcccacctaataataaagaatatcattaggtggctgtaaacaaaaaaatcaaacagttctttctttcctctatacactcacacacttctggtcatcaaaatgtgtgaatttttccgacagagaccaatactccgacactagctgggtgtcttacaattcaattcagttctgaaactaaccagcattagtgcaggccccatagattaagagctcagtcccacaagtctgccccctccccttcagacatctatctcaagtcccaggttgtcacctgtacttctggctgtaaatcaaggtttccacgaccccctccttgggtttgacaatttgctaggacagctcacagaactcaaggaacacttgcttacatttactggtttattatttaagaaaggatacaataaaggatacagatgaacagccagatgccaaggtacataaggaaaggtatgtggggagggatgcagagcctcttgtcacctccatgtgttcaccaatatggaagcattctaaaccctgtctttttggggttttgtggaggcttcattaggcaggactgattaaatcatttgtcattggtaataattcagtctctctttttatcttttgttttgagacagggtctcaccctatcacctaggctggagtgcagtggcgcgatcacagctcactgcaacgtctgcctcctgggttcaagtaatcgtcccacttccacctcctgagtagctgggaccacaggcgcacggtctcactttcttttccaggctggtctcgaactcccaggctcaagcaatcctcccacctcagcctcctgagtcactgggactgctggcacacaccacgacacacggctaatttttgtttttcctagaggcggcatttcgccatgttgcccaggctggtctggagctcctgagctcaagcgatctgcctacctcagcctcccacaaagtcctgggattatggacgtaagccaccatgccccgtcaacaactcaatcttaaacccctctccctttcctagaggtggtggggctggtctggctgaaagtttcaaccctctaatcacatggttggttcccttggcaaccagccttcatcctgaggctatccaggagcccccagccatcagtcattcattagcacacaaaacatctatcacttcagagattccaacagtttttggaggaatgaaaatcaaaatatatatttcttattataaatcacaataccacagtgattattggtatgtatgcttttaattttaggctaagcgaggattgattctattcaatttttccctcaggcttataggaacacatttaagggcatctgttgatgactcattaactgtttcaaacctaaaatgtgtcaaatgctgtgactttgcaactattgttgctcttccctttagcacgaaatactttaatgatctcaagacatttatattatcagatttttgcatatattcactaaaatttggttttattaatggtctcgatgtgtcccataaatattcctggtttccaacttgagctggatttattaggaagaggcaaaatttagcttatgtgccatacctgaaggaagttacgtatcgtagcttgtgatgctgtgggacagctaaagaacaagcctttacctggtgacagattttaactggggaatagttattgtaaaaaatattttcattttttttagactacaagatatgcgggctagcattggatgcttgaaaggaaaattacatttttgctgaaatccaggcaatgcaaaaattttatggacttctatggatatttcttgatgcttagagatttgtttttttaattgcaaatgtgaattgtctatttacaaatgctattacatatggagcgggcctgtggtgtatggcactattccttggactaatggtacccaggttccattctctgctcagctcggtggctctagacaaagcccctaaaatgctgtctgcttcagtctccttaatggtgaagtggaaatgaatacctactgtcacttaactcatggagatgctggactgataattagatcatgtaagagcactttgagctgtattgaaaaatatgttgtctcaaattaagtagagtctatggttttgtaaatataaatatattgccagaaaatacatcactgggggagcaaaacatgtagaccaaatataacagggattagtaacatcagtaaacatagttgggaaaagatggcactaaagaaagccaagaagaaagtgttgctcttgtaaaccaaaaataaaatgctgagacctaccccccaaccatctaaatggacttcctcctcgaccaaggcactcttaaaatttaacttgaaagactggttcaagtcatgacaggttgtggcagtgggacatgcctcatgattacctctctggcattaacatcaacacagaccttaagtctgataagaagcatttacaatctgttctcttggaatcttcctacctggagacttcctctgcacaataagaactttggtcttcataatcctttatcttaacccaaacatttcctttctattgatcctaggcctttatttagataaactcaaccagttgtcaaccagaatttttttttttttttttttttttgagacagagtccagctccgtcacccagactggagtgccctactgcaatcttggctcactgcaacctatgcctcccaggctcaagcgattctcatgtctcagcgtcccaactagctgggattaaaggtgtgtgctaccacgcccggctaatttttgtatttttagtagagacagggttttgccatgttgggtagactggtctcaaattcctggcctcaagtgatccacccgccaaggcctcccaaagtgttgggattacaggcgtgagccacagaaaaattttaaacctacctataaagccggaagctctccccttcaagttgttccgcctttctgaaccgaaccaatatatttcttaaatgtatttcattgaaatcccatgcctccctaaaatgtatacaaccaagctgcaccgcgaccaccttgggcacatggtctcaagacctcctgagggttgtgtcatgggccgtggtcactcctatttggctcaaaataaatcacttcaaatatcttacagagtttaactcttttcattgacactctgccaaaaggagccctgaaatgttggtcagatttggataaggaccatggccatgtggcttaaatggcatttgctcgcttgttggtaatgagttgcatttgaagaggtggaataaatggagacaaccggcatcattgggcacctgtggacaaagaaaagcctttttggttgagccaaggtgatactatccacatctgcctaggaagttgtttttttgtttggagtagctgggactacaggtgcccgccaccacacctggctaatttgtttggttttgtatttttagtagagacgrggtttcaccatgttagccaggatggtctcgatctcctgacctcgtgatccgcctgcctyggcstcccaaaatgctgggattacaggcrtgagccaccatgcccggccctgcttaggaagttttttgaaagagtgtttatttgtgaaaatgaaggtgcttctttatgtctatagctttctggctttactcctttcagagatttgacttgtaaggcaatagatagaaatgatagctcatcagcatctaatgagccaaattacttactccataaaatattatcctactttctaactccaaccatacaatttgaaggaaagaagcccaggggtcccgattaagccattgacatgtctggctgaaggatgatatgggcttctcattgactgagccaacaacatgacctgcccaggcgggatccgggctgactcctaactccaggatgaaagcaggaaggtaaacagtctttgggtaatttactcaaattgtagccagtgaatacctcaagcatggcactcaccatgctgtagtgtaattgcctggcttttgtttttgttttattttgttttacctgatgggagctctctaatacttcaaacatggcacttaccatgctgtagtgtaattgcctggtttttgtttctgttttcttttgttttaccagatgggagactatgtctttcatgtctgtcttcccagtgtctttgtccgcagtaatcaattattgtatgttgaataagcaaaattataatttttaagcaccataaattcaacctgccaaaagccaaatccaattttttgtctttcaggggatggcacaatagccagcttttcaggaacctgagtgttttccaaaccagcacttttcaaacttaactatgcacatgaatcactaagttttgtgaaaatgaagattctgattcagtaggtcaggggtggggcatgagattctgcatttttaacaatctcccaggtgaggctgatgctgttggtctgcagactacaccttaagtagtaaaggtctagaccctggtctctaccttatctccaaaatttaatccatcaccaagtcatgttgtctccatctcctttgtcccaactcatgtctgtttctgttgccaccactttagctgaagccttcatcatttcactgcagagattattgcaatagctttcatgtagtctacctgctctttattctccactccactgtctatactgcagccaagatgatatctctcaaatacacctttgggcatgtcaatccattgttaaggggctttcaatgtaggataaagtaacagaccttctgtggttagattgcctttatattgggtgggagcagaggcaggggcaaaacaatgtgaggactgaagagccaagagcttagagtactggtggaccagtagtagggaccaacccatgcagatggagctgcctacagttattgtctcctccatccatctagccagttgctggttagctagctgcgcaggcatccaacatgccaaaagtattggctcttggaccagacaagctttttcatgtcatttacgctaaaaccccaataacttgatgtctattctttcagagtctctggcagataagatgcctcactgttttttttcttttaaatcaaaatgttagctagtctgggtcccatcagtccaaaatcccttgctcatgttgcttttacgtttgaattactgagaattttagtgtacatcgatcaacaatttgttctatatcctgtacctaaaagatgttttgccatttcctttttcttccagatttttttttctgtgttttaagttggggtttggtagatggttactgtgtgcacattctcacggaggtgtaagcatcgatgatactgtacctgtcctgggaatgggatgcagtgccttgggtggtttcaggagattgacacacttccaggaccaggcattttcatttccaccttaaagaaggagcctgctgtgctttctgagacctactgtatctgggatggccagacttcaggagacaagaagaggaaggcatcctatccttttggtgggtggatggacgggccgaatctatctcagaaatttttaatttttacttccatgtcactttccagtcttcagccagccccccaccgtctacctcccactgctggagtgtggcttcattcaggggagaatgctgagctctgttgacatttggtagaatttgttttcttccctctttaatttagcaactaatcacgggggttgttctttgttcatctttccagggttttccgtacgctgactaatgcttacagctggctctctctggagagaagtgctgggaagatcaatcaaatgaaatcttaaagggtaaatcaggttttcaaatgtgttcaggcagctttaaatcgtttcagtgagaagaagtgcttacaagggcagaaatttgcccagcgaaatgcctcccaatggcaacagaacaatcacaccttggatggctgctttgtagcctgagtgtccagttcttctgagatttccaatggccatttacaactcaagagtgagggacaaaatgaagtgcatttgacttgaaggaattcactaatgcaagatcaaagttgtaaaaactgtaccttaatatgctctatcaaagggctgtatgcagatgttaagaaagggaagctgcacaaaatatcccttttcaataatttcacattttctttagtttttcagctcctataaatctcaagaaataattaacatgaaacctatattatgtttcaggaaaaactccagagagtctttcttaggcttttggaagtcagtgatgctgttttctgtcttcttagagaagtcctaaaatggaaaaattttatcatggaaattgacccattcagagcagagagtttatgtgactttatggtacaggaaatttgaaaatcgcatctcatcttttattttctattgtcatgttaaactatggttgtgcctatgggattaagtgaatattctagccacttgcattaaatgattagccagtcttttcatagtgacagttggttgtatgtgctgctagtcctgcagcggtctagtctgctagtggttaactatggagaattggtcagaggagtccctccccctattatacacatctcattaaagactctctgccactgccaaaccagaaaaggcaacttatttcacgattcattaaagaaaacataattggraaggtaattttgtaaagtcatcatcaaacatagtccaccacccagtaggaattatcctctcattatctctttttctagatagtcattgacattgttcccctctgttagcatgaataattaaggactgagcataaagaagtggtgtggacctatggtcaatctgaaggtgtcatcagaagagttagcagggctttcttgccttcagcaggccatttattctgagctaacctgccaattgtatttagaacagggaccattaacagggtgactgtttggctggctgtcagtaggctgtggggctttttccagagcaaatagagaagccagctgggcttcactaagaccacccaggaagagagatcatgtcccacctgatcacattccaagcaggtagcaaatgggctccagttgaattgtacttctgaaggctttctgaaggggtaggggaaaatacctcccatcttagaaattatggctgctagtgtccagtttaaaaaatttctggccctcagcaccaagtgtcttagctttttgtccatctatagctgtcagaaagacacgctttgtcttcctggcaaaactgcctctcaaggtctatgccatcattatggcttggtttaatcaagctaccagggttgcccctgtgtctctcatctggctcttccagaagggacagtttgggaaactttcagagattctgaagatttcatagggggagaccacacttaaggaataagaccctccacacattgcagtgagagtgacatgttcattgccaccaaaagaagcccctctgttaaaacaaacctgattccaaacagagctaaggttgcttgggggctccgtattgtaaggcctatgggcatgcaatgaaataggagttgatgtggactctgaaccctgaagaagcagtttaaatcactagcactgctgtttattagctgggaaattttgggcaatctatttcagttgtcaggtcttcagtttcatcatctctaaaatggggaggacagtgcctgtctttttacactcctggacttgtgttgaggagatcatggataaagtgtgttgcacacagtaagggtagttatcatggttattaaccacactgcagctaattgggctctagctaccccatttgtccctggtcaggcaggcccaggactttcttaagcttttctcaccttaaagcggaaacacattccctctcctgtggggtcacgtggctctgtttaaatgtggctctaaatgagatgtgtgccttttgacaggtcaccttgtaaagatacacagcatttccaaccatgtaaaggtggctctaacttcttgaaatcctctctttgagaactgcctttagagctggtcattttagtcacaaaagaaacatctttcaacagggtcttttttttttttttgagagggagtctccacccaggctggagtgcagtggtgcagtctttgctcactgcaacttccggttcccgggttcaagcgattctcctgcctcagcctcccaagtagctgggactacargcacacaccaccatgccccgctaattttttgtgtttttagtagagacatgatttcatcatgttggccaaactggtctcaaactcctggcctcaagtgatccgcccgcctcagccttccaaagtggtgggaatacaggtgtaagccaccatgcccagcctcaacatggtcatgttttgaatatgcttggacagaaccttgccaccatttctcatagtcatgtgtatggtatttaaaccatagaatgtcagatttgtaatgccccctagaaatcttctagtccagtagttttcaaactatgttccccagatctcaactgtttggagaagggacatcaaggtcagggaaaatccaaagcaccatatgttcttgatgctaagatgccattagttgtagtttgcaccatcaattaatactggcatttcaggaatattaaaagaatgtatgcagtcattctaagacccatccttattttagatatgaacttcaattaaatacagtattagggttctctggaggaacagaactaataggatagatgtatatatatgaaagggagttcattaaggagaattgactcacacgatcacgaggygaagtcccacgataggccatctgcaagctgaggagcaaggaagccagtagtggctcagtttgagtcccacaacctcaaaagtagggaagcagacagtacaaccttcaatctgtggctgaaggcctgagagcccttggtaaaccactggtgtaagtccaagagtccaaaagctgaagaatccggagtctgatgttcaggggcaggaagcatccagcacaggagaaagatgaaagctggaagactaggaagtcagctaattccaccttcttcttcctgctttgttctagccacgctggcagccagttggatagtgctcacccagattgagggtgggtctacccataacactctgctgactcaaatgttaatctcctatggcaacaccctcacaaacatatccaggaacaatactttgcatccgtcaatccaatyaagttgacacttaatattaaccatcacactgtccatcatcaaattaaagaaatataatgttttctgttaaacagtataattttacacaattgggtaagcactgtttcattgctattttatagattgggctaatgcctatggtttcatgtcacagatttctgctcctacagagtttgaaaattgacctaatctaacccatttcttctgtagaggtccagacaggagaaggtcatacagatagttagcagcagggctggggctagaactcaggcttcttgactgccactccagttctcttcacaatgttacagtaccttttgtctacagccatattgcataccagcccagctttcctttgccatgacttggtttgcatgcaggaattgtaaacccatcttattaaaagttaccaatgataggctgggcccagtggctcacgtmtgtaatcccagcactttgggaggccgargcaggtggatcrygaggtcaggagttcsagaccagcctgaccaatgtggtgaaaccctgtctctactaaaaatacaaaaaaaaaaaatagccgggcgtggtggcacacacctgtaatcccagctactcggggggctgaggcaggagaatagcttgaaccygggargtggaggttgcrgtgagctgasattgcaccattgcactctggcctgggcaacagagagagactctctctcaaaaaaaaaaaaaagttaccaatgataagaacattttatgttactatagcccttaacattttacagaacaattttatattctccttttccttacatctttaccacagcttgttaggtggagcaaggaggatatcatcatcatcattattatcatcattattaagacaatcacctccattttatggatgagaaaactgatacccagggaggataagcaattggctcaagatcatgcagacagttaacagaactgagaagaccatccgtgggtcctgatttactcattcaatgttgttacacattaaagcaaaacataaatctaaagatacgtcttgaggaaagagttattcactagaagcttgcaagaacatcattttattgctgaaagcagctcaccttcaccagggacgttgagtcattgatatcccagaaaccccgtgtcattgggtgatttcaactacaagttggtgccatagcctgagccctgagccctgagccctgaggatggccttatactgagcattgggtgttttatcataacagagacagttaaggtttaacaatgggctaatggccgatggcagtgcttcctgcactgctagtgagagtgccaaaccaaggaggagctgaggaacagtccagtggctaatgtggggattagctgctgctttgggtaatctgtgtccagttcaggctggttacaggagagcctcaaggactcatttcacttggctgcttcttgacctgcaattttgcatgctgcatgctgcaattttccctttgaaaatacatctttccttttaaaaatgtggtgacatgtgacttctctgaagtttaaatgtttgatcatttttaagctggcacaaaaatggttataaatcttaatacttaaaaatgtaaaaggaaagcataaaccctaccaacttgtttggtcccttttgtgtgtttgagagagcaagcccagctcagcaggccctttggatgtccgctgaggttcagaaagcaatgatctagtcgcatcaagatattgaatcttctgaattctggccttgtgccccccaggtcagggctgttgtgttggttagatggctgcccaaaaaatggtcctgccatgcccctgagtttccctcttgtgaatgaatagaaagtttccatctacagagttggcaagctctgtgctgttaatttcacttagttaaaaggaaaaaaataactaaacacacaattattagtaaaccaccctgcagacaagtttaggattctaaagaacatttggtggttaggcttaaatgctgtaggctatgattacccttaattctgcacacagacaggcttcagagccagaagttacatgatttggtcttgtcagatgaggtcccctttttgccttattcacagggagattatggaggtggtaattgtcagtggattccaaaactccctggtcaatttaagcatttatatgtgggtttaataaaatgatgatataatacagaaagcacactgtcagggaaggaagtaactattagcaacatcatgacaccttaatctttttctccctctgggagagcagaatgggttaaacagaaggtttgcttttattattgaagcacaaaaaatcacatttttgtctaagttgtttagtcagtgagttttgtgtaattcaatggaaataattccatagtaacttagtaagtcagtattgaaaaggctgggtgaaaggacagcattttagagcaggcagtgggaagcctgagggagcaggagagggggagaggggctggttaatcagccgtcatatgccaggacaatatataatcctgtttgatttggtggaacaggccctttatgggtaacatattccccaatcccaaatcaggaactgtgaactcattttacttgctataacctcaatcctcataggactggggcttataaattgtggttgactaagtggggagggctgagttgtggaagatgccacctaagggtagtggggacaagcacttcaccaggaaaatcagtgacagaggatttttcagtgtaactttgccagctggagacctctgcagccagcgatggccatgcctggatctcactcaggccctgggcttgccacaggaggcaccctgctcacttggcccagggggctgtgcttggcttgcactcctgcccagatcccacacttgccacaggatccacactcagcctgcagctgggccgggcatgctgcaaccagcttcccccttgtgtgctgacatctggatgaggggaacacagtggcatctgaacagggatgccaacaacctcaaagccccagagggggtgttacagtgtgctaacagttgttttagtcccaccatccacagcctgagcaaacaggggtgtgttaacagctctttcagtcctgttgccctgctccagcccgcagccccagggctaggctggccctgctgctgcttcctggagcatgaagtggctgcctggcactggcggagggcagagggctacagttttacagccttctttgtacccacgtttggcaggttctgagttcttgtcccacatccaagaagaatgagggtacgttgacaactgaagtgtgaggagagttttattgcatggcagctctcagtagagaggggactcgagaggccagccctcgagtggtggtcccaaagtgtggctgagtccggggtttttatggactcggaaggggatgcacgctgattggtttgtgagtattcaaaaaaggctaaaacaagggcaccactcaaaggtgggcacgacagtataaaaagccaattagggaagggtaggtatatgtaaaataggtgaagggtggggatcaattaaaggaaagcatgccagatgggaagagaggttctcaattttgtccatggatttatctaggacttgtagcttggctttcaagctttaaactgtctatggtttgaaggtggggttttatcagggacttgcccctgtctgcctaagacttgtctgccttctgctgctatgagcagtacacagaggcaggagcaaaagcagaatagagccccatctgagccatgagttgggagattttacaatgggtcagtaaaagggacaaaatttatcaaatggaagagcacaaagatgagcatttggatttgtcaggaaagttccaagagaaatgttagcacaatcacagagggttaaattctgtaccatgaactacagatgaccctgactcctttgttggttataaaatacctttctagctccatataaagcaggatgccacagcctacatgtattaaatcatgcattgtattgagttgaattgaatggtatttgggagagggaggggatagcccaagtggtcccaggttaggaccaacactggggcagctgtgatcttgggacagaaatgtgaaaacacagactgtccagatgcagaacaggtgactttcatcaaatccagtccctccaatgaacataagaggaaactgatgccccatgaggggaagcaacttgtttcaggtcacctaccaggttagttgcagaacagacctaaagggtaggctacctaattttcaatttagtgtttgcttctctttaggctttattgttactttgcaatggagatcatacagatatgggtcaggagactcaagaggacaagtgatttgccccaggctacactagtgagcggcagtagccagtgtttgtctgattccagagtctgtggacgtaactacagggatatatgatagagtgttttgtggttggaggaggagagaattccttaagagtgtgtgctcatgaggccaggtgtggtggctgacgcctgtaatcccagcactttgggaggccgagrcaggcagatcacgaggtcaggagatcgcaaccatcctggctaacacagtgaaaccctgtctctactaaaaatacaaaaaattagccaggyrtggtggyvggsacctrtagtcccagctactcrggaggctgaggcagsmgaatggcgtgaacctgggaggtggagcttgcagtgagccgagatgggccactgcactccagcctggacaacagagcgagactccrtctcaaaaaaaaaaaaaaaaaagagtgtgtgctcacgaaaggcagctctaaagaggtcacatttaaactgaaatctaagggatcatgggaaagaattagccatagcaaagccaggggaagtccaggctgaagtaatcacaattgcaaagaccctgaggttgatttgtccctgggataaatgtccttgcctgatgatgtgcttgcctaagtcctttttttagaggtaattctttgacagacccattgctgtctggaactcccaatggacaattactgctttgttggtgtatctaattcaagagttagcagcagaggctcatgtcatgaaacttcccttcaagcttgtttgtctgctgagtttttggtaggagcaggatgggatcaggatggttagggggccaggagcggtgggaaggaaatgagttaggaatggtcttttatgtgcccatgagaccaggctactggtaaaatactgataaatatttcccctctaagtttttttttttttttttgagatagcgtctcgctctgtcacccaggctggagtgcagtgctgcaatctcagctcaatgcaacctctgcctcccgagttcaagtgattctcctgcctcagcctccctggtagctgggattacaggcaygygccaccacrycyggytaattttkgtrtttttagtagagacggvdtttyaycatgttggccaggctggtctcaaactcctgacctcaagtgaaccacccgcctcggcctcccaaagtgttgggattacaagcgwgagctaccacacccagccccttctaagatttttaacatatgtcatgctgcaggattcctattccattagaggcttgtatttaccgaggcaaatggacgaaaggcaaggaaccagtactagaaatataaaaccatccctgtgttggatacgccctggaacaaaggaatataaggccaggattttactttctgccctggaactgacttccctttgactctgcaagttttactttcctgctttatgtctgataggcataaaatgcctaccattcttctttctaatacaattgtaatttcatcaatgggattagtgaaggcactaacaaaatctaaattctccatagtactgatcatcagggtgttctttagtagtgacttaaagaaaatcatgctctttgaaagaatatatataagttgcctttacattgctcactgagaaaagataatggagcccaaatctaggcttcttgttcctcgcctcccttttttttcctgggtgatcatacttttcaaggttatgttctttcatattcagtgttgaccatgcaaaactggtgaacaagaattggttctgggatgatttgttccagctataaagtagaaagcattttactaaaataggatgcttagatttgtttggatctacagtttattcttaactaaaattccaggaactgttggtaacagtctagattcatggcaaccagtttttacaagaattagaaagaaacgaataaaatgttctcattataaggttcaggaccgaatttgaaggctttcaggattccagatggcaaatggtagagcgaacgtgaaaatattagaaatttatgctcaatgatcatcatcttctgtccagtgaagaatgtagtttaagcaggatgggtgcgggcgtctgatgtcctcatttatttccacctctgtagctatttaagtgatgatcattcttggtggtggttaaattatgatgcacgaaatactatctccctaaggaccttgctacaggacagaggtgattacaagaaattgttgctgctgatgtaatgtttcgtataccaagattaaaccacaagatgaagtaatgtacattttttgcctttgaaatgcagctggagggaaaccagggtaagaactattgccaaatgaaatataatgccccaggaaaaatataagatactgtaaatgtaaaatcattacaaaactgaccatctgggtcatatattaaaccacagctttcaatttgttatggtttgaggaatgacttcacagtgtgtaccccttcctccgtaccttcctcagcctcaggaaagcattctattttcatgagtgtagaaaaaaaagtaatcttaaagttttgtttttaaaaaagagttccaatcaatagctcttaataaaggcacagtgtttgcttacttctttgcatttagtcctactatatagtcttgtgttgctaattccactttagctgtggcaaatataccagtgtgtagccaccgggccatgaggtaaattgaatccgtgtggagctgacagttgaaaaacctctgtctgcctcagttcaggaaacaagagcgtgttcaactcactttgggaaacccccaggcattaaaattttggcattttcatgttttgagagaactgaggagtagccctgttttgataatcatttaaaaatattttacttaattagagcagaatttgctcaggcagaaaatcacatttatatggtagccaggctgtaacacctcatagctacccattgtctctaatcagaaatgacagcctggtgactggctccatgctgggtgaagtccagcaaactgcaggccctgtaagtgcctaatcccaaacctgggcttccagtggagttggtttttttttttttttttttttttcagtggagttcttcaatgggtctggctttgaaatacttctatcctttctagtttaggaaagcaatggcacaagaaacccatatataagtcagctacttttttgatgtgtaattcacataccatacaatttcccatttaaaggctaaaattcagtggtttttagtatatttacgaagttgtacatccaaaaccacaatcaattttagaatattataattccccagaaaagaaacccctcactctttagccttcactcctagtctccccattcctcacacctctaggcaactactaatctactttctgtttctagagatttgtgcattctgataatttcacataaatggacaaatgcagtgtgtggtcctttgtgactgtcttcttggttcaacatgttgtagcatcaagcagcaattcatttcattttattgctgaataacattccattgcatgaatgcacaatttatttattcattcattggttgatggacattcagattgttttcagtttttaactattgtgaataatgctgctatgatttgtgtacaactctttgtgcagacatttgttttcatttctcatggagtagaattgctgggtcatgtgataactctgtgtttaatcatttgaggaattgtcaggctgttttccaatgtagctgcaccattttatatttacaccagcaatgtatgagggtttcagtttctccacatcctttccaacacttgttataatctgtctttttcaaaatagctgtcttagcaggtttgtgaagggttacctcactgaagttttgatttgcattttcctaatgattaattatattgatcatctttatctgcttaatttctatttgtatattttatatagagaaatatctattcagattctttgcttatttgaaaattggattacttgtcttaagttattgagttataattgttctttatatagtctaggtacaagtcttttatcagtgacaggatttgcaaaaacttcctcccattctgtgagttttctttcttgatgttctttgaagcatgaaagtttaaaattttgatgatttccagtttatgtgttttttcttttgttgtttgtgtttttggcatcatagctaagaagtcattgcctatccaaggacatgaagatttacaactgtgttttcttctaagagttttattgttttagctcttacatttctgtctccgatcgatttcaagttaatttttgaatatggcataaagtaggggtccatctttgtccatttgcatgtggacgtcgacttgacccagaatcatttgctgaaaaggctattgttaacagttccctccctgccccatagcagccatgcatggggcaacttccagtgaggtgagtatgaggttgtggcaagcaggcctcagtgatggtggcatgatgaccatgctctggggcttcatctgtaatgacccgttcagtttcaacagcattaacttggagacacttacagaaacttacaagattcctttttacttacaatatcttgccagagtattttatcattgcagaggcatctagtggaaagttaatggattgtattgtgggtaaagcagaaggttcagtagctagggaagaatggcaccgttatgccacagctctttctgttgcccaaaatttccatatcttggtttggctgttaaactcatagagttgttggaggaaatttcagaaaggcacaagacaagggtgcctttggttggccctttaataatttactgtacccctagatagcacagggaaacaagtgtcttagtccatttatgttgctataaaggaaactgaagctgggtaatttataaagaaaagaggttttatttggcttatggttctgtaggcagtacaagaaatgtggtgctggcatctgcttctgggatgacctcagaaagcttccactaatggcagaaggcaagggagagcagacatcacattgtgtgagagaggaagagagtagagagggagtgctrggctctgtttctgaatcacttcttggctgggcatggcggctcatgcctgtaatcccagcactttgggaggccgaggtgggcagatcacctgaggtcaggagttcaagatcagcctggccatcatggtaaaaccctgtgtctattaaaaatataaaaattaactgggcgtggtgggtgcctgtaattccagctactcgggargctgaggcaggagaattgcttgaacccgggaggcagaggttgcagtgagccactccagtctgggcaacagagtgagactccatctcaaaaaacaaaaagaaaaaaaaatcacttcttgagggacctgctagagtgagaactcagtcattatcatgaggatagcaccaagcccattcacgagggatctaccctcatggcccaaacacctcccatcaggccccacctctaacactggggatgaaatttcaacatgagattggaaggggcaaatattcaaactgtatcagtgagaaaaataaaataatatgagaattgagaaagaagcaaaacttttatgttgcatagatatgattgtacaaatagaaaatccacaattattcttatggatttattacaataaatgtttagaattaacaatgtttaagaagttggatataaattcagtacaaaaatcaattgcatttcaatatacaaaaaataacatttagagaaatatgtcatttgcagtgttaccaaaaaacattaagtgtttaggaaaaacctaacaaaagccatgcaagacctctttgaagtttataaagctttattgagaagcattcaacatgagctagctaagtgggcagatagactgcacttgtagattagatgacgtgatattataaaactggtaattctccccaaattgatccacagatccagtgtaattgcaatcaaaacctcaagtatttttgtgggatttgttaatctgattcctttttttttgaaacagtgtcttcctttgtcacccaggctggaatgcagtggcatgatctcggctcactgtagcctcaacctcccagactcaagtgatcctcccacctgagcctcctgagtagctgggactgcaggcctacaccaccacacctggctaattaaaaacattttttcatagacacagtgtcccactatgttgcctaggctgttaagctgattcttaaacttgtgaggtaacggaaatagctaaattaagacaaaatattcttttaattttttttaatatagagatggggtctccctgtgttgcccaggctggtctcaaattccttggctcaagtgatcctcccacctcagctgacaaggtattcttaaacaacaaaatgggcatacttgcccctccaaatgtcaggctataataaataagactttgtgttagcgttgtagtagttgtccagaccagtggaacagaatttgagaaacagatccaggaatacatggaatttgacatttcttagaggagaaattgcagatcagtggtgaaagaattgacttttcaaagtgtggtagaacaatttgacagccatgtgtggaaaaatttttcccagattactaccttatcatatgcacaaaaaataaattccagatttatgaaaaatctaggtgtgaaaagtaaagctaaaatgctctttaaagatagataatataggagagtgtctccatgacctcaggatagaaaataacttcttcaacaagccattgaagcaataactgtaaaggaaaagttcatatattcagtttcattgaagtgaagtcattttgttcttcaaaagatgtcataaggatcataacaagaccaaccacaagttggaagaagatatttgcaaaagcattacaacagtgtttgttggttatctggaatacatagagaagaactatagctgggaaaaataaataaataaataaatatgggaaagaccattaagtactatacaaaaagagaagagtaaatgggcaataaacaaaaactgcatttggccttattagtaatcaaaaatgcatattaaaatcacgatgcggcaccattataccatgagattggcaaaactaaaaatgtccaaagcaccaagccttggtactgtggggatggagttttactcaattctgtgagtgtaagctggtacaagcaggttagaaaacagtttggggccggctgtggttgctcacacctgtaatctcagcactttgggaggccaatgtgggaggattgcttgagaccaggagtttgagaccagcctgggccacatagcgagatctctgtctttacaaaaaaaaaaaaaatagctgggcctggtggtgtgggcctgtagtcccagctgctaaggaggctgaggtgggagggtgccttgagcccaggagttcgaggttgtgccactgcattacggcctgagcgagagtgagaccctgtctctatacacacacacacacacacacacacacaaagagaaaaaaaagaaaataaaaaaaggaaagaaggaaacagtttgacactctaataaagtggaagatatgcatactcttttgacccaggaatgacctcataactgttgaccttagatattgcactatgagacgcaaaatgagaatattcatagtttttaatagtaaaagccggaaacttttaacaataggactatgggcaacttatgatatattcatacaatggaatgctaaacaacacacgaggctaagtttcacaatattaactgagaagggcaaatcaaaaaaatttaaaatataactccatttatatgaagttcataaacaggagaaactaaactatattaggtggtaaattagatattacttggcaatgcctaatttctttccatctatattaggtagtaatacctaatttattgctacttaatattgctatattaggtagcaagcagcaagaagataatgatcacaaaagtgaagaagtggagacctcttggtgagggaggggaagttgatgactagagggacctgagggaggctacctttgggccatggccacatgggtgcttactgcagtctttaatttgtacatatggatgagaacattgtatgtatgctatgactaatctataaaatgagcatatcaattactgcaacataacatatagtaatttttaaaaaccaagtaacagaattgtggttaaaaactacttttttgagtttatcttttaagaaactatatattatagattgtgaaatattagcatgaaaacaagaaagtcatgtttttatgctgcaaaataatggtcacaaatcctatgtaataaaaattgatattgtgatgtaaaacaaaggctattattttctcactggatttttccccactgttttagcacccttgttgacaatcattgactaaaaatatgaggatctggactcttaattgtatttatctatacttatgccaacaccatattttattgtcttgattaatgttttgaaattgagaagtgagtcctccaactttgttctggttttcatgattgttttggatattctgggtcttttatagttctatgtgaattttatgatcaactcattgatttctgcaaagaaaagtaagattttgatagggattacattgcatctgtagatcaattaggggagtattgtcatgttaacaatatcaagttttctgattcatgcacatgggatgttttcccatttatttaggtcctctttaatttctttctgcaatgtattttagttttcagagtataaattttaggcttattttattaaatttattcctaagtatttaatttctagcgatgctattgtaaatggaacagtgttcttaatttcatttttggtttgtccattgctactatatagatataaaattattgttggatattggtcatgtatcctgcaaccttattaaaattgtttattagttctaataaatgtttactttattccttaggattttctatatacaagatcatgtcatctgcaaatagttttacatcctcttttccaactggggtgcctgtatttccttatcttgcctaattggcctacctaaaacttccagtacaatgttgaataaaagtggctagaaaaattatccttgtcttgtttctgatctcaaggggaaagtattcattctttcaccatggagtctgatgttagttgtgggttttttctagttattctttatcaggttgaggaagtccattctccttttttctttaagctattgattatcaggatggatttaggtggtcttgctgctttggaaattgtagacttccttcttaaagcctgctccattttatccttctaagatatgcatgattttggaaagactacaagcttcccagttagaggagggccttcttgtttttcaccctacatacaatgagcctccttgttggatgccaaagtaaggtctttacatccttcattccctacagaccaggcttcttaaattatcaggccacaggtaacaaatatatttcatctcctgtaccaattctgatgttttggtagtagctgcccgaaggattgttaagaaggaatctgaggccaggcacagtctcagtgctgtcattaattagtgttatctggcctggtgcactggctcaggcctgtaatcccaacactttgggaagccaaggctggcagattgtttgagctcaggagtttgagacctgcctgggcaacatggtgaaaccccgcctctaccaaaaaatacaaaagctagctgggcatggtggcacacgcctgyggtcccwgctactcaggrggctgaggtgggakgwttgcttgagcccaggaggtggaggctgtagtgagccgagatcacacaactgcactccagcctgggttaaagagcaagagcctgtctcaaaaaaaaaaaaaaaaatgagtgatatgtgtcactggtctggtagtagggaaggctgcaaattgatacaacttctggattagactgtgcctgtgcctcaaccaattccagtggcctttttctcagtgccctccgtactccttcaacaacattaaatcttatggtccatacccctttgtaccaccctctcttctttagatctctgttacaaagcaatattctgggtctcctgtaaagtctctggccttccctcccccgacttttcccctcaacatatctctctagctttctcaactgagcctttgatcctgtgtactgtttgcttgggatattttgccyttcttttacatctctccttgctgaaaattgtgccattcttcaaggtccatctcaaatctgcttccctggttttccccatacctgagagactgttctgcccttaaactgccaaggcataggatatttgggtaccatacctagaattgttttccttcatgtacttttctgagttcctgcccagtactgaaaatatgaaattttttaagtccaggcagggactttatattcttagcatatgactccctgcttttactatggtggatgctcaataaatgtttggtccttttaaactctttgcttgctgtctattggaatgattatttttaagatttcatgttatttctattataggctcattagtaatgctctttattttgtgtttttcctggtgtttattccaggacatacaatatataacaatttagtattagtacacatatataactaggttatatattgctgcatgacaacctgtcttcgaatttagtggcttaaaacaacaaacatttattatctaatagttttagtgagttaggaatctaggcatggctttgctgggttctctggctcaaggtctctcacaaggctgcaatcaagatgttggctggggctgcagtcatttcttctgaaggcttgattgagggaggatgcaattctaagctcatgcatgtggttgttggaaggattcagttccttgtagtctgttggactgaaggcctcagttcatcactgactgtcagctggaaacccccatcagttccttgccccatggaactctgcatagggcaatttgccacatagcatctattttcatcagagaaagtgaaagataataagagagggtgaacaagagagaaggcagagtctttttttttgtaccataatcttggaagtgacatcttagtacttttgcgctattccatttgttatgagtcattatatccatcacccattcaaagggcaggtattacacaatgacatgaataacagatgttgtggatcattggaagtcatcttagaggctgcctaccataacatccttctaacttttaatattctaccttgaaataataatataccattttagatggtatattattcatgtgaaaacctataacaatatattttaattttcctcttctcagcctttgaactacctttctcatcatttttctacatatgttataccacatatagtacaatatagtattatttaattaatttatttattagagatagggtcttgctatgttgcctaggctgttyttgaactcttggcctcaagcagtcctcccacttcagcctccaaaagtgctaggattataggcatgagccactatatctggcctattatttttgatttaaataattatcttttaaagagattttacaaatgagaaaccaatatttaatatttatgcacatttttatcatttacagtgttcttcattcctttttgtagctccagcatcccatctggtgttattttccttgtgatgaaagaactttattatttcttatagtgttggtctccttgcaatgaattctccctcaaaaaaggaaaaaraaataagaagtgtaagaattgatagggaagatataaaactatcattacttgcagttggtatgatcatctgcagaagaaaaacaagataatggatagaaaaaatgataaaaactaataagaaaatgcagcaacttataaaaatcaatagcgtttctctgtaccgatgataactgatccaaaaacagctggacttctggcagtaattttctcagactgctcccttatttcacctaatttttgaaagacagttttttttttctgtaaatagaatgataaggtgtcagttttttctttcaatacttcaaagatgtcacactattgtttttggtttgcatagcttctgatgagaagtatgccatcatttttatctttgttcctttgaacaactttcacattttttcagtacttagataatgatttgctatggtgtggttttttccttttatttttggcttacagtccattgaaatttttagacttgcgcatttatagttttcataaaatttgcaaaacttttggtcctttttcttcgaatattttggtacttcattgaaccctgtggtgtttcccatagctaactgatgctctgttctgtttgtctcagtcttttttctctatgtatttcattttgaccagtttctattgctgtgtctttaggttcattcatcttttcttccgcagtgtctattgtactagaaatcccagcctatgtatttttcattacagatactgtatgtttcatgtctagatgtttgatttgagtctttcctgtaccctccatgtttctacttaacatgcccagtctttcctctagctcccctattaaatgggagcatatatataatgactatattttaatgtccttatatgttaagtctataatttgtgtcatcttagtttgtttctgttgattgatttttctccatttaagagttgtatctttctaattctttgcatgtctgataatttttgattggatgttggacattatggattttatattgttgggtgctttattttatcatatttctttaaatactattaaactttgaaccagcatgcagttaattggaatcagtttgatccttttgaggcttgatttttatgctttcttagggtagtatcaacgtagcctttagcctgcagctaattttatttcactaccaagacaatacacttttcagggctctaattattgccccatatatcacaaggtctttccattctgctggtaggaacacaaactgttcctgtgtctttgtgagcttctggggactggccctcctactttttctttttttagcaattcttttattggtcttgggtagtttcctcccatacgtatgccaatcagtactcagccaaagacataaagggatccatctgaagacctccagagctctctcctatgtagctctcttctctctggaactttttcccacaagttttaattattttggcctccctcttccctgatttctgtcttctcaatgcaggaaatcactgggctgtttgcactgcatcgtggaaagcctctccagtcagtaagctagggaagatttaggggtgcctcacttgttccccttctctgagggctagcaatcttgtactgactgttgtctagtgtctgaaagccatttttttttcatgtattttgtccagttttttagttgtttaatctgattgcttttactccatcatggttggaagcaaaagttgttaatacgtttttgtgatgccagactgaactttcattgtttggctattcaagggctaactcttcagcttattaaaatgcagagaagcttatatatatatatatatatatatataaccttatgttgataaagagagcatatatgacaggacacctttttttcaaactgagtagttagtagaagcatctagaagagaaaacatttggttttctaaactattaggaagatattaagccatttagggcagtgttccccaatcattttggcaccagggaacagtttcgtagaagacaatttttccacggacagggggaggtgggggatggtttcgggatgaaactgttccacctcagatcatcaagcattagattctcatgaggagcgcaacctagatccgttgcatgcagagttcacaatagggttggcactcctataagaatctamtgacgccactgatctgacaggaggcggagctcaggcagtaatgcttgctggcccgctgctcaccacctgctgtgcagcctggttcctaacaagccatggaccagtacccattcgtggcccagggatggggacttctgatttataactttgagtcactcaggctaacagcatcatggttaaggggatatttagcaacagaaataaagtgacttttctgagagtatgcaatgactccattcgccctaggtccaaaatgatgagaattgaaacacatatgttactaagattgtaaatggaagagggcggagggaggtggtgaacatcagcatagggcagaagttgtcacatccacactttcttgtatgtcccctattcctggagctgccttccctatttttttgcatgtctaaagagcaagtcatatcactgatctctgaataataaaagttaccatttattcagtgcttattatgttccttgcactgtgctaagtttatatattatctttcactgaatcctcacatctgcctatgaggtgggtgctattactattaccattttatagatgaggaaattcagatatagagaggtttaattatgtacttaaaggctatacagattagtgattggctgagctaggactagaacccaggctttttgactccatactctgtacttttgccttcatgtctccacctgagttgggatttcctgttcttccaaatcaatctcggcattatttagcactgaccacgattctttgcatcccttgcccccgctccccccgcccccagcacctccaagtatctattttaggcgactccagctcaggaagagcctcgatgttactcggcaacaggtatctctcaacctctaaaatgttccaccttctgatagaattccaccttatagttttgtcatgttgcttccttcaacactagatggtggacttcctcattgtctcctgattagaccttaatcactgctgcctttaaatgtcatgttccttcaaagctcaagacttagttggctctttcagttagtctttcctgatggatcacatgctgtcgaaatccttctaatgctttgaattatcagcatttaccttggatttggttagatggtctttctgactttctctgagattctctggtactttgaatctctttctagatgtttatgacatagcacccctatattcatattataacctgctcaaaattcccaatcatagaatatttactgagttcctaatatgagcaaaacactgattttaacattgcccttctcttttgagacaatcagtgtttccactgtttaatttttaattttttgtgggtacatagtagatatatgtatttatggggtatgtgagatattttaatacaggcatgtaatacgtaataatcacatcatgtaaaatggggtatccatcccctcaagcatttaccctttgagttacaaacaatccaattacactctttaagttattttataatgtgcatttaagttattattgactctagtcaccttattgtgctatcaaatagtaggtcttactcattcttttttttttttttttgagacggagtctggctctgtagcccaggatggagtgcagtggcacaatcttggctcactacaagctccgcctcctgggtttatgacattctcccacctcagcctcccgagtagctgggactacaggtgttcaccaccacgcctgggtaatttttttgtatttttagtagagacgagrttttaccrtgttagccaggatggtctcgatctcctgacctcgtgatccacccgcctccgcctcccaaagtgctgggattacaggcatgagccaacactcccggctcattctttctaactattgtttttgtacccattaaccatcctcacccatccccagtcccccacttcccttcccagcctctggtaatcatccttctactctctgtctccttgagttcaactgttttgacttttagatcccacaaataagtgagaacatatgatgtttgtctttctatgcttggattaattcacttaacataaagtctttaaactcttcatgtttattattcctccaattatttaatatgaagatctgcctggtgacagtattggagtgacgctcctatagaaccaaaagaggcacctgagttgcagttttcatcaaagtcatgtagtatacaccataggcattcagagtcactgtcagtccattgataagatgtaaggcaacagattagaacccacagcccagtgtcagcaagcagaagtgatgattgataccagtgagaggaaatagatgaactaacaagtatggccagctgccagatagttgtttatatgtcagtatcatcattgagcatcacattatcataacctagtacagtaatagatattcctaaagactgagacaaaatgcatataaagccctcatctaatgcctgacacgcataaagcacagaataaagtgtgtgtctatgtatatacattttatatatacacacaaatatacaaatgaaaaggctaaattataatcattgtattttatatatatcatatatatgtgtatatgtatgtatatcattatatacattgtaccttatagaagagaagtatacatgacattttagaatgatttccgtggaagtagctagaattaaaaaatatttttcgtttattgagaagtactttcagttatcacagtgcaacactgctttctgtaatgaggctagaaaaatgaggagccattgtatttaataaaataagaattttttctgtctccatggtaagattaacgaacacacttcaacataaagtaatacaattgctaccttcttcctggtggcatgctccctgtgttaaatttaagtgacagtaaaacgtaatgagttagaggagaaaaattttaatttattcgtttatttgaatagggaaacccaagagatcagtgatagaatttgaactgcgagacaaaaagaaagaagaggttttagttttgtagctaaaattaaggtggtggcacttgaagtgaaatttaaaaatacacattcacttagttttcttggccatattctgcttctcatgtgaaactggacttcctgccttttagccttgtattctgtccctttggaaactgtatcatcttttaaaaatgaagtacgtgactttcstaatgatcttttatattataaaaataggccgggctcagtggctcaygcctgtaatcccagcaytttgggaggccgaggctggtggatcacttgaggtcaggagctcgagaccagcctggccaacatggtgaaaccctgtctctacaaaaatacaaaaattagtcggacatggtggcacatgcctgtaatcccagctactcaggaggctgargcaggagaatcacttgaaccccagaggcagaggttgcagtgagctgagattgtgccmctgcactccagcctgggcaacagaacaagactccatctcagaaaagaaaataacatcaaaataaataacataacataacataacataamataacataacataacataacataacataacaataggaatttcaaaaaatctgaaacccgggcctggcacagtggctcacacctgtaattccagcactttgggaggctgagacgggtggatcacctgacgtcaggagtttgtgactagcctgaccaacatggtgaaaccccatctctactaaaaatacaaaaatyagccgggcgtggtggcgcatgcctgtaatcycagctactcagkaggctgaggtacaagaatcgcttgaacccaggaggtagaggttgcagtgagctgagattgcgccattgcaatccagactgggcaacaagaacaaaacttcgtctctctccccacctccccccccacaaaaaaaaaaaaaacctgaaacccatcatgactatatcatgatgctgtagcctcaaaatggacttcacaagttcacctgtgattccctcaaaagcacttgagttttgatttgctgattgccagaagtgtatttgaacagtcccactttatatggagccccaagcatattaaatggagattccagataattagtgagctctggatgaagctcctgggatgcagtggggaaaaaactggatctggagtgttaaggtttgggctctgggcctgactttttcccttatcatttggaaattaggctcaggattgtgtattggggaaacacagcaagctgtatgcctatagtaaatagacaccctgtttagtggcattcaatagacctcaatgccatattcattcttccccaaccctatctgtcttggcttcaggcagatcttggcatagggcaccctcatcctcccccactgccacctagctcctgggtgaatgtctcccagcctgggaagagttctgttgaacttcatgaacaatgctgtctgcctagcattggagctcataccctgagactttgccttagtcctctcctttgtgcccagaggcatacatttgagagacagtcaatagagccttagacccctaactttgcacatataagtcctatgaaccatctgggccactcactctgcttagagcaattgcacactgctccctctcctttccttccatttacatctacagggagatttttagtttactaagccctggtaaatgacagttactaagatgtaatacaaatcttaacagtgggaacagtgactactgtttatcacgtgaatactataagtcaagcacaacaaccctttgtggtrctgctagagttaaggaggcatcctcagaggttgaggaatgtgcccaacctcagatgctagcaaatggtagagctttgttcagagtccaggtcctcattctaccacatctcactgcctctttatgttctgatgtctctactgtgtatatcaatgcttctcaaacgcagtatgtacacagttggccctctatatccgtgggttccacatttatggattcaacctaccacagacagaaaatatttcaaataaaaagcaataaaacataacaatacaacaataaaaataagacaaattttaaaagcaatacagtgtaataactgtttatatagcatttacatttattggatacgagaagcactctagagatgacttaaagcatatgggggatgtgtagaggttatacacaaatactttgccattttatttatttgtgtgtttgggtttctttttaagatggagtctcactctgtcacccaggctggagtgcagkggcrcaatcrcgsctcactgcaacttccacctcccaggttcagatgattctcctgcctcagcttccggggtagctgggattacagacatgcacacccacgcccaactaatttttgtatttttagtagagacggggtttcaccatattggccaggctggtatcgaactcctgacctcaagtgatcaggctgctttggcctcccaaaatgctgggattacaggcgtgagccaccatgcccagcctgtgttgccattttatatcaggctcttgaacatttgtggattttggtaccacagggggtcttggaacattgcaatactctatgaatactgagggacgactgtatacatatcacctgggaatcttgggaaatgcagattctgatcttgtacctctggcatgaggccttgattctgtgtttctatcaagttccaaggtgctgctgctgctactgatccatggaccacattttgagtagcaagagtgtgcactatcagaaatacaaggggagtcaagaatcttataaccggattggacatttttaacaaaaatactgttgaaaatttacaggataaatttttgaacattttgaaagaacaaaatgttttatcaactagaactttgcttcattttcaatatggtcttcaaaaacaaaaacaaaaaatcaaaaccacaatgagataccatctcacascagttagaatggcgatcatyaaaaagtcaggaaacaacaggtgctgaagaggatgtggagaaataggaacacttttacactgttgstgggactgtaaactagttcaaccattgtggaagtcagtgtggtgattcctcagggatctagaactagaaataccatttgacccagccatcccattactgggtatatacccaaaggactataaatcatgctgctataaagacacatgcacacatatgtttgttgtggcactattcacaataggaaagacttggaaccaacccaaatgtccaacaatgatagactggattaagaaaatgtggcacatatacaccgtggaatactatgcagccataaaaaatgaggagttcatgtcctttgtagggacatggatgaaactggaaatcattattgtcagtaaactatcgcaaggacaaaaaaycaaacaccgcatgttctcactcataggtgggaattgaacaatgagaacacatggacacaggaaggggaacatcacactctggggcctgttgtggggtggggggagtgtggagggatagcattaggagatatacctaatgctaaatgacgagttaatgggtgcagcacacyagcatggcacatgtatacatatgtaactaacctgcayattgtgcacrtgtaccctaaaacttaaagtagaataataataaaaaaaaaaataaaaaaaacttttgttctttcagttaacatttttttttttttggtaaacatttggataaggaaacctgcttatccaaatgtttaccaaaacagtatcatccagatgatgacagttttgccccacttgctgaattcagcttcacattgctgacactctaagcaggggtctttgaatgtgcttcgggaagattcacacttctcctccccatgatcatatacacagtcattcatatatgtttctttgtacatgttctgaggaaagaatcggaactgttcatcacattctccttggacttgcaaaccagtgctccaggagaaaggtgcactccttctaatggttctggaattccccatcaccaaatccttgaccaagaagaatacatagtaatatatgcaatttatttgtatcaggtgctatgagttctcaggctgctgactacataattgaagcccttggaaaatgccagttgaatgctataattaggtaaaaataaatgcactaggccttttagataactttccagatgattgtcagccaaagcccaggcagaagtactccctaatttccctagagctgaaagtcagtgaccttcagcttcccttttccacccttgtgattgtcattagggctgtgcatgtagcaccctcagccagcaatacggtagaagtgaggctcatcgttacttacctaggtctctgcattttcaatatctatctgcaaaatgagcttgatcaatatttaattattagtcaccaggaggtaattagagttacagaaaccaaaaagaatacatatagatgagctcaaggtgttctgagcacaccaaaccattctgacgattcaacatggaaacagctctgatcccaataatagccatagaagcctacctttaaaacccatccctgctcatttttattaggttggtgcacaagtaattgcgggttttgccattacttttaatggcaaaaactgcaattacttatgcaccaacctaatgcatttccatcattttcatagacctgagcacttatgagccatggccttgtagtcagactgcatggattcaaatcccaattattccacttaatagttgtatgaccttggtacattattgtcctctctagtctcagtttcttcttcctgcaacataagaataatgatgctaataataatagtgatagatagtactgctctcatggggtagttttcagattaaatgaaatgatctatgtcaagcacacagccaaatgactggcacatagcaagtactcactaaatgctaactgttgttattactttctaggccaaaaacaatatgtcctctttaacaggagcattgggtacaaagagttactgttgcctatgaaccttaactctttcagttagtggaggagaaattaaaaatctttgtgttatctattctgttcccttggtctttgtgcctatttttatactagtaccatgttgttttggtgactgtagccttgtagtatagtttgaagtcaggcaatgtgatgcctccagatatgttctttttgcttagtcttgctttggctatgtgggctaattttaggattgttttttctagttctgtaaagaatgatggtggcatttatctatcatcgtctttccttccacccagaacatcagagctagttgctacttacttccacattgcctctctgtttctccaccttcctagctttgatgatctgcatttctgctccattgtacttccctcacatacccactaccaaggtcacatatttaaccttacactttcgtatgtggatccactcctaagacctcaacctctgactacattcatcttggactacatacatctcttcctttctcacctcagaatctgctcttggtattcccaggactcattgatcttcataccgttccctttgacccagtatagaagcttctccctactttcagccacttccccccttctcttgccatggattcacactctcctgtatcctgcacaccattgccagtcatttcaacagatgactcataattccaaaatccctcaacaccataatcttatatcattcttgatttaatccccagcataatctctctgctcttgaagtaccaagtgttggtggaaaaagttgcaaaatgatgctcattgggtacacagatcagtagtactttctgatcttagctgggccctccctactgcttgaatgctctcttggatgctcttgtattcctctcttgccatcttctcagagaggcaggatggcacagcagttaatagcccaagcacaggcaactgatgagacttagacgctgaaatcctgggtctgctacttgctgcctgtatgattgggaaaattgatctaatcttaggctttagttttcttcacctgtaaattgggattgctcctcaccttaggggatwgcttgtgaataccaaatgagatcatatatggaaagcacttataacacagtgaatggcacacgaagtacaaacacacacacacacacatgcacacaagcacatacacatcagctctattgaggtatgaattatataccataaaatctaccaattgtggcaggacacgttggctcacacctgtaatcccagcgctttgggaggccaaggagggcagatcacttgagcccaagagttcacgaccagcccaagcaacatggtgaaaccctgtctctacaaaaaatagaaaaattagcaggacatggtggtgcgtgcctgtaatccagctactcgggaggctgaggcatgagaatygcttgagcccaggaggcggaggttgcagtgagctgtgatcatgcygttgcactccagcctgggcaactgtaatgaaactctgatatggtttggctgtgtccccacccaaatttcatcttgaattgtarctctcataattcccacgtgtcgtgggagggacctggtgggagataattgaatcatgggggcgggtatttcttgtgctgttcttgtgacagtgaataagtctcatgagatctgatggttttataaatgggagttcccctgcacaagctctttattgcctgccaccatgtaagatgtccctttgttcttcctttgtcttccaccatgattgtgcggcctccccagccatgtggaactaagagtccattattaatctttataaattacccagtctcgggaatgtctttattaacagcatgagaacagacgaatacaaactctttcttaaaaaaaatctaccaactgtaattgtacaatttaatgattttagaatatttatacagttgtgcaattgtcataatctagttttagaacacttccattaccccacaaaattccaatgtgcctgtttacaaacaggcaattgtagtcaattgccattttcactcttgacctctggcaaccactgagtgaaccactttctataattttgctttttcttgacattcacataaatggagccatataacatgtagtcttttgcatctgacttctttcacacattataatattttgggggtttgtgcatgtggcatcatgtatcagtactttattccttttgatggccaaataatattccattttgtggctataccacattttgtgtgtccattcatcagtagatggatatttgaattgtttcctcagtgtttccaattgtgaataatgttgctatgaatatttgtatacagctctttgtgtggaaatatattttcattcctcttagatctgtacctaggagtggaattgctgggttatatggtaagtgtgtgtttaatttttaagaaactgccaaagaatgttttaaagtgtcagtaccattataccttctcaatagcaatatatgagattccagtttcaccacattctcaacaatacttgttagtgtctatcttttattacagtcactctagtgaatgtacagtggttctccttttgcttttaatttaatttccctgatgtctaatgacaattgatggcatatacttattaaacattcacagatctcctttgatgaaatgcctattcaaatattttgcttataattggtttatgttctcattattgagttgtaagagctctttatatagtatagatacaagtcctttatcagttctgcccataatgaattctctcagactttgtttatctgggaatagccttattttgccttcattttcaaaggacagttttactgcatgtagaattattggttaccttttttcatctttcagcattttttttttttgagacagagtcttgctctgtcaccaaggctggagtgcagtggcctaatctcagctcactgcaacctctgttccmaggttcaagcaattctcctgcctcagcctcctgagtagctgggactacaggtgtgtgccactacgctcagctaatttttgtatttttagtagagahggggtttcaycatgttggtcaggctgrtctcaaactcctgacctcaagtgatctgccctccttggcctcccaaagtgctgggattacagscgtgagccaccatgcctggccctctcagcattttgaatgttactccactacctacagcctccattgtttcagacaaaaagagcattaattgtattgatgctctactgtacataagaggcttttttctgttgtttctttctagatttttctatcctgtcttctcttttttgtttttgtctacatcattatcttccccttccctcccctcagtctctctctttgggctttcaacattttggccattatgttcctaggtgtagaatttttgtattaatcctacttgggattctttgatctttttggttgtaggctatttattttttaatcaaatttgggaaatttttagctattatttcttcaaattcttttactccctttttgtcttctctcctagaattttcattaatcacatgatacttgatgtttcacaggtctctgaggctgtttatttttattcagtcctttttcttttcttcttcaaataagataatttctatagatttatcttccagttcacaaattctttcttctgccatcttgaatctgctgatggggctctgtgggaaaattttaatttctctttctccaattttccagttcagaatttccatttagtcttttgtaaaataatttttctgtccttactgaggattttaaaaatttgttatttttgttgtcatacttcaactctttaaacgtgggttcctttagttctgtggtgaacatatttataagaggtcttttgaagttctcatccagcaagtccaatatatggggacatccagaaactttattgattgctttgtttttcctgagcacatctcacttttctgtttctctctaattttttgttcaaaactcacattttacataatatattgtagcaactatggattctggtgtttttcctctgatggttggtgttgttgctgtttttctttgtttgtttgtttgtttggtagtttctttgtttattaacttgcctgatctaaatatgtgaattatgtctcccacatcgtgtgtagcccccgatgtctgtgctcagtttttaaattcttgttttttatttttaagcatggctttctattggttcttttctctgtctgtgtagtttagtgtacagaggctgtgaccaaacatcttgtgccattaaggctactatcttctgttggtgggtctgtgtttggtagagttgctcattcagggtttaagctattttcaagtctgccctggctattactttctactgggccatcttacatcatatgtgttctctgtaagttttagttgttatgattattatgactgtatattctttcctctcagcagttgtaccaaaggcttttttgctctccagtagctctcctttctagcttcttcaatctcagcaggtgaccctccttcttgctttctgaaaagatgtcggccacacagtatagaacccatgacttccgatttcattttttttattgagatataatttacctaaggtaaaattcaccattcagagtacacagctctgtgtgactgttagtataatcacaaagatgtacaactaccatcactgtctgattccagaatgttttcatcacccagaaataaaccctgtgcccattagcaatctcttctcatttctgtttcccaccaactcctggataccagaagttgtagcatgaatcattgcttcattccttttcattgctgaataatagtccattataagggtagatcatatttggtttatctgtttatcacttgatggacattggattggttccacattttttctgttgtggataatgctgctatgaacttttgcatacaaattttagtgcagacatctttttggttctcttgggtttacacctccccactttatattttatttaatgtaaagtatatattataataatgttgttacttacttctcattgttgaagaattaccttctacgccatgaagaattcttaaattttattcccactctctatcaccacttgcaggaccttgctccaacaatatcactcctcatcagtatctctcttcttgctcccacagtatctctccttaccagtcatttcatcttctcctctgagtccatgctgttagtctacaaacatgatctgatatgtttgatcccaagccttcagttacctttaacacttcccatcattcttcttatctaattggttgccaaatctggccaattttatcttcaaattaattttgaaaattattttgtactcctcttccacattcctaccagtcaaatcactctctatgccccagattagacacagttactcttttctctatagcactttgtactttgtgatggcacttagtgtcttgtggaatagtcatttttgttttagttgtaatttgttaatttcctcctggctgcaagaataatcttttattcttactcattcttgcatccccagagcagcctagcattggatcagagcaaaggagtagcactcaaaacatcataacatctgcagattgtggtttaatttggactttcaaatttattatttctcatggtctctctcctttccatccttcatctctctccctccttctcttactaccattgtatataaaactaatttctatttatatgtatcttgaatggtgtaaggtcagagataaccagtttcacacatgtttgtgtctttccacagtgtcagacttttattgatgctatttcaatcacaaaatccatgagccacatggagttcccaaggaggcaattctccttcgtacttcccattcactcggaagtcagagccatgccacagaggcacaagccactccataagtcagtcaatattgcaaaccacacaaaacagtacatttcatctatatatatatgttacagattgaacattccacaacaaacaaattaacatttaacatcaagagaaagaggataggaaaaggggttaatgaaccagtctaggaagacagatatagacaaaaagaatgtcctggtctggaccagctggtttgtcaattttgcaaggaaaagtctcatgtgggcagagcctttggtggcagatgctgggtgcttatcacgagtgaaagcaagacggtgtcagttaagacagccatttggagctgctgaagtcctgctccttttatggccacagagtcctctggtgaggactgatagtggaaaagtatgcctatgtccttatctggttggttgcagtctttatttattaagcaaaacatcttgaccctcttaaaaaagtgccctatgaaatgtaagatggagtctttttctaagatggagttacttatgttaagggcgctctgtacaatatatgcttgacatatgttaggcactcaataaaaagctgttggttaacgcaataaaaaatggtaaaggagatatcaccaccgattccacagaaatacaaactaccatcagagaatactataaacacctctacacaaataaaccaaaaatctagaagaaatggataaattcttggacacatacaccctcccaagactaaaccaggaagaagttgaatccctgaatagaccaataacaggctctgaaattgaggcaataattaatagcctaccarccaaaaaaagtccaggaccagayagattcacagctgaattctaccagaggtacaaggaggagctggtaccattccttctgaaactattccaatcagtagaaaaagagggaatcctccctaactcattttatgaggccaacatcatcctgataccaaagcctggcagagacacaacaaaaaaaaagagaattttagaccaatatccctgatgaacattgatgcaaaaatcctcaataaaatactggcaaaccgaatccagcagcacatcaaaaagcttatccaccatgatcaactgggcttcatccctggtatgcaaggctggttcaacatatgcaaatcaatgaacgtaatccagcatataaacagtcccaaagacaaaaaccacatgattatctcagtagatgcagaaaaggcctttgacaaaattcaacagcccttcatgctaaraactctcaataaattaggtattgatgggatgtatctcaaaataataagaactatttatgacaatcccacagccaatatcatactgaatgggcraaaactggaagcattccctttgaaaactgacacaagacagggatgccctctctcaccactcctattcaacatagtgttggaagttctggccagggcartcaggcaggagaaggaaataaagggtattcaattaggaaaagaggaagtcaaattgtccctgtttgcagatgacatgattgtatatttagaaaaccccatcgtctcagcccaaaatgtccttaagctcataagcaacttcagcaaagtctcaggatacaaaatcaatgtgcaaaaatcacaagcattcttatacaccaataacagacaaacagagagccaaatcatgagtgaactcccattcacaattgcttcaaagagaataaaatacctaggaacccaacttacaagggatgtgaaggacctcttcaaggagaactacaaaccactgctcaaggaaataaaagaggacacaaacaaatggaagagcattctatgctcatggataggaagaatcaatattgtgaaaatggccatactscccaaggtaatttacagattcaatgccatccccatcaagctaccaatgactttcttcacagaattggaaaaaactactttaaagttcatatggaaccaaaaaagagcctgcatcgccaagtcaatcctaagccaaaagaacaaggctggaggcatcacgctacctgacatcaaactatactacaaggcyacagtaaccaaaacagcatggtactggtaccaaaacagagatatagaccaatggaacagaacagggccctcagaaataataccacacatctacaaccatctgatctttgasaaacctgacaaaaaccagaaatggggaagggattccctatttaataaatgctgttgggaaaactggctagccatatgtagaaagctgaaactggatcccttccttacaccttatacaaaaattaattcaagatggattaaagacayacatgttagacctaaaaccataaaaaccctagaagaaaacctaggcaataccattcaggacataagcatgggcaaggacttcatgactaaaacaccmaaagcaatgacaacaaaagccaaaattgacaaatgggatctaattaaactcaagagcttctgcacagcaaaagaaactaccatcagagtgaacaggcaacctacagaataggagaaaatttttgcaatctacccatctgacraagggctaayatccagaatctacaaagaactcaaacaaatttacaagaaaaacaaacaaccccatcaacaagtaggcaaagtatatgaacagacacttctcaaaagaagacatttatgcagccaaaaaacacatgaaaaaatgctcatcatcactggccatcagagaaatgcaaatgaaaaccacaatgagataccatctcacaccagttagaatggcgatcattaaaaagtcaggaaacaacaggtgctggagaggatgtggagaaataggaatacttttacactgttggtgggactgtaaactagttcaaccattgtggaagacagtgtggcgagtcctcagggatctagaactagaaataccatttgacccagccatcccattactgggtatatacccaaaggattataaatcgtgctgctataaagacacatgcacatgtatgtttattgtggcactattcacaatagcaaagacttggaaccaacccaaatgtccaacaatgatagactggattaagaaaatgtggcacatacacaccatggaatactatgcagccataaaaaatgatgagtgcatgtcctttgtagggacatggatgaagctggaaaccatcattctcagcaaactatcgcaaggacagaaaccaaacactgcatgttctcactcataggtgggaattgaacaatgagtacacttggacacaggaagaggaacatcacacatgagggcctgttgtggggtggggggagbggggagggatagcattaggagatatacctamtgtaaatgatgagttaatkgrtgcagcacaccaacatgkcacatgtatacatatgtaacaaagctgcacgttgtgcacatgtaccctggaacttaaagtatagtaataaaaaaaaaaagaaaaaaaaagttgttggttaaatagtctctgctaaatttgcgacacatcttcccagataagattcttctctccgaacctttttttttttcttttttttttacacagagtctcactctgccatccaggctggagtgtagtggctcgctgcaacttctgcctcccaggttcaagtgattctcctgcctcagcctccmaagtagctgggactacaggtgcatgccaccacgcccagctaatttttgtatttttaggagagacagtgtttcaccatgttgaccaggctggtctcgaactcctgacctcagttgatccacccaccttgacctcccaaagtgctaggattacgggcatgagccaccgcacctggcctctctgaacttttttaccagtatttattttaattttggttgggggcagtagagagatgcagaaaaggaaaggaaggcatgaaactgcttgagaaatacatcagtgaataaaagttttttaacatttgtggtgtaatgacaaatcctggagaagttttagttcacacctggagtattccagcagaagttggatgccagccgctaggcattcattctgcagaggggcttctctgttaggtacaaggttgggttcaagtaccttctgaagtctagctcagtgtattttttggagtgtagtatactaacaggcaagaacaagaagtggaggagatgtgccaggggaggaatagtgatgacgttgtaggtgctcagctcccagatgatgggaaaagtgtttcatggcctcacacatcttttgggttttttgttgactgtctcccccattactcaatgagctgctacagcatagggaatgaatcttcaacttgtatttccagtacccagaacagaggcttgtactaagaaggcattcaattggtatgtaatggattagaataagttgaattgaagattgaactgaagtcaaaatctgatttctaaggttccttctggcctgaaaattcagactcctctgatttcaaccataacagcctggctaagcctccttgagagaaaccctgtgcttccttagtttaaccacctctttgtggttgaatagtataggttttcaatcaagtcctaggagggtgtyagtttcttgttgtacttaccwggatgtgataggatttcaaacaaggcccaaaagaatgtattttcaggagttgagatgtagccacactttctacatttacaatggcctgaaatgggttacagtttagaacaagctttcttctttatgatgcacaggatttctatgatgggtggctgttaggcaatgagtgtgatgggggagcattttcaatcttagctcaccttagcacaccttagcacaggactctagttacagggtcataattccccatgaggttagcccctgtagtatcagctactttgtatgtgatttaagccagtactgattattctcctgcttagggagaagcggtagaaggcccttggaactgtgagttttgcattccaacttgctaattcaacatagatcctaattccttaaatgcttgtaattagaaattctcgtgaactgtattggtttttgtcaagcaatctgtttggggaacttgascaactggggcactgctggctagggtgaartttatttaatttgtttttatgacattcttcatcttggaaatggggttttcaaatattgctttcccaggcatcattacttatttgctggtttttatttcaggattgggactagctcagggtgccagggaagcgttttgtggtgctctatattagagtcgtaatatccaagaaaattgtctgattgtatgtggtatcttggatgtggtaccttatgacaaatgttccacattttgacaatatgataggtttatgattatttatattccaaatgatcttactttttaaaagtaatattttgtgcagtctttgcaattctgttttcctttctattgttatttagaagctattcattggcgtttggcatcattcaccatctttgagcattaaaaagaaaaagaaaaaagcaagtacactctgtgtagcatagaatctctgttcactttagaattcacattgaacatgagctgatccaattgctacagccttggcagtgatagaggcaggagacagccaaatccctaggcagatagggaaaggtccccggagaatctccgacctgccccacaagtgttgacaccagatgttttgtgcagataagggaacctgcacagggggcttgcctgggcatgcccacagcatactggaggcccactgggggaatgggatggagccactaggagttcacaccttatgcaggggtggagcctggcctcatcagttcttgtgtggtggccctggtattcaattgtgagggggaaacctgcttggaggacccctctccttactgagagctttcttttcacttaataaattctgccctcttcaccctttaatgtgtctgcatgcctaattcttcctagtcatgagacgagaacctggatttaactgagccagggagcagaaactcctgcatcagtagcaattttacaactgtttattaaggaatacatcttgcccgaggaggttttatattgtatccctcaaatggctattttcccctcctccgtttaaatatttttactcaagtggtttccttcttttggaatgccagtcaactccatctcctacttgatttccaagaccgtctcctccaagatgcctctcctgtctcccctttccatacaatagaatttatgggtttatcactgttagtaccaagggcttcatcatctgctctcttatgttccctgcttgtcaaggtgtagcttattgtagggttcaatgagctgctagccactgtcccatttgactagcagatgcttgagaaaagcaagtacacagtttggattcgatcctacagtgtcttacatagttcttggcacmtgcatgtttgctctaggaacaaccttccttattataccgagctgatccttttgggcagcattcattgagtcaaatggcctgtgtgaaacggggtctgaccctaagtggacagagctgagaggttagagctgaaggactcaagccccagacttgctacagattagtagggtgacttccagttacttcagttttctgagtgtagtttcctcattttaagctttgtaaatattaatatctggcatacataatttgaaaaaatgctgtaaggattagaagaacgaatatacgtgcaracctttaagaaattataagtgcaaacacacgtagtacatttccatttttagagcttcatttttttcttatctgtaaaatagacatgtaaatgcctacctttcttattgggttattgtgaggattaagtagaataacatatgtggaagtgcttagcaaataggaggtgtttaataaatgttgcctggatatgaattcccctctcgggactgtcctgatgtgaggcttttccagcccttgggggatgtgcatttaaatcaggctgcttgtaccttggattaggcaacttaaaaaaagtgtagccttgttagttccaacttctcagctataaaatgcagagtaattaaatttgctagtaaatgtttccaggcctttgaatggcagccaataaaaaggactaaatattattcttttagaattcatgtccttgatgtagaggaaatatcatatttacttacacatactcctgccttggctttttagaagaaaactaagaaaaatgttttcccctctacatttcccacttgaaggtgttatctgtattgaaacagcaatgacagctgccagcaaaggagtgtgatttttctttgccaaggtaaaccaagggttaacatcaaggagtgttggggcccctgctggtgggctggaaccagagctaattccttagcagtcactcactcttctgcctcttcagctgtctctcacccccctcccaccataaaggagtgggtgttccttcaggactgtgcactcgcctccctccctctatccctctttttcccacccacacatacttcccagaacctctccaccctgtggctgatttatctttcctgggaccaaaggcaataaagcctcaaaactaaaacttgcaaggaaagacaatcctaatggtaaacacctaacccgcaatgctgattacttgaaaataagctgttattctgtctccagatcacaaatagcctcacttaaagctctacccctgaaagaactactgaaagattcaggaaggtcaggagatccagattccaattaacttagcacctgatgcctgtgtaactctggatgggtctcagttctctagtagttgaggactggtatctcaaaggttaatgaartttgcctaaggtgaaggtagattargccttccattctcacacaaattgcccatcttccaatcccctttgtaccttgacattttcaacacaaaggggttggggtgctcagaggattacacaagcaagcacatatttgtcacagcacctgattatagacctgcattttggaagagaggtatttcaggatcttctcattactgaagcctctcattgtaggaccatggtcatttttaaatctcccacattgaaatgaccagttggcaaaaaccttcaattacaaaatctcttccaaagaggctgagttttttttttttcttggatcacttcacatccttttgaataccctgaggcagtatttttatgggctaacagcaaacagagtgtcgtgtagaaccaagtgtgtcccttcactttctccaccccctgcaaagtttgtgatcttcaaagcatgctggattttaaaataaaacatctacttctagtccaagcctttggctgtagactttgggcttaagtgtgtttttccacagaggtgttacatccccatttctatcagctaaggaaaatgaattcattcaaggtctcccctgccattcatcgaggctccccaagaggagctttccagaaagatctgtgccaattgtaaacttacaagatcctcagcccataacaaaatgcccagacaccttggctctgctgacacaggctgagagagataaaggaaacagctggctgaggtcctgacttttttttcacatttttttcactttttttttcacaaaggcccgctagcctttgcagactggggactttaagattgttcactacccatccagcagggctgggcatacagataccaaagctccatctccagagacgtgaactctaaccaaggatcctcaaaccacttaaatcatgaacctgaaccttgaaatgaagcaaacattacatttaaactcccatgtttaaaatcagtttgcccttttcgctcactctttactctgggggatgcataaacaccttgggtgcctgctgtgacaatcaagttggcaatacatgccacctgctggaaccatagtctccaatctgaactccttccccagctacctgtttcctgtcacaggccttggcattccctgtagcttcattgcttacctcatagaatcatgcttctcattagagagtattcaacagcttcttgtcactggggggtgcacttcatttcctctactcttggacttctgctctacttggacttcatactcttggctgtctctgaggtagaggcagagagaacatccctgactctctgctgcccattttctgccatgggccsccscccccttccagaggaggaggtgttggggaacctctcccacatggcagaacaaccactcaagtctggggaggtctttggcagtcatcttgggccagatgttgtgctagaccaagactgagctgggatttgggttttctattctcacatagccagttggaaagggtggaaacacatgtgggggtcccaaggaaccatgagagacttctcatcattactgcggagtttgactatgatctggcatcctgggctgttgtgtggaggtctctatcatgaccgacctctttggcttctcttgtgccctaaggaaggtgttttttttgctagttttgttttatgtttttagactgagtcttgctcttttgccaggctggagtgcagtggcatgatctccactcactgcaacctcggcctcccrggttcaagcaattctcctgcctcagyctcctgagtagctgrgactacargygtgtgccaccacacccagctaattttygtatttttagtagagacrgggtttcaccatgttggccaggatggcctcratctcttgacctcgtgatccgcctgcctcakcctcccaaagtgctgagattacaggagtgagccaccatgcccagccggaaggtgttttaaaattgaaacaaagttgcatagttggttgtgttaattgattcaaaatctttcttttttgcaggggcagctctaggccaaattcttcttgcaagtttttatggatcacatgtttgtctaaagtacacacagatcattcccaaggccagagcaggaatgctctggaagtgccctctctgatctagggcamgcctgtagtttcagggttatcgatagacctcgcggagggcagtgtacaaggcctctggctgcatgaagagaaatctggtgtgtgggactgctctcagaagcagagaggtgtagaaggctgtcaaatgcataaagacaatgtctcttcacttggaggacaatttgtctgccaaggggacggtgagatttggcttcatctcttaagaacctgcattgagggctgctcacaatttcacccgaggtccagggcaattctctcctctccagatcccatatctagtgcttgttgctgctcattcagtatatggatacttctattcttaacaagttcataagtttgtttaaccgatgactgctcatgtctttaaagccattcattcattcatccattcattctctccctcccttgtcaatcaacaaatgtgttttgaaattaagtctatgctggaatttagtgattaataagacccagatccaccaaactatgagcttcctaagagcagggagtgcatatttcatttatgcatacacagtgctgggcatatgatttccataaatatgaatggatgcttcaggcaaatgcactttaatgaagtttgccacagaggcatctaattctcaaaccaaatgctggtattttaatatcttttcataaccagaggtctgagggcatgggaaaattgctgggaaggagggctctggaataacatgatattaagatagatgcatgagtgatgacccaaagcttcttgttgtcacccatagaataacttagtttcctgtcttccctggaagaaatgtaagaggatgtgtggggctagaaagagcaacaagcttatatcacccatatagtagaaaaggagtgagtggagcatcgagcctgatcctgtgcatttacagtagcagtaatagagtaaaacagagcaattagtgcctcatgtagacttggcattgagcaccccatcgcaaaatagccatgttacatatttcagtgtttaccagtgacaacgttttcctcttctttatgatttttggttcctgagatgtttaactggccttaatgcagttttgagagattgcaggaagtgatgggctgggttgggaatggctgggcattcaagtgatttagccatgggactcagcagtgcattgcttttactcctgaaggactcttggaagaaagctctgggcctctgcagagctttgatcagcttgttcagaaagagagcgttttatcgattttatcatggttacctttttttattgttaaaagtgtctatgttgtaaggcctctttgtgtgataaaattctgaaatgatctcacattgatttattttttcctgctttcaaaacacagcaatcttggtagtttcttagtatcccaaagggataaggagtcagcttctcaataaaccttttctggttatgaacactgtatgtattaaataataagcaarccttacagagtttatatgatcacattaagggatctgttaaattccaagagttattgttatgtgtgcaaaatactacagaagcacttgattttgttccagaagcactctgctgggaatgagtgcatattggttctagtgactctgccagtaattagctgtgacctttggtaagtcacttctcctccattccctcttgcatcctgatctgtaaaacgaggagtctcttagtcccttctaagtccctcaccagctttaacattctgaggcttaaaaaagctcataggagacaggctgttctttgcaatattttccatacaggtagtataaacaagtggagaggtaattgaaagactgactttcaaaatctagtacaaggaccttatttatatgggattttaaactgatatcttgagtcggactatgaatgactacgactatcaatcagttatctgcaccaataaaggacaaccgatgtgaatcatttggagatcttcctactcccagtagatgcaggtttcgtgccccagaataatactggaatgtgctcatgtctttagcacataccaactaatcttggtgagaagtgaccccctaaaaaggtgttggaaggcaagggaacacagtggctagagcttaacacatttgttggaaagaagagcatttttacactgctgacaatatgaggactatttgttttcttattttattattatacttttaagtattaagatacatgtgcggaacgttcaggtttgttacatatgtatacacatgccatggtggtttgctgcacttatcaacccgtcatctacattagatatttctcctaataatatccctcccctagcccctcactcccccaacaggcccccgtgagttatgttcccctccctgagtccatgagttctcattgttcacctcccatttatgagtgagaatatgtggtgtttggttttctgttcctgtgttagttcgctgagaatgatggtttccaacttcatccatgtccctgcaaagaacatgaaatcatcctttttctggctgcatagtattccatggtgtatatgtgccacrttttctttatcyagtctvtcattgatgggcatttgggttggttccaaaactttrctattgtgaacagtgctgcaataaacatrcgtgtgcatgtgtctttatagtagaatgatttattaccctttgggtatatacccagtaatgggattgctgggtcaaatggtatttctggttctagatccttgaggaattgccacactgtcttccacaatkgttgaactaatttacactcccaccaacagtgcagtgtaaaagcattcctatttctccacatcctctccagcatctgttgtttcctgacgttttaatgatcaccattctaactgggcatgagatagtatctcgttgtggttttgatttgcatttctctaatgaccactgatgatgagctttttttcatatgtttgttggccacataaatgtcttctttggagaagtgtttgttcatatccttcacccactytttgatggggttgtttgtttttttcttgtaaatttaagttccttgtagattctggatattggccctttgtcagatgggtagattgcaaaaattttctcccaatctgtaggttgcctgtaggttgcctgttcactctgatgatagttttttttttgctgtgcacagctgtttagtttaattagattccgtttgtccattttggcttttgttgcagttgctttcggtcttttagtcatgaagtctttgcccatgccaatgcctgaatggtattgcctaggttttcttctagggattttatggttttaggtcttatgtttaagtctttaatccaycttgagttaatttttgtataaggtgtaaggaaggggcccagtttcagttttctgcatgtggctagctgttttcccaataccatttattaaataggaaatcctttccccattgcttgtttttgatagttttgtcaaaatcagatggctgtagatgtgtggtattatttctgaggcctctgttctgttccattggtcaatttatctgttttggtaccagtactatgctgttttggttactctagccttatagtatagtttgaagtcaggtagcgtgatgcctccagctttgttctttttgcttaggattgtcttggctacatgggctctttttttgttccatatgaacttgaaagtagttttttccaattctgtgaagaaagccaatggtagcttgatggggatagcattgaatctataaattacttcgggcagtatggccattttcatgatattcattcttcctatccatgaaaattgaatatttttccatttgtttgtgtcctctcttrtttccttgaacagtggtttgtagttctccttgaagaggtccttcacatcccttataagttggattcctaggtattttattctctttgtagcaattgtgaatgggagttcactcatgatttggctctctgcttgtctattattggtgtataggaatgcttgtgatttttacacattgattttgtatcctgagactttgctgaagttgtttattagcttaaggagattttgggctgagacgatggggttttctagatatacaatcatgtcatctgcaaacagagacaattcgacttcctctcttcctatttgaataccctttatttctttctcttgcctgatttccctggccagaacttccaatactatgttgaatagaagtgttgagagagggcatccttgtcttgtgccagttttcagagggaatccttccagcttttgcccattcattatgatattggctgtgggtttgtactaaatagctcttgttattttgagatacattccatcaatacctagtttattgagagtttttagcatgaaggcatgttgaattttatcaaaggccttttctgcatgtattgagataatcatgtggtttttgtcattggttctctttttgtgatggattacgtttattgatttgcatatgttgaaccagccttgcttcccaggaatgaagctgacttgatcatggtggataagcyttttgatgtgctgctggattcggtttgccagtatttcattgaggattttcacgtcaatgttcataaaggatattggcctgaaattttctttttttgttgtgtctctgccaggttttggtatcaggttgatgctggcctcataaaatgagttagggaggcgtccctctttttctattgattggaatagtttcagaaggaatagtaccagctcttctttgtacctctggtagaattcagctgtgaacccatctggtccttcgttggtaggctattactgcctcaatttcagaacttgttattggcctattcagggatttgacttcttcctggtttactcttgggagggtgtatgtgtccaggaatttacccatttcttctagattttctagtttatttgcatagaggtgtttatagtattctctgatggtagtttgtatttctttgggatccgtgatgatatcccattgatcattttattgtgtctatttgattcttctctcttttcttctttattagtctggctagccttctatctattttgttagtctttaaaaaaaaaatacctcctggattcattgattttttgaagggtttttcgtctctctatctccttcagttctgctctgatgttagttatttcttgtcttctgctaggttttgaatttgtttgctcttgcttctctagttctgttaattgtgatgttagggtgtctattttagatctttcccagtttctcctgtgggcatttagtgctataaatttccttctaaacactgctttagctgtgtcccagagattctggtatgtagtgtctttgttctcgtcggtttcaaagaacttatttatttctgccttaatttcrttatttactcagtagtcattcaggagcaggttgtttagtttccatgtagtcatgaggttttgagtaaggttcttaatcctgaattctaatttgattrcactgtggtctgagagactgtttgttatgatttctgttcttttgcatttgctgaggaatgttttacttccaattatgtggtcagttttagaataagtgccatgtggtgctgagaagaatgtatattctgttgatttggggtggagaattctgtagatgtctgttaggtccacttggtccagagctgagctcaagtcctgaatatccttgataattttttgtcttgctgatctaatattgacagtgaggtgttaaartctcccactattattgtgttggagtctaagtttcttcataggtctctaagaacttgctatatgaatctgggtgctcatgtactgggtacacgtatatttaggatagttagctcttcttgttgcattgatccctttatcattatgtaatgcccttctttgtctttttgatctttgttggtttaaagtctgtttyatctgagactaggattgcaaccctttctttgttttactttccatttacttggtaaacctttctccatccctttattttgagcctatttgtgtctttgcacatgagatgggactcctgaatacagcacactgatgggtcttgactctttatccaatttgccagtctttgtcttttaattagggcatttagcccatttacatttaaggttaatattgttatgtgtgaatttgatcctttcattatgatgctagctggttatttttcctgttagttgatgcagtttcttcatagtgtcgatggtctttacaattttgtatgtttttgcagtgactggtactggtttttcctttccatgttagtgcttccttcaggcgctgttgtaaggcagcctattggtgacaaaatctctcagcatttgctcgtctgtaaaggattttatttctcctttgcttatgaagctcagtttcgctggatatgaaattctgggttgaaaattgttttcttataatcaatagcttaccaaccaaaaacagttcaggaccagatggattcacagccgaattctaccagaggtacaaggaggaactggtaccattccttctgaaactattccaatcagtagaaaaagagggaatcctccctaactcattctatgaggccagcgtcatcctgataccaaagccgggcaaagacacaacgaaaaaagagaattttagaccaatatccttgaygaacattgatgcaaaaatcctcaataaaatactggcaaaccgaatccagcagcacatcaaaaagcttatccaccaygatcaagtgggcttcatccctggtatgcaagsctggttcaatatatgcaaatcaataaatktaatccagcatataaacagaagcaaagacaaaaaccayatgattatctcaatagatgcagaaaaggcctttgacaaaattcaacaacccttcatgctraaaactctcaataaattaggtattgatgggacctatctcaaaataataagagctatctatgacaaacccacagccaatatcatactgaatgggcaaaaactggaagcattccctttgaaaactgacacaagacagggatgccctctctcaccactcctattcaacatagtgttggaagttctggccasggcaatyaggcaggagaaggaaataaagggtattcaattaggaaaagaggaagtcaaattgtccctgtttgcagacgacatgattgtwtatctagaaaaccccatcgtctcagcccaaaatgtccttaagctcataagcaacttcagcaaagtctcaggatacaaaatcaatgtacaaaaatcacaagcattcttayacaccaacaacagacaaacagagagccaaatcatgagtgaactcccattcacaattgcttcaaagagaataaaatacctaggaatccaacttacaagggatgtgaaggacctcttcaagsagaactacaaascactgctcaaggaaataaaagaggacacaaacaaatggaagaacattccatgctcatggataggaagaatcaatatcrtgaaaatgrycatactgyccaaggtaatttacagattcaatgccatycccatcaagctaccaatgactttcttcacagaattrgaaaaaactactttaaagttcatatggaaccaaaaaagagcctgcatcrccaagtcaatcctaagccaaaagaacaaagctggaggcatcacactacctgacttcaaactatactacaagkctacwgtaamcaaaacagcatggtactggtaccaaaacasagatatagatcaatggaacagaacagagccctcagaaataacgctgctatctacaactatctgatctttgacaaacctcagaaaaacaaacaatggggaaaggattccctatttaataaatggtgctgggaaaactggctagccttatgtagaaagatgaaactggatcccttccttacaccttatacaaaaathaattcaagatggattaaagacttaaacgttagacctaaaaccataaaaaccctagaagaaaacctaggcattaccattcaggacataggcatgggcaaggacttcatgtctaaaacaymaaaagcaactgcaacaaaagccaaaattgacaaatgggatctmattaaactcaagagcttctgcacagaaaaagaaattaccatcagagtgaacmggcaacctacaaaatgggagaaaattttcgcarcctgctyatctgacaaagggctaatatccrgaatctacaakgaactcaaacaaatttacaagaaaaaaaacaaacaaccccatcaaaaagtgggcgaaggacatgaacagacacttctcmaaagaagacatttatccagccaaaaaacacatgaaataatgctcaycatcactggccatcagagaaatgccaatcaaaaccacaatgagatatcatctcacaccagttagaatggcartcattaaaaagtcagvaaacaacaggtgctggagaggaygtggagaaataggaacacttttacactrttggtgagactgtraacyarttcarccattgtggaagtcagtgtggtrattcctyagggayctagaactagaaataycatttgayccagccatcccattactgrgtatatacccaaaggactataaatcatgctgctataaagacacatgcacacgtatgtttaytgyrgcattattcacaatagcaaagacttggaaccaacccagatgtccaacaatgatagactggataaagaaaatgtggcasatatacaccatggaatactaygcagccataaaaawbgatgarttcatgtcctttgyagggacatggatgaaattggaaatcatcattctcagtaaactaccgcaaaaacagaaaaccaaacaccgcatattctcactcataggtgggaattgaacaatgagatcacgtggacacaggaaggggaacatcacactytgggkactgttgtggggtgrggggaggggggagggatagcattgggagatatacctcatgctggatgacgagttagtgggtgcagcgcaccagcatgacacatgtatacatatgtaagtaagctgcacatggtgcacatgtaccctaaaatttaaagtataataataataaaaaaaattgttttctttaagaatgttgaatattggcccccattctcttctggcttgtagggtttctgcagagasatctgctgttagtctgatgggcttccgttgatgggtaacgcgacctttctttctggctgcccttaacatttttttccttcatttcaaccttggtgaatctgatgattacgtgtcttagggttgctcttctggaggtgtatctttgtggtgttctctgtatttcctcaatttgaatgttggcctgtcttgctaggtcggggacgttctcctggaaaatatcctgaagagtgttttacaacttggttccattcttcccatcaatttcaagtacaccgatcaagtgtaggtttggtcttttcacatagtcccatatttcttggaggttttgtttgttccttttcattcttttctttttttttccaatcttgtcttcacactttatttcattaagttgattttcaatctctgatatcctttcttctgcttgatcaatttggctgtttatacttgtgtatccttcgtgaagttctcatgctgtgttttcagctccatcaggtcatttatgttcttctccaaactggttattctagttagcaattcctctaaccttttttcaaggttcttagtttccttgtgttgggttagaatgtgctcctttagcttgaaggagtttgttattacccaccttctgaagcctacttctgtcaattcgtccatgtcattctccttccatttttgttcccttgctcgcgaggagttgtgatcctttggaggtgaagaggcgtgctggtttttggaattttcagccgttttgtgatggtttttcctcatcttcatgaatttatctacctttggtctttgatgttggtgagcttcatatggggtttctctgtggatgtcctttttgttgatgttgatgctattcttttctgtttgttagttttccttctgacagtcaggcccctctgctgcaggcctgctggagtttgctggaggtccagtccagaccctgtttgcctgggtatcatcagcggaggctgcagaacagcaaagattgctgcccgttcattcttgagtaatgtttagcaggcatagtaagccttcttcaatatttaattgtctgcatactgatggatatttttagggatgaagataagtggttcttgtttgcagtggatacgatgcttatgaggaaagaagagctctttttaaatagagtctcttgggtagaaactcccttgattaagttcctgaagtcttttactttgctgatcctcaattcagtttcatcagctcacccagagtttatcaaactttggaggaatgattttaagaaccaaatatggccagatgcagtggctcatgcctataatccgagcagtttgggaggccaaggcaggaggatcacttgaggcaaggagttygagaccagcctgggcaacacagtgaaaccccgtctcaaaaaaaaaaaaaaaattaagttagctgggtgtgtcactgtgcgcctgcagtcccagctactcgggaggctgagttgggaggatcacttaagcccaggaattgggggctgcagtgagccatgattgtgccactgcccttgagcctgggcaacagcgtgagactctgtctctttaaataaataaatatgtaataaaagtggaaaaaacaggcaaatgtataagtcactgatctataactctaacgtgatagtttgtttatttactaattatattgccaactgacactgattgctcagacccttaagaggcactcttgtgtgaggatttcactcaagacaccaaattacagacagtgaatgttccatggagaacagagttgaaatacttccatgcatattgtctctgagaaaaccacctcttttccaggagaggttgttctgcagagggtgccagatcccaatcctgaagaatccaaacaccttttgaaattgtattctggggctgaggccctgcttgttcaccttgatcagacaggtgaatttcctcagcttcctcagccattgatttctaaatgatctcttactttgaggtgcagataagctttcttgatgtagatcctttccattttccttgtaggtacttcgtggttcaaactttcactactgcaactacggttaccataaagtgattactatgtgctagattgtgtactaagtgctttccatgaaatatttagttgtcacggcaaccctacacaggtctggccaataaacatttctgcaatgatggaaatgttttataatactakcaccacctaactctggtagccattaacacatgtgaataktgagcattgaaaatgtttctagtgtgactaagaaactaaagttttaattttgtttagttttgattaattaaaatgtaaatagctagtgtggccagtagctatggtattgacatgatgcagatacaagtactttgattctcatattacatgtagagaagctacagttcaaagaaattaaataattttctcaaggtcacagaacttgcaaatggcagagcaaggatttgattttgaagtcagtgtccttatccctatagtgtatggccactatttagactgtgcctgctctttttgtatccaaatttgttaagaaacacctctggtacatttgcaattaaccattgaaagaaataaaactgataattatacaataaaggacaacagtcattaaaacagcactaccctggtcccaaaatagaagtatggctaatggaacagaagaaaaaatgtacaggtatgaaaatagatgttcttgtgttatatttatattcttatattactgtgatgaactgagcatcacaaaagaataagaaaggaagagctatttaactaatgacttgggaaaaactggttatcaattaaacattcataagctcccaacctagtatattgtatgaaaatatatttcaaatggcataagattcaattattaaagaacaaacttgtttaaaaaatcaaatcacaagaaacagcagaaaattcatttaagaaaccatctgttccatggtaagttctgaagaaatcatgaaggaaaaaattacagatttgactgcttaagaaataaagactaatgaacaataaaaatatacatagaataaaaaggataacagatttggggaatatttgcaacgaataagaaagacaagggtgataattacattatcaataagaaaaccttaagatacccgggaaagttaatggaaaagaacgtgaacagacagttcacacaccagggaatataactagtgattgagcttatggggaatagttgaattagggcttttcaaagaggtacaaattaagtgatgacaagatagcatcttatgccttttgaattagcaaacatttaagaaaatagtaattctttgtgttgaagataaggcagaaaactgctgtatatgctgcctgcggcagctaaaattactctgatttaggaagcaaatttgatgaagtaatcaagaaccataaaaatgttcattcagtctgacttaataatccgcccctgaaaatttatctgagaaaaaaatcctaaggaaaattcacctccttttaccatcaaacctttaaagtagaggaaaggccatatattaaataatgtgaagattttaatttatagagttagccctaataaggaaaggaagggaagcaatctaaaatgctgagtcattggtgaaggccattaaatatattatgacacatatactctgtagaatattatgcatctgttaaagtgataattatggccactgtgtagcaacatggaaaatgtttataatggcaaacgaaaaacagcaggatacacatttgtatcttgtctaaaatttcaatcctgtcgaaagatacacatgagggccaggtggtggctcatgcctgtaatcccagcacttagggargccaaggcaggcagatcactkgmggtcaggagttcaagaccagsctggccaacatggtgaaaccccttctctactaaaaaaatacaaaaattagctgggtgtggtggcatactatgactgtaatcccagctacttgcgaggctgaggcaggaaaatcacttgaacctgtgaaatggaggttgtggtgagccgagattgcmccactgcactccagcctgggtgacacagcaagactccatgtccaaaaaaaaaaaaaaaaaaaaaaaaaaagatacacatgcctaaggacccagactggaagggaactcaaggcaaacaaaaacagttggtatgttagggtcatgggacttgtttttatttttatttacctttgtcctattttctcaataaactcaaactagaaatggaaacacagtcacagaaatgaaggatattcataaagcattgtttcctgttggaagctgccttttattctcctttgccctcagacatgtactcctcattttgatgagcagcaagtgatcagaattatccagccttcagtcaaacataatctgtagaagaaagcactgctttatgcaaggagatttactgtgtgatggttggcaaaagaaaggatgcacaaagactctgtgtgggcagatttagcagaggtactgaaagtgaaaggagaggccatctggtagaatgtgctgtggcaaattaaactgagttttatgaacatgaaataccagaagaaaatccaaatgccctggacttggaaaaagcccatctgaggcaccataaaaccaatcaactacagactgacaatatgccactcataagctcagatatgcccattactagggacagcatcattcaagccagattttgcagagctcatttgatgtggatttcccgtaggggaaaaaatcaacaaattacccaccgtgtcccccacacatgcgcagatgcctgatacagagctactgtttcaataaatatggtaaatgcataatgatctggaaggcattggtttggcttctcctgcctcacattcattagtgaactctgacacccaaaccagacaactagacttgggtatggatataaggagccatttttccctccctccctccctcctttccctgcttgcctttctcttttccctcccaattattttcattctttcctctcccctccctccatctctccctccttctctcccttccttccctctgtccctccctccctcacttccttccttctttccttcctttgtttctctctccctcccttcctccctcccttccttcctttctttctcgctccctcccttcctccctcccttcctgccttcttttcttcattctttctttcctgtccctccctccctccctcttcctcccttccttccttccctccttcctctgactctctccttccctccctttctttcctcccctcctcttttcttttcttcttttcctaagcagttcatatccctatcctttagcctgtatgtctggaattctttatagttccactacacttgccccctcattttgtcctaatgttcctccaattctccatttcctctttatttttactctggggctctttcgagtgcatgtatcctgcatattcagctacttctgcttttcctcacctttaatgctttgattgcttccattagagtgttgataattctgtcatgatccttgtctgtatatagttcttccttatatttcaagtccctttatgatagctctgctacaagtgtgttttcaatggcactgtagttctgctgtggctttggggctgctttggttttctttggaaggagatagctacatgggtagcttgattgaggaagggcacaaaagcagtctaagtgtttgaaggactgtctctgggaagaggagcttagctattcccatgtggctagaaagggcacaacaaatcccactgggaggtgtacttagactctgtaaaaggaagcacattctaatatagcaggtcaaagactgaatgggctatttccagggccgacatatctgggtgttcagtttgtgcattgtacaaagacacctggccgagaaaatgaatgggagctgaaatgcagcccgtgctttgctcactaagccctgtgctctggagtgaggccatgccgacctagaagaacgggtgccaagataagttaccttttgatattccacataaagacaccagtatgtgctagtggtagccctagctatcccaggaggggatattgtctactgttgcagaacaagggagagaatagatgaacttgtgtgctagaggaagtgcttgcctcttctccaccatctccacatttcctggatgtgctttgattctattgcactgccaaacaatccctttttctaaacttgtctgtgccaatcttgtgtcttcttatctcacatatgctaacaacatccacattaagactctcaacttccccgagatggataggtgccatcacataccgtgctggattgaattctcatttcagagaatacatcttctttctacttttcaatgaggatcagcatcccattcttgcccaccacctagtactttgttaggaacacaggaggtaaggcaaactgaaagcactttgaaaactgtgaagaattttttcatcaatatcattagacaagatcctgttacaccaggaagtcaagaggctttactggcatttagtgcctcttgtttcaccatcaagattccctgtctacaacagttcayagctgagtctctattcatcaaactttctgcagggttgacatacacaccatttatttggctctcagtgtataacatttggtggtgagtcaccctttcctgtgtacatcttgtttaccccagatagactgtaagctcctggaccaattcaggaaaccacatactggtttcctggtatggaaaggaaatgttttatttcagaaagtcacttctctccatgagcaaagaacagtgagggtcattttaaactgttgtagctgaattccaaatggcaactgagatggtcccaagatttgggccatgtcaatttagggagtaggtaattaaaggcagtccaacaatttcacaaatttatagttaggtgccatgccgtgcactgtcttggaattcctcacaaggacattgtgtaatgtatactttttgaattcaattgaatttatccttccttccacctttcctcccttccttcaacaaatattcattgagactgtactatgtttcagtctttgttccaatgaacctaaacagacaaaagtctgtgccgtcatggaactttctattcttgtccagatctgccatttactagttgtgtgtagactcaaccaaatcacttccttctccggaccaagtgtgttcttctgtgtacactgaaggtttcacagatgtttccatttttccttcctattattttttctttaatcaacctccgtacttttaattgctttcttggttatctatttttgcctaatatccagtactgtaaggaaaataacaaggatgtactttttcttttcttttttttttctttttttttttgagacagmgtctcrctctgtcscccaggctggagtgcagtggcgtgataycggctcactgcaacctctgcctcctgggttcaagcaattctcctkcctcagcctcctgagtagctgggattacaggcgcccgccaccasrcscagctaatttttgtatttttaktagaggsggggtttcaccatgttggtcaggttgatctcgaacccttgacctcgtgatccacccdccttggcctcccaaagtvctgggdttacaggyrtgagccaccgcgcccggccgaggatgccctttttcaatggttcacctttgggtatttttatatctatgtttgcctagatcattcctttgttttgatatcatcaatttgtttagcccaaagataatggctgttgtatttccgtcttgagtgccaagctcacaatgagctgttactcagtttttgaagtattttctcccattataacatcaaccttctttcatttatttcctttagtcctctgtcctgagagcatcccccagagttatagccttggattctcaagctgcaggagattgcatgtttaaccatgataaatactcaggacaaaattgagcctttttttctctcataattttatttgtttaaatcttgactgcttatagtaaatatcctctcaaagataatttcatttccaaacaatttggtacctgatctgacgcagcttgagtgtttattttggggatgttgtttttcttttttaatgagttccccaaaatagcttttattgtttttacatctttcttttttttccccgggctatcagagggattgtagttagcattgctggaggattattagtttattaataataattatctcttaaatttcttttttggaagcagcatttggtcattattgaaaaaacagagcttttaaaaaatggaatgactttaaggaatctgaagaaaagataaatgtactcctgtatgatttttatagtgtttgcaatccagtgatcattctcacattgtttaagtttcagtttcaaggtgcgttgtccccctttatctgtggggaatgtgttccaagacccccggcggatgcctgaaaccctatatatactatgttctttcctacacatacttacctatgataaagtttaacttataaattaggcacagtaagattaacaacgacaacaataaaatagaacaattataataatatgctgtaataaaaattatatgaatgtagtctttttctctcagaatatcttatactgtgatcacgtatttcctgactgtgagtgaccatggctcactgaaaattgaaagtgaaaccacagataagggtggggactatgatagtaaggtaagattggtattaatatattgtctgagcaaggcaactaaatgtgttccttttggaatgcatactgttacaattcaggtttaattattaaacagcattggtctaagtggatgaaggttctgttttcgacccataatttaacacatgtcaagtttaaatgtacacagtaactcaaaaaacggcctgcctttggttgttgtttccaggatactgtgagcattgcaattagcaataaggaaagcactgaccaactcccggaaccacatctagttgcctggcatggaaaggaaatgcttttattttagaaagtcacttctctgcatgagcaaggaacagcgagagtcattttaaactattgtagttgaattccaaatggcaactgaggtggtcccaagatttgggccatgccaatgtagggagtagaggattaaacacagtccaacagttttacaaatttctagttggtgggtggctgggaactgtttattattgttaatgttactgaaaaatcacttgtttcgtgttaatacatcatcccttctccagtcctccagccccagtgaattttgtgttgatatagcaatgtgttcatagtgccactttactgaatcagttgttaaacaaatatttgtgccatacctactattttacagacattatgtcaggcactggggaatttatgttggtgaataaatagacatggttcctgctctcatgaaacttaaaatctggtctttttaagcaagctatttcacttttctgagagtcagtttcattatcttaaaataggcataatgcctatctggaaggattgtggtgagaataaaatgagactatgtctataaagcactggtgtgatgtttggcacatagaacatggtagaacctcaacaaatgatggctcttataatcattgtgagtgctggagagccccagtgctggtctatggattgaagagctatcgaagaggttcttgctgaaggttcaccccttggagtatctctactcaatccactgagtgggaagatttgaaggtaacaggctacgggggttgaacttttcccacatggacattttaaactcagttcaaatacatttgaatgagagagcaaagtacattaagcacagaatttctagaactcaccttgggaaatttaaagctgaccattttctctagcattttggaaattatcaaaaggccagacggaatgcacaattcacttcttggctgccaggagtgaaggagagaagaggtgaggttgaatgatttgaaattcrgttcgtctgtgttagaacaagtcaaaacaattctagctgttaattttagttagttgagtccagagtaaaggtttgtaaagggcataagaaagcaacattacttttttctcacaatgagcacttaaaagatcttttaaaagtgtttctgtaatgtaaaagaaatagtcttactgcagtttttaaaagcagaaggttccttgtgtctattaaaattattttaatttattgtcatattactgtaaattggaaaggaccacaaatatattatgcttaacttccagattcaagtgtcttgcaataagttaaacacatgtaatggtttatgctctttaaaatgtttttgcacttattttattctgcccagcagggcagagattattgtctgagtttcataggtgaaggcgttgaagtacagatgcttatccaagaccctgctgtttgttagaagcagataccaggacaagaaacacagcttttcttatttcacagcacttggccatagcaactactttttgctgttttattcacattgacatgaataggttagtacctgaattctttaagacagatgaaaagtaattaagtctgagtctcctcaaacaagatatccctctgaaaagatggatgttgtaggatcatgaagatggcagtctttaaaaatctcagcaaggaacagcattgtgactagcgatagagtaaaagctgtgagaattgcacagattccaaaacgctgttaagatgatctgctggtcctttttccaaatggggaatatggtgatatggttttggggtatttgtgctttatttatttatttattttgagacagggtctcactgtcacctgagctggagtgcagtggtgtgatcaccactgcactgaaggctcactgcagccttcacctccacaggctcagataatcctcccacctcagcctcccgagtagtttcgactacctgtgcataccaccagatccagctaatttttgtattttttgtagaatcagggttttgtcatgttgcccaggctggtctcaatctcctgggctcaagtgatcctcccacagtgctgggattataggcatgagccatcgtgcctggcctatttgtgcttttgatgtacattagtccctaactggctcttgagcttctgcttcatgcctcccacagtgccaactctaggattgtaagctccccaccctgattcacttacaatcataatgtagggcttgatgtaaaacatgagaagacttgatgtttctgggtaacaatgggtgcagctcttgattattcatagtctgattatccttactggggagtatcctgtctcattttacttcttgttgtctgaatgcctaccttttacctttgtaaactccagatttaaagtttgtgtagggtggggtgcggtggctgacgcctgtaatctcagcactttgggaggctraggcaggaggatcgcttgagcccaggaattcaagacaagcctgggcaacaaagcaagagaccatctctaaaaaaaaagaaaaaaaaaaaaaagccaggcaccctagcacacgcctgtagtcccagctactcaggaagctgattcaggaggattgcttgagcccaggagttggaggttgcagtgagctatgattgcatcactgcactccagtctgggtgacacagcaggagacactgtctcaaaacaagaacaaaaacaaattttgtttaaaactgaaaatggggggatagatggaaactattttactttttatcttaacagcttgtgcaggtagaacagtttaatgaggaaggagctgacactcttgcctatggtgtgttgggagattatagattttagttatccatgtttatgttgtaccccaggmctacagattattggcagctggctataaacaaatgaccaaataaatctacagttgaagttacctagtgtctccaagatttcagggatgatcaaggacaggtagcagagcctggggccatcagctgtgtgttggcctcatctcattctgaacccctctcctactttaatcagaaccctgatacttaagggactgaactagctgtgacatccatttatccattttatagaatggctgtaggtaactacagggccataatcggaattctatacagggatgggtccctaggctcattaattgatgacagggtaggagaagactttgacacctacagattcattagagacagctgaatggatttattccaaggaggtcacctttgaaaacgcaatgaatttctatgggtggataacaatgcaaataggcaaggatgaagctttagatttaatctacatctgctgcaacaatgttctgatatagaattgtttagcccaagtcctaattgaaaaggtgagtaacattgatattgtctttctgaaatggattagaaatagggctggaaattggatgctaggaagagggacatataaggtttatgaggtaaaccccaataaatggaatttactatgattatattaaaaatagagacaatgtcatgtttatacagcgtgtaatatcatgcataatgtcaaatgccctttggagttactcctgtcccttgtactgataacatggcagttttttgagtcctagcatagggaaacagtgaaaatttccaggagtgcatcttttcaataatgcaaaggatacatatcagtgtttcacaaatttctctcttttttttaagagacagggtctcactctgttgcccaggctggagggcagtggtgcaatcagctcactgcagccttgaactcctgggctcaagcgaycctccctcctcagcctctggaatatttaaaactacaggcgtgcatcaccacacccagctaagttttaaagttttttgtagagacacggtcttgctgtgttgcccagactggtctggaactcctggcctcaagctattctttctccttagcctcccaaagtgctgggataatgggtgtgagccaccctgcctggcctcacaaccttttgaaaaagatcatcccctaaggaggaaattcaatttaaataatcctaatgagagaacttaaatactaaggaaaaagatttaggggaggaggattggatgtgaagggccacaatctactgtaatatctttttttttcactttccccccaaatcaattttcttccccttatggacaatatcacccttgttggaaatgcatgatatagatctgtgaagccagccaatttatgatgtgatatttaaattgtctctggttatggatattgtttccattgcccacattaaccctcaagaggagggcagtaatgccaattaagttcttgctatgtgttagatcctttccatgcattgtttaatttcacccttacaacaaccctgaagttgagaagttaagcgactttcccagactcatacagtggcaagtcaggggttgaacccaggcctttctgatgccagagactagaatatttctaacacttacttatcttacgggaggcattacaagatgtgtcttacatagaaaggacataatggtgggtgtttatttctgaagttgattttggagtctctggattgcattttggttaccctcaggtagaatagaaaagagaaacttgattaatactaaattttctcttttattctctccacccctctttaatggtttgtattgtgtttcttagtattatgtggaaataaccttagcttcttgatatgtgctgagatcctaggaactcagtgacttacagcacaggttggataaggttaatattatgttaataacacagattttatagctcttctactaatctttacatagattaatgcctctcaattttacaaaaaatagaccattaattgtgaagctggaagaggacaattcatggcagaaaatgttaggttagtagaacaatagtcatttacacaggattgttaaagaaagggaaaggtaaactgatgttcaacatctagtgcttgagaagttgctctgcacataaaatcaaaccaggcagctttgacctagctcttgggagagaatatatcaggttgtattgatgatgcattgatgagaatacatcagtgtgtatgatgtgggagcgtgtgtgtgtgtgtgtgtagatgtagaaaatagcattttcttatctggactttagacttcatagttaaagtaaattatgttcatacatctgtatgtgtagacttcctacctgtgctttaacgcctctatctccacctccatccctttcttctgtctccccagggggcaatggtgcaagtaaaccaaattcgaaatgcttggtcccagtgttgttagcarctgattcataggtgctcccctcattttagataagaagaaattgagatttgcaaaagtcacacaaactggagctcagattgcctgatttgtactggtatattgcactgtctgtcggccttcactctttctgactctctgcttcttagaaaaagagagtgtgggaaaatgtgctggcaccttcatctggtggccagagaccaattctaggccagaggtaagctttaaagagaataaaaagtgaggaaaattggctcaccagagcacgtcattatttacataataatacattgactacgatgtgggctttaaaagaaaaagaaaatgaaagtctttctcacaaaatactctaaaaataaactttttagggaacattataaaaccatacaatgtattttttcccaaacacaaagtcccactgaaatctgtctcttggttttttagatgccaaaagtcaactcatcttgatgtagaaaatgaggaggtgctgttagtgcatggagaaatagccttctgctaagaggtagttgacttagtttctaacttatgttttcgtttcatgctatgtgatcttggtcaaatcattttgcctctctggactttgatatccttttctgcaaaataaaagggttcaactggatgattttgaaagcacctctctcttctataagtctctgcaagtgggaagatgattagtttgtagtcttataatgtttagatggtttaacactgctatcttctagcttttctaaaagttttctgatgttgtcataggcagttttgtgtacaaaggtcatttgatggatgctaatgtacctttggttgataggaggttcgtaaaagaaatatgcatcaaaccttattattcgtgtattagataaagcagatctactgacattttaatgtcaccaagtaagtaatttataaagtcagtgtgccccactgaaacatttccaaagatatttactattgagtacttgggttctgctgagggtgaatactgaaatgtattctttttgtgctaatgtttgcagtacagtgtttcccagcagtcagaatgattgtctgatattgttagtgtaacccctgtgatctaacataggcttctgtgattataatgatttttatttgaaaaggtaattgtgtttgcctggcaacctccccacttgattttttttctgtatacacctctttctttggctctttaaaagccagcagtagagtatgtgtagttaaaataccttcttcttcttgcatccacgtttttgactgtgtctttgcattgccattggggggactggagagttaatatgctgtgttgcctaaaggaataaaagcaaaaattatctttgcaatcaaaatattaccagaaagaatttattaaaaattacaacagagagaaaaacggacattaaaaagagatttttatctttgtttgctttttgttttattggcttgccgagctttatcagtcattaatgatgaaggaaatagaagacctctccaaacctatgcatttgaattttgtccagttatcaagctttcccctgtgcacacccaattttttttactagctcaaggacaaagagatttttctcattttcccattttaagataagctatataggaatctgggtacatttgagtatgtgaggaaagatcaaggactctgtaagcatgcatctttccaatcatggcccttttagcaatttgcagtcattggaatgtgggagtttagggagagtgctgtttccagagttagacacttcggtaattccactactttagggtttcctgccacatgctgttggctttcagtaacaagtttcagtaaggattctcttggagtatgcatagaattttcttaacaatctgtgagtgattataagcagtatattctgggctcttgtgttttcgggagttaagagacctctcttttgcagtccccaagagtccatggcgctcatctatgaaaacggcccaagtgacagccagatgaatgtgtgctgagcgccactgaggctaagtgccaggaaagtagaaggcaccaccctgtggaagagggccaggaattctagaggacactactcctttgaacaaaaaggatgtggaaaacagttttctttgtttccttttgagttagctttgggcatgggctgatgccaagcttcgtcctatgacaggctcattgccatccatcctacccaggagggatgcatctctgagcatggagacagtgctgaggaaggcaggttggatggtgcttccttatctgattatcagacaagccatattttttcaaaggaacagtgagaacagatgatctttctgatctcgtgttaaatacagtactgggcatctttagcatatgtgctttaggttattgccttcttagcctgctcagaaaaaaaacacagcactggcagcattccgtttacttactcattagaatctaagggctggaagatcccttgaaagtcatctactccaccacccacccccatctgatgcaccagctgtttctacaaccaagtcgttatccttgcctatgcatgatgttctcaaagacacggcattagaacaccttccattgattgagttgaaatctttttcccattgctgtcatgcactgatgctagctgggcttcttggaaccatacaaaacaagtctaatgttcttctctatgccagcccttcggagctttatgtcacattccagtctcacccttcctttccatctcagctgcagtaaggttgattaacctgaattaaggaagacttgagggtggggtgagaagttgcacatctgttcctctgataacatggatttgattctccctctcccttttggtccctctgatagaaataggctctagttcttccatattcctcttaacaatgttcagatgtggtctcactagtgttgatgatctccgtctttatacttaactttgattcagcagtggagtccaagattctgttagttcttttggtgatctcaccatactagagattcctattcaacttgtacttgataaaaattttattattgtctgtgcttcctctaagccactggtgctcaaccggggtgatactgtcatcccccacaacgtccccaggacatttggcaatgtctggagacaattttgatttttatggcttgggggatggtatactactggcatctaatgggtagagtccagagatactgctaaccatccaacaaggatgcacaaaacagccccccatgacaaagaattatccagcccagaatgttaatagcatcaaggttacagaaccctgcttcaagccacttgtgtccatattccttccaaattttttctctgtacttgtgaaggtagctttgttgactcaagtcaggatcttttgcttattcctatttaatttcatctggttagaaatcatacagctgtagtgtttcaagaccttcttggacttgatatatatcatcaacgaacatatctgcagtacctccagcttcatgcatgaacccctcttgcttctgatggactattaataccaaattcagggaactctcctcttaaccaaaagcaaattgttttcctagactggcatgggattccatggcaggtggactgatgatcattaggaggtgctgtgctcagttttttttcttttttacatttttggtactcccagacttccttagtagagagctggtgtgatctagaatggcatttgtatcttctcccacccaattagattagcaagagagagtttagccaagcaccactgctctgcaaatggagtctccaaatgccacatcagcagaaagaaaagtatctacactcataagagcatggggtagggggaaacaaggatgcataggttgttgcttggcaaatccattcactcctagcactgttccagtgatattagttccacatgcctagacagatagagaatcactgcgactggtaggcaggtcctgctgtctctaatgggatctgttttaaggaaaaagttcttgcatctattctgatttctgtatcaggccaaacaatgctagagttgctgacttaatgaccacattggctccrctgttggtcaagatcatcagactctcatttcagctttcaatgatattgcatcctgcaaacaaaccacttgagatgagcttggtataagggtcctactaagagagttctgattaccttattcacttgagatgaaatttttcactggagtgaaattaccagacaactaaaatgttttttccaagggacaaatgtgcaatttttgatccccaagagtagaccagaggccaaaagctacagccattctaccttgcctgctgtgtttctgtggcacacaaactaagaatggtttttacctggttaaatggtaggaaacagtcaaaagaagattttgtgacatgtgaaagttgtatgarattatatgaaattcacatttcattgtccttatggcggggtcatcagaacgcaaccacacttatttatgtgttatttatgctgctttcttgaaacaaaactagagtagttgcaacagagaccttatggcccacaaagcctaaaatatttattttctggccttttacaggaaaagcatgccaatccctggtctagagcttaatttgtgtaaaagacccttcattttgtgacttttattctgttaggggctgagaaaataaacttcttatgaataacgtatttgatgggagtcttttggtgtctgagtgtggactcaaggaaggcaccgagggcttttgagactgctaaataaggcatctatttctrtatatactgtcatggtctgggagctggaagaaatactttaagaagctcaagttgccggatgggatttctggattttttatgtgcacaactaatagcctctcaacctagagttgtaaggtaacttctaatgttcatagggattttgagaattgcttcctgattaactctragagttgttcagttatttacattctttcagtagaattcttttatacctcctatgtgccaggtaataaatgtggagacctttcccaaagctttttgtatatatttaatttagagagcttctacctcaattttgttgcaattaaactgatgctaaattatgttcttcccttttgaattatggctgattgtgtctctcatcatacatagagatgttagaaagctaagctttacatttcagctgcttatattatatatacacacatgcaacacacattcacatataattgaactaaattgacattgacattgagagaatatcccctgatatttatctatgtaatttttattcttaggattagattaatcagtgattgagactgatcctctgaatcaatctctctctcgatgaaatacacaatatgtataatgtatatattaataattataattattaattgttaatatataataattagatattataactacacatatatatttaaaatttatattttctccagaactttgagttttaaccctagagagactctatcacagcacccagaatattctattttaatagttcatttaggataccaacactggaaaactccagttttccagtgatgaataaagttggaaactttattcatctagcacgacgtatggtgctcagcatagtagatgcctctgaaatgctgattgaatggaactaaactgactttaatcgagagaatagccttgagatttctttatctatataatttttatccttaggattagattattcagtgatggagacttgacctaaaaatatggctctgtaatttcactgatattgtcaagagcttgtttatgctccatcagcatcaggtccgtgggtgttgattccacttataggagtccctgtggtgttgggagggggccagaaaagtaaagagtggtctgctggaagtcagtggattagctggagagctcattctgctgatggctgccctggtagagcaccccatttggaagtggagctgaagggagagacagtagtgatgctaagagaaatgagaggaagatgagaagggaaaaattagctcatccaggcagaacctttattaaatttagttccagatcttgagttcacaacttaaataccctgtaagatcagaaatgttattatttgtacctgtagatcaagacttagaatacaggaggatcatggctatccaggatggaagagacattggagcctctctatttcagccctctagctcaatggttcttcatctgggttagtcagtggcttccctgaaaaggctatgtgtctatgcatttttcttgagaagagattccacgctttcattattttctataggatgagtccaggaaacctccttcatccccactcccccaaaaagttaaaagccacctctctagaagatgtgtgaactcttcacagggattctgataaacaattgctgacagatctcatgtaaaccttcctataaaagcgaatgtaggatttcatgaggcagcacagctggaattgttgtgaaattattccccacattgagtggaaatttatctctatgtaactttccccaacttcattttatttgtttgttctctgctccctaaagtaactgaaartaagttccacccctcttctatggtcctttgaatataaggacacaatttgtatgccttccttaaggcgacttccscagggaaaagagcctttccaaacttttctcatgtatttgtgctttacagactcttccctgtgttggttgttttgtctgttttgtctttgtccctcataaagtcatggcagctagaattgaagatcgcatttcgggagtgttctgaccagcacaaatcagaatgctatcatctacaatcccctcgttctaggtaatatatttctagtaatgcccaattaactagtttctgtgatagtgcctcacactgctgactcataatgaactgttgattgctaaagcctcctccaagctgcgtttggaggtttggcatgtgaatctatttatacccacttttttatatttaaaaaaggcatcacattgatgcccaaatcaggactgttatgcacatgtatgtagatgagtaagtttccctttatgaatttaaaaaaacacacacacrtcatttaactttattattcttgttgctttgcaaaatattaaggacatcttgatgctttcagaatgaacaccaaaacccatgtaagtggtataatacttaacaatgttcacacatgaaaayacataagtggtttatttaattcatgatcaattatttgtttttgaaggaattttcagcattttttatttggacattctggaaatgaaatagtaaacatgattagttcaggtagcattgagaacttttaacggatataatacttatgaagaatttatttgcagcagaaagtggtcacttgctatttataagatgaggaagatagtgtgagccaagtaggaggtggagataacctcctgccaacagatgccaaaatgggagactgccactcggggctgcctggaatgcaactgcacctagaagcatactgtgttgtatgtgtaaacaagcaagaacatccttgtgtaaatgtgtggtggctctgctccttggagaaatagaatggtttctcaacatcattttcttataaattccttgctgttaaatcagtagccatttatccagatacttgtagtggagctagagatccccctctggttccaagtctataatgaattgtggataaagactgggctggcttaaacatcccaggcatggcaggcccctcatatgggaatagagtcaccaggatctatctccttcagaggctgcttctgtcggatgcactgatgaccagtgagagtattctactgtgtgtggtaatctggaaaggcccctgccttcatccacagatctgtctattcagggcagggggaggggaggaagagaayaggccagcctggaagcactgtttctctctgtctttctctctcgggattttctgggaatcaaaaggaaaatattttcctgatagtttagcaaaacatttaattaggggtggtaatgaaaagtgattacagcagcacaatgcgcttgcattatgagttcgagttaacatatttaggggtacttgcgcacaagctgtttggtgattagggaccaatccgctgaacatgaaaataaataaataaatgaaactgctgtgtgaaaaatgaatgtgctgaaattaggctgtgtataattgcaacgaaaccaaaattgagcagatacagttcccacagagaggtggaaaaccttgtcagggagcattcgccagcctgagctgttgtttgtggctgtgtgtggaatggactcaaagcccactgtggctgctggaaagtggtagggtgatttgatctattcagtcagaactagctgatgtagtgaccgaattatctcaagtgcttcccctcctgttatgtaggcaaaacctctaaattcaatgggttggattttttctaacctttaatcatttgcgtttgatatcatgtcttcattgccagtttcctccttaacccaacgtctttcatcttcaatcttcttaaactttaaaagatacaacccttcatctttcctttgatcttcacctgatgggcatgttagctgtgtccatcagtttcactaacctatttctatgaaaacagagaaaatgtttaacctagtatgacgggcctatagattataaaaataattgactaattttgttgtaaaaaaatactactctttgtaaaaacaaatcagcaaagctggagttttgtctttataaaacatgatgcttggttgcttgcttttttcaccttttaactggctatttgggtatcaagttcaactgaagtgtacttttgagaactgtcacagtagggcctccccattttatatggtagctcaccaaactgactgctgctgccagcacccttttggtttgctcttaattctattgggagccctattgctggcaagaaggctcctcatttaattcccataataagcttcattttcagcaatgcctccctaccctgagcttcataaagagtatcatgcctgtcgattttctttacagaaaggtgagcggtacttctgttgcccagtttgatacccagtagggagattcacaagatgccaagggtcttctacagaggaggtactagaagagtatttgtggagtatatgaaggaccaaggatgcagcaactaagcaatatgtatactgattatagatattttcttgattttggggggaaaaacctccagataagaaaagcagtctcattggagacctttggaaaaatgaacaataaatctttggagctcttctaaagttggtaagtctcaagtttctcccatagttctacgtaagagtactagctcattatttctcatagaaataattgagagactgaatttccttcaaagtatgaaattgggtgattgtatgagatcatgtgatttcatttcctctgttagggctttctcaccacttgtaactagaatttaagaacaactttgttgcacttgaaaaagaattaagctctgtaagcctactgctttccactggcccactccagttttaaaattgctttgcgatttttatgaaccacccctgtgaagttaataaaacacaaacatggtatgcattatatatgagagggaaatagaaaatgttcaacataaccgcttttatcattaagaacaggcagcatacagaatgatttaagaataagtgctaatgtttatgcatttttgtacctgcacatatattagaattgacttcaattcttagtcatggccagataaggacacaatggctgtaggaagggcaaagtaggaagaagaaaaaaaggggaaggaaaggagaaatagagtgaaattaatattttatgagcttccaaaatgtatcaggcactgtactaggcattttcacacacccaattccatttaatccttaaaacattcttgcaatatacaggcttttaaaatcccaataatattaataacatgtgttaggtacttagagagaaagggagggagggagagagagggaggatgaagaggaaggggaagaggaggaggagggagtgacaaagggaaagagaaagggagagtggggaggagggaaacccaacgcttgcctcattccaaaatatttgggcttgattgactttgggaacctgcattattgatctcatgattctgagtctcccctctacctcatgcaactaaattcaattgttaaattaactggatctttgtgggtataatatcaaattagaactaaagatacttgtttcatagtcaagagccaagtggttgacccagttcacagctcttcagctgctcttactacttctgcagaggctctaatttatttattatttttttttgagacagagtctcactctgtsgcycaggctggagtgcagkggcaaratctcagctcactgcaaactctgcctgctgggttcaagtgattctcctgctcagcttcccgagtagctgagattacaggcgtgcaccacyatgcctggctaatttttgtatttttagtagagatggggtttcaccatgttggccaggctggttttgaactcctaacctcaagtgatttacgtgtctcggcctcccaaagtgttgggatcacagacatgaaccaccgtgcccggccagaggttctaatttgaagaggatactcatttgcatcttcccacttccatgggaagctgttttttaccctcctcttctggttgcagatccttatcatcttgaacaattgttgatcctcataggtaacttttttttatgtgtataaatttaaggtttacaagtgcagttttgttacatggatatattgcctagtgatggagtttaggcttttagtgtaatcatcattggaatgatgtacactgtatctattaagtaatttctcatccctcaaccccttcccacactcccacccttccgaggttccagtgtttattattccacactctatgtgcatgtgtgcacattatttagtgcccacttataagtgacaacgctaggtatttgactgtttctgagttgtttgacataagataatggccgtcagttacatccatgttgctgcagaagacataatttccttcttttttatggttgcatagtatgccacggtgtgtgtgtgtatatacatacatgtgtgtgtatatatatatatatatatatatatatatatatatatatatatacacacactacattttctgtatgcagtcatccgttgatgggcacttagatcgattccgtgtctttgctattgtgaatagtgttgtgattaacatgagtgcagatgtctttttgatataatgatttcttttcctttgggtaaatcacagtagtaggattgctggatcaaatggtggttctatttttttttttttttgaggaatcttcatactgttttccatagaggttgtactaacttgcattcccaccaacagtgtataagctttctcttttctctgcattcttgccaacatctgttttttttttttccgactttttaataataaccattctgactggtgtaagatggtatctcattgtggttttaatttgcatttctctgatgagtaatgattttgagcattttattatatgcttgttggtcatttgtatgtcttcttgaaaaatgactattcatgtcttttgcccgctttttaattggggtgtttttttaaaaaaaaatagtgacggcaggtggtatgttcctcacacttgacttgtcatttacaactgaatttttcagctcacgatattgaaatccagaaccactttttctatagtcaagtgtgattcagcaaaaaataaaaccttcttgcattcatttggaagtaatatatgtccttttggaatttctgtgtaagtccttttttagtgagaaaaaaatcaagtccaagttaaaatgataaaatactaaattcggtgttgccaagtagagtttaatttcaattcagatactataatttataattctgggtcttaggagccaaagcctccttagaccatccctttaatccaggcctatcatttggagatctcatagctcccttcactgtaatcaccgtctggtgctagatagtggaactgagatacttctttgctaatgacctacttgctttcagatacagggcaaccagcggatggttcctgggatctcatctgatgagtgacatctttccggacagaactgatgactctctggcagtaaaagggtggagagggcagggcagatatgtttcacgagcaagaagggaaatagtgtgttgtaaagctttgctgtaggcctgccaggatctggtgaagtgggtgggcggggagagcttgtgttcacagaagagtcagatggttaaagaatttatgataattaaaatgacgtttctatgtaagtctgaaggaatacagccataaaaacataattgctgtaaaacatgctgcatcagactaaataaccacttgatgatggcaactatgcctgtgccataaagaaacctgtgcttttgtgaggagaaaaaaatatgtatttattatggctatttgcgtctcatgttaattgttcacaacaaagccattgattaagcaatgactccttacaagatggggctggatcaaataatgcacagagtacagcaaacaaaaaatggttgtgagatgaaaggatgattctgagaaacagggtcaagctgagaactctctgaactctccttgggcacctgcagtcatagttctagaagtgtgcggaacaatttgaatgagagattagatctgagtttcggggttttcttttcccaaattctactctgtaaagaatggcttgcctggatatggaagaagtgctaatggagggaaacaataaggactgtttcacaggaacctgccacacagggttcctgtttgaggtagagatttagtgacactgcctgaactcaatcagagtgaagccaggctttctgcattctgctagtttcactgcaaactgtggccagtggggccagcattcagtcagaaacacctgtctaggaagtcacaaggccatttatgattagtcttcccaatctggacatcatggagcagactcaggcacgtgaatggcgtctatttacacacacacacacacacacacacacacggctatactgttttcctggacaatcatttttcccacatttcctggaggaactactggaatcacaaatcacaatttgtggcttgccctgggtaatgagtcattggatggaatttcatttggtagatttaaagagagttagtgttgatctatgaagccagatgatttaagaaattgaagcagtaacaagtaaattgcttttctcttgtactgcaaaatgctttctaggcgtttttggcttttctttttaaaatggatttataatgccatttctctccacctcacggctcaagtaaacctctttgctctgatgaatcctaaatgactcctcatttcccacaaacagattgttcaaaggagttcttaatatcttgttttacactgtggaagctagaatttttaattctataggacacacaaatgaatatacattccctgttagaggctttatttattctgactcctctcatgaaaaattatgtccaactatgttcaaattccttgaccttataatcaaggcctgccactaaccaacctaaactcacttgcctttatttatttgttcatctggaagcaataggaaaggcttagaatctgccatgtagtatgctagttgttaaagaggatacagaaaagaaaaaggatctgggatacagataagtccagctgcttccttcaagcaatttactggccattggccagggcagatatgagagtggacacttctatgagatatgttgaacctgtgttgaagtgtgtgcaaaggactatgagaggagaggagagctgttgcttctcacagcagcacctcctctacatgggatgcagagagtccaagaatgctccaaaatggccttttccatcttcataatggccttccagccttcccatttgtgggcacaggggccccctgccctagcaaccttaaggtgccctgttgccagtacccttgagactccctcatgtttacggatagattgtaaattacacatgaaaaaggtctcatattaactattttaactttacagaaaccccacagaagtgcagcccacttggtcttgagctccttgaaggcgaggactatgtgatgccacatctgtaacccaagaacccagcacaaagtgttgcacatagcagatgctcaataaaagttttaaactgctgggggaagaaagtactatgggcatctggaagaggggccagctaactccacataggggactctggagctgtgctaaaaaatgtgtggtccactgcttcacttgaagagcctaaaaaatgtgtagagatttatgagggattaataggctcaagaattcgaaagggtactccagacagctcagagctcttgcccccagaatatgtgaggcatcgaaacaggaaagtaaaatgtttctagcagatttcttcccccctccaccccagacagtcttgctctgtcacccaagctggagtgcagtgtcgcaatctcrgctcactgcaacctccacctcccaggttcaagcrattytcctgcctcagcctcccgagtagctrggattacaggcgcctgccaycttgcccggctaatttttgtatttttagwggagacrgggtttcrccatgttggccaggctvgtctcvaactcctgacctcaggtgatctgcctgcctyggcctccaaagtgctggcattacaggcgtggcctaaaatgtttataacagatttcttatcaatctggttctctaaaccacagggaccacttggtgaacctgaagttttgtgactacaaggagatacataaatgtgtatttgagttaccttcatacagctacaatttggagaaggacgtccaggaagatactgagaggagaagtaatcatcgggtactgtttaagagagccgctgtcattactgcctttactgggttggggtcagagacaggtgggggaggtgctctgcaggttgtgttttatgtaattggtgctccgtcctcctccttctgttatatcactcatctgtgcagcttttcatctcatatgtattttccaccatggtggcctttgtaagacataaggtgagcaaactgcttattaaggtaagacaatggaggccccattttaaaaaggttaagatgtcctcaaaagtgtcagcgcatcccaggaatcattaacagtgtatggaatgcacagcctggtattttccaaaggccacactaaccttttcaagcatggaacaggctaaaaggaatggatttcttcaccatttgatgagagaagaaatctttttaaatgcttatttttatttgcttgctgagaatcatctctgtgaagctcaatatggagaaatgaattctgaacattttagcaactcacttaaaataccattagaaagcacttgggttattaaaagctgaaaacaaaggactaggagccctctggcactaataacacttagggagaaagcgagagccacctatgccctcatgtttgccaaaaatgtatttgaatttaaactcttcattgttaagaagggaagcttaagttttgccaaaccctttttgcctttcagtacaaccacttttccatgtaattggctcaacactgctatttgcataattgtcatatttttctgcttcccaagagggctgtaaagcgtaaaggtgaactgcaaagctttgacaaagtgcacatttatgtgtgatgtgcaattctcaaattacgaagaaaattatatctttttcattgagtttatcttacacttggaaatgaagtattcagaactcattgccccctgagatgagtttagcctgcttttctttaacttggccaaagtgcaatttcctgagccttgggtcttcaaataatgatgttgccacaggaccttgactgtatgaatgacctaaagcagaggcatttttctttaagccgcggaataacaataagctcttttagttggaatcagagatttcatcacagctgggccatccgttaagctctgagaggtcaaacagatcatttaacctctcaaagcctcagtttgtttaactgtaaaatgggcatgcctttaactcacacatgtattgagtgcttatatgtgaggaagtattttacccagggcttggtgcatagtaagtgttctaataaacacatgatattgcctcgttcctcttcttttatagcaggtggatggcatttaaatgaatgagagggcttgaactttggcacgggaaaagaatggagttgagtcctgcctatgtcacctttttagggagtgggaggatggggttgcagagagctgtgtgaccttgggcaggttacatagcaggagagcctcagtttctgtatctgccaaatgaggatggataatagaatgtgattgtgcatataaacagcatgtaaatgctcagtgttacctgtagttattaacatttcatccttaacagcggtcattatcaggtttaagatatggccctatgaggagttaatgggtgcagcacaccagcgtggcacatatatacatatgtaactaacctgcacattgtgcacatgtaccctaaaacttaaagtataataatttaaaaaaaaaaaaaaagatctggccgtgaaaacttatgttccctccaggtttgctgtgtgttgtcccatcacttttcacattggggagagtggaatgttcaacttcccttcctgtgaatgctcctggaagcctcctgcttacttccccaagtggggactagatttttacaggtttcctaattgctgtgtgcttctggctgcagcctgagggcatcagattacagtgccaaatggaggaatagtattctgggtgtgatactgatcagatcaggaagatatcaggacactagacatccggcatctgacagctggtcacaggggtcacttttgatccctagtttccccttgacaaggttagccactacatgccaagtgtttcatgggcagaattctagccaagcactaaactctgacagagaaggagaaatacaggctggcaggagggctggcattgccctaatgtcacagctggcactcacattccaatgaatgaatcttggatcaattgctaatgtacggggcccaacacaacattaacagatcaaaataagaggaagttggaaagtattcaagtttccagaaacaggtagttaaatatattaacgtaaatctacttgataaacttatctaatcattttaaaaaaatgaaaacatggtaattaatgttagaaaatgcttatgttgtaatgttaggtcaaaaaggataaaaatatatagtataattagaaatgtaaaacaacaacaatagacaaatctataaagacagaaagtggattagtagttgccagggtctgggaataatgagggttgtggaatcattggccaagggacgtggggtttgttctgggagtgatgaaaatgttacaaaattgattgtggtgagggttgcatcagtgaatatactaaaaaccactgaatggtacactttacatggatgtgttgtatgttatgtaaattatatctcaataaagctgttactgacaacaagaacaagtcttatacatacaaaaatagaacagaaagaaattttccagaaggctaacagtgtatataagttagtagcaaattgggactgatttttcttctgtattttttcacattttaaaatacagtgattaagtttaatgatcacatatgtagtctcatatattaaaataaaaaaactattggaaaggcaaataaacaaaaatgaattaatgccaacttttttagctcatggaattgaaaatataaataatttaaaaagtaagagaaaaaattatttttaaactagatgaaaatgtagcatagagtatgtggccccgtgtactctggattaaatatcaatacttaaccttttcattaatattttggcttgtaatgaaattgccaaacacaatggtatacataagacacatggcataaatattggaaaatctgtgataaaaaaatttttaataaactgttttctcagaattgacgtctatccttgtttagatttagagcttttgaaactttcagaatataaattaaaaattatctttgtaatcataatgcacccctaatttacatgtcctgatcttaaatctattatttatattagcttttatcaaaacattcagataagtgatcttcaaatgattagtacttaagtactggttggagatgaacttttgcaagtgaacgtcatacaatctattatttctattggagcttaattctgaagctcagagactccctagctctcctcgcctcaccatggtaatttattattatcctttgtctcctataatgtttgcttctttggcctacctgtagcataaaccttttggttgttctgcagctatttcagttaaataactcaagccctaaaaaccacagaaagaagagaatgtgcaaagcgatcatatttatggaccaccagatccttctcagcataattgccaggctttttatactgaaaggcaagaaacagctgccttgttctactttggtgtccaactcagctgtttcagattcatcctgttgctttaagcatctgttgacaggtgggaaagctcactgtgaagagaaacattgttgccctgggtggcttctgcctaagacaggcctgacccttttgtttctcccctggaaaaggaccgaagtgttccttccagccttattaagtacagctgtcgggtacattttagtagatgagaaccatttccaaagtatctcggttctgagaactgagaggcagtgtccagaaggtagttggacaagctcgtgtgctgtagaatgtctgtaagtggctgggacttacagaggagaggcccgcacgttgctagtcctccttgtcttggacatcttgagcctcccacttgaatatcctcttaggctctcattttgtaccagaaattctggaaactggaaggctattttgttggaaccccttattttacagattagaagaccgatgccagggttagttaagtgttttgttttatgctacaaagttggttagtggaattcttctgcctatataataacatcacagtatttcagagttgttttctgtcctctctttgtcaggtttctgggaaatctctttctcctcatgtttattatttggcccttaatccagcataataaaattacaggtacatatagtttgtcacaggatttccagttaggtctcagagacctaaaggaaagaaagttattgaaagttctggaaaaacaaaagtcctgagatagtttcttgacatacatcttctttgaaatctttaaaatcaaacaaaacaacccctagtgtcttccctgtcgcccccttcactaccttcttttgtattctgcatatgtagccattctcttgggcaatagcagaaaggtacatgtggattaatggaatttatgtattcactggcggtaaaaggcactgggaattcctgcactgggtgtaaaaacttgggccttggggacctcactaatgacttttcaagagcagttctttacagagcccaagtcttcaatcttgtaactggaccatcaaccccagtgacagcctactttgaaggaggcctcataaagacaaggttcaggctctttctaacggttttggctaatggaagacctggaggggaaaaatgaaattgttctcaaacttcttacaggtagaaaggagaaaatctctggaagttctgagaagtgacaggaatgtaaaattttgtgtttaaaatgtaagaagtagcaggggatgatgaagaatgcttaaaaatgcttgtttttattatagrcagtggaaaaaatgtgagtctcaatttgcttgccctggaattgctccagctagcagaataaatcaaggctagaaccagatcagaatttcttacgagatgacagggatctgaaggactttacctctatagtcgttttgcctttttargcactgggtgacctggtcccatgtccatcctagtgggccctgtatgatccaatccaaaggcccctttaggtttgcgttttatcattccctctttctcagaatttgatgtttgtatgtaaaagcactctggaaaatatttaaatcatggtacaaatataagagaagtcatgcaggtatggaattgctttgagaagtatcattttattaatttgtctggcttgataccaattacctgatgcagttgttaagggcagatccatccakaaacctttgggttctctgctccctgattttgttttgcaaattatataaccatacttcatagaaaacaccagtggtggctatgttgttcacagacacaaagtgattctaaggcaaccacaggagagagacacaaaagaaatcacacaaaaatctctcatcacaacataaatattgtgacaattgtgtggtactttttgtcttttttgttctctctgttccttttttgtcagtacaagtaagtcatcatgaacaaataagcttttgtatcctgcttttttaacctgacatgttcacagaacataacctagtcacacacgggcaagtacatcttctatccagtgatttgtttcaccatcaccctgcacatcacttttctcatgtttcaaatgatttcctcagaagagacatctggaaatgggattactgagtcaaagattctcaacctcttttaaggcccttgatatgtagtggcaaattgccttcctgaagggctgtgccagttgacatggctggcaggggcaaggcttgagtcttcctctggacctgtacatgggtacagttaacattaaatttttttaatgagtataatttacatacaataaactggacaagccttcagtgcataggcttggggaatttttacatacctacatttgggtaaatgccacccagatcccagatctctctctctgtagacagatagatacatacatacataaatacatagatacatagattgatctatctgagcagcatttatatttatatatgatatatcacatatgatttatatatttaatattatatatgatttatatgttagtatgaatcatatacacataggcttaatttatgcataaacatatgtgcttcacatatctttacatagataaatataaatataagtatgtatatatatatatatatatatatgttccttacctacaggatccaacacaagattaacttagatactttccagcttagatattaacttagatctttccagatcagaataagaggaagttggaaagtatctaggtttccagcaacaagtagttaattatattaacatgaatctactcgatagactattatgtcatcattttttaaaaatgaaaacattgtaattaatgttagaaaattcttatgttataatgctaggttaaaaaaggataggtgtgatttttatatataaaatatatgtacagcatatatatagctacatatttaaatatataaatacagcatatatatatttatatacttaaattataaatatatgtacagcatatatatacttaaatatataaatatgtatatgctgtgtatatatttatatatataaatcacacctatgtttgtgtgtgtatgtgtgtgtgtgtgtrtgtgtgtgtrtgtgtgtrtrtrtgtatatatatatatatataaaatatgatatttccattatccccaggaagttttctagtgcctagttggtatgtagtgcccagtcggtgtctccacccacccccaaggtaaccactattctgaaagtccctcatttttgagtgatttcggaaatgttcttctctcatctgaaatgatttgacaggcagtctctgaagggagattgccatggctttggtgttgctcggatttctgccaccttacattggcaggctcaagaagatatgcacagtctttatttcattgatgtccagttgcctgtattgagcttagctatcctgtgcccaggttgccttagggatcactttgtgactatgtgcagcttatccactaccttttttttcccttcaagaattaacaaaaccactaccatctgttctgaaccatgtgcggtagcaggtagggggtgacaatgaaggtgtgttacagaaataaagtaggagccatgctgactttaaagaaacacccccacccccaaatgctcctggctgttttctttctatagatgagttaaaacagagggtatgaagtgcttggtttgcaaatcctgcaatactttgccatggcaagtccctaggaagtagattaaaagtggatctcccagagtgattaggattgggcagataaaatgatatgtttgttttggtcaattgagttcgaaatacaggttcagacagtaaatactcccttgctgagactaaacagtcattttgttgttcattttgatgaaaatcatggctcccaattttccgtgaaagctatcctttctgagatagactggctcttcatgagttatgaagcacctgaaatcctctctaacagcaaaatcgaggggcaacatcaaggttaggaacatcacgagcaagaacttacggctcagcagtggttgtaggtgtaaattcagtgtcccaagtcagaaaccaagaggtgtaagcccaacatgaarggcaaagaggggaggaaattaacaaagatggaggctaggaacaacgttaggggctttcatatgtaataatccatttaatatttgcaataagtttatgaggttgatctatataaatctccctttaaagggagggaattgaaacatgtccagagtctcacagttacatttcttctttgcctctttccttccctcttttctttcttttttccccttttcccactgttgacacattccaggacacacatcctcctcctgttttccttttccttcacatctttctcgtcctttgctgtaacatcctgtgccataacaaactgtcacttatccagtgtggcatgccctgtgaagccttccctgacaccgtgaaccatagtaagtttacaggacccttcagtgttggagttctatcttttgcagctcccacagcacctatagaagttgtgttcacagagcactcaacaatttctaggcttgaataatgctgtgacaaagatggggttctgttgggaagacactgtagccactgtcagcataaagatacaaatggtccttgtaaatggatggagggcctttgagtgatttcttatcaatggaagtgccttaggaaatgcccagttgctgccttaaaatcaatataattatccaacattggtcactgagtttgttcctttgccaccctccccacttgcatgtggaaacctttttggccatattttattttagtatttcgccaaggagttttcagtcatcttaattaataacaaaaacacatcaagctggaaggagatggcctgaccatagtacattcctttaccaggactctgtagacaggtccccagctggcatacggatcaggagctcccattccctccaaggacccgtgaacagttcacacctacagtgttagattagaacagatgtgaaattcaaatgccactaggttgttataggtgttctctgaaaagaacagtggtaaaataattagtgcatctaattatcagtgtgttcacatgctttatatttttaaagggccacagcagtggccctttatatatatatataatgtgagctatatatatataatgtgagccatatatatatataaaatgtgagccatatatataattttaaagttttttagtagtcaatttaaaaatgttgaaacgtgaaattaattttaataatatatatttaatttaactgagtaggccccaaatattatcaccttgacatgtaaataatataaaaatattaatgagatattttacttgtttttgttctaagtcttagaaatctggtgtgtaatttatacttacagcctacctccttttaagctggctatatttcaagtgctcaagagctatatgtggctactggcgatcatattggccagcacaggcccaaagaaacttctagtggagtctttcttataaagatggagctacgtttgttcataggcaaaaccaaaaccaaaacaaaaaatgactctgtatgtttattggtcccatgctctgtgctaggcactagagtggggagacaaaagggtgcagtgcagcctctaccgtaaagcagtcacacgtgaaaagtgaaatcattttggttgtaatttataatgtgtccaagcacaaggcagtttttgtgattaattctcaagcaagtgattctggcagcttaggactgtgagtttaaaggagaaagtaatccctactatttgagatggtcatggaggacaggggacattggacaaagtataatatttgtctgagatggggaaagaggagaacaagcagttcatgtgggggagacagcttgaacacatctacagaagcattgtgacacagagagtagattagcttggctataactgagaattcacataaaggaaattgtggaaagaaagatgggattccttttggctgtattaaagagagttggactatatagagagatggctaagagacctcagttaacaacaggaatgaaaataataatcgcagctagcatgttcctgattagggtccagtccctgtatcaaattctttgcatttttttgtcactgaatattacaaatgagaaagtggaatctctagagaggtagaagtacttgtccaaggtcacacatccagaaagttggcctagcaaaattttgaatacagaaccttctgagttcagagcatttactttaaccatcaggagatatgctcctgagaacgttggaagcagtgatctctgtgtttgattaatgggacgccccccagccctattgacaaaggtgctgcccaagtgctgacgtaccacctcaacataggacagagaatttccaggccaaggattctctgcagtttgtgtcctctgaacagatacaaatgggccttttagcatgatgcccctgaaagttgactgaagtcactgactcaggtctttacaacccagtgttccactagttggtttcctcctttctctctcctcgtataccccagtatcatactagaatactgggatctcagagaccttttagttcaaggccctgttcttatagaacagaaaacagaggcttagagaggaaaggactttgcccagagtcacacagttttagaagtgtcagagcttgggcccacatcaggactctctccacccaatgagctatgctagtgtttgccaaaggccttctccatagaaagcaacaaattcagattaggaagtgtatttcaatcactaagtagttgttttagctttctagggttaacagttgacaaactttatcatagatgaaggtatccctgaattaagagatggatttcagtaatgattgctataaaatgagtttttggtaagtggcctctatagccttgtggatttcaataaaatcagatgtccttcaaatggaaaaaatgttgaccctgctgaatataataaaatggcactttttaatgcagtaaatcttttaaactcgcatttaagagaaaagcaatgacttttaaagttaaagtttaatggtatcccttacttggaatacgattccagttggagaataaatcatagaataaaaatacttagagtaacaacaacaacaaaatgcttagagtaaccatagaatagaggccaggccttctggcaggtattcaggctgccttccttatctgacaaactattcacaacatagagcagtcagtccctctaagtctggcctcaaaggtcccaacactttgaattcctttaccctttttcttctgactttggccatcatttcactttatggcctttgttcaaagatacactgtctgcttttctacttttgcttggaagcaaaatcattttagaaagctaaggcctgaaatagctagttgctacttaatgtttgctgcttatcattgcatttgctgggacctggtgcttgtcatgcttatgcagtacaaggagggaccaaagaggcagaagacagtccctgccatagtgaagtgtagtcattttagaggacaggactaaaaaacacgaagcaatgaacaaaccccccaaaatacaatagtgtgctgaatgatgcagtgcagatacttcttagaggtatttaggtgtagctgggctagattgtttctgtattgcatcaatagattggtccatgttgactattccacttcacaatatctcagggatggacaagatggcagagttcaggccccaaatttaccaaaatagaaattttctccatcaactaatgagtggataaagaaaatgtggtatatataacccacggaatactactcagccattaaaaatgaaataatgaaataatgtcttttgcagcaacttggatggagctgaaggccwttattattattattattattattattattattattttttatgaagtctcactcttgcccaggctggagtacagtggtgtgattgatatcagctgactgcaacctccacctcctgggttcaagtgatttttgtgcctcagcctcctaagtagctgggtctacaggtgggtttttttttttttttttttgtatttttagtggagacagggtttcaccatgttggccaggctggyctcraactcccaacctcaagtgatccaccagctttggcctcccaaagtgctggctttacaggtatgagccatcgtgcctggcctagaggcattattctaagtgaagtaacataggagtgaaaaaccaaaattcatttgttctgacttataagtggaagctaagctgtgagtctacaaaggcatgcagagtgatacagtggactttagagactcagaaggaggagggtgggagtgggccagggattaaaaaaaactacacattaggtacaacatatactactcaggtgacaggtgcactgaaatctcagaattcaccactatataattcatacatataacccaaaaccacttgtaccccaaaagctattgaaataaaaaaattaaaaaaatatgtaagttccatttcagcatgagaaatacttcttagaggagtgttcataacataggttagtccccatgagatttgtgcataaagaggactccataggcaagccattccatatcttcctcttggagacttaaaagacatgttcgttcgtatattaaaggctatacagctttcaaacttttttatcaaagtcttgcagtttgtaactttgactttaacccagtattaaccaaactagtcttcctacagagcctttatttcgtagtccatgttccatgggccttgtggcagaacacacaatgggaaatgctgctttacagtggactcttggctccccagtaatggctaaatgcctgatttggttatagttctgtcagcccctgttccttccagacgagaatcttgtgcaggaagtaagaaagagaaactagcccaagctattttgacaacaggcctctgactgaaacaacctccctgaatggttgataaacattttccctctcttaagggaaaatcatgcacagaaacaagcacatataaataatttaccaagctgtaatatgctgtaaataacaaccctgctaaataatgaattaacccaactgctgattcataggtaaatgtctcttgtaaagcagcatttttatggattttatagcttagttaatatccactcatatttcattaggacacttcaggtgaagtattggggtaataatctggatatatttgaaactgacatagcacatatcaggagtccaggcagagtttggggagctgccaggatccttttgtcttagctagagcatgaggagagattgtactgggccttactcttctccttcctccatggtcttggtttgcccagctcctcagtgcaagcctgagttgctgagcaggatgcggctctgatatcagagagggtgtcctctctgagaccacgggcagggatggaaggagaggtagctctgggccaggggaagaaagggacacagaaatcactttggcctactcgacagagccagctcttctgagtttttatgacacaggtgtgcagactctggagctgaactctggatatttgcatctttaccacttattaactttctgacttgggcaagtcacttatacactctgtggctcagtaccctcacctgttaacagggacaataaaagtacctactcctagggttattatgaagattaaatgagtttgtattgtcaagtgctggaacattgcttggcacataagcaagtgctttcatttatttattttttgagatggggtctggctctgtcacccaggctggagtgcagtggggagatctcagctcatagcaacctccacttcccagactcaagtgatcctcccacctcagcctcccgagtagctgggattacaggcgcatgccaccactctcagctaattttagtatttttagtagagatagggtttcrccatgttgcccaggctgrtctcaaactcctgggctcaagcaatcctcctacctcagcctcccaaagtgttggaattataggcgtgaaccaccatgccgtgccagcaaatgctttttgagtacagtattagctgttatatttgttagaactggactcttttagattcttcattttggcattctccagctctggtgttggattctgagaacctagaccctggggattggagggcctgggtggggagggggtcaccgggatcactcagatgcctcttcttgcctctaaagaatgggaacgggggccaagtgcggtggctcacgcttgtaatcccagcactttgggaggccgaggykggyggatcacaaggtcaggagatcaagaccatcctggctaacahrgtgaaaccccgtctctacyaaaaatacaaaarattagctgggcrtggtrgygggtgcctgtagtcccagctacttgtgaggctgaggaaggagaatggcgtgaacccgggaggtggaacttgcagtgagccgagatcccgccactgcactccagcctgggcgacagagagagactctgtcttgaaaaaaaaaaaaaaaaaaagaatgggaatgggaagcaggaactatgatttcattacagtgaggaaaaactgcttttgatgatctctcagtaactataagtaagaaatattctcttatttaaaaggaatgttatctatctttgttaatgagggttttatggtggggggaggtgatgagaattatcagtcaaatcactttgagaaggaggagatctgaatttcataaataaaccctaatttgttaatgggaactgatgccaaaaacaaggagtttttcctccttgcrgtgacactgaatgtcctgggctgtggagggtagaaacaggacattctcagtgttccagctcacaggggtggagttagagtaaatatcctgcccagtttgccatcacactaacactgcataccctatcatcagcctaatgacctttcaattctgattgaatggaagagcacctccggcccttgatccaactcgtggttgattacagtgctcatgccccattaccccaaatattcctataaattaccagagcgagcattcacgcttatacaccatcatagatttagctcatgccggtggttctcgatagcagccatctgaagctccttttgcccacagctccctggatagctccaccattccctgcatgctagtcttgtggtttggtcttcagcctgctgtctgtactttctcacacgttgcatgggctttctccgatgcctacaagcaaaatctcttttccattcttcctttctctggctcctgggttcagaaatctctagggatcattatcagtcctctggctgccccctctcctacctacctccatctaccctagctctaggacagacctatggcgatgcccaactttctgcattttgaaataggggtgattgctttgacttgggccctatctattagggtctttcatctgtctattttggacaaagacaatagcagtgaagcagggggcctttgcattgagaggctcagactctcaaactctctcttaaaaaaaaaactgtctggcattaaggggcatagtctgcttgccttcaatagacctcaggctggggaggctcgaggtgcctactagggcagccagtttgcatagtgccttctaaaagcaggaagagccacccttgctgccttacagcctttgtccttgggccttagaatgaaacgcttcagagctcacaattaacatttggccaagcctcttcctcacccccacccccgtgaagtgggaagaaatacggtggcgtgacattcactttgacaaagctctttttcttttctctacttctcaaaaaagcctaaagaaataaaaacagttgctaagctactgggtgggctctatcggtgtgttttgttgcagtcttggcgttaaggactcatgctatcatatatgcagcagcttagactaaagggaggaagcaaagtgcttgagagggctctcttgcaagttcacttttttgtcaggtcaagtgcttggctctgggatggcaggggacatggagcatgacaactgcarttctctctccagatgggaaagtagaagggaggatttcttccaatcctcaaattcttccaaaagagaatgctgttttggaaccttgtctttctttaccatttatttcagaaaggttggatctctaggaagcatgggtcatactcttagttctctgggtattgtcttttgtacacatcacatgcagttggtgctactgatggggcctggacactagctagttctggtgagctcctagctcagtgtgccagaccgttgtactgtattgtatttaatttttttgtctccagcattttcttttcaaagctggtgaatcccaggttttgcaagttttcatttaacaacattcacataatccctaaattcagcatggtttataacttgttaggtccgtttgctatatacaaatgccatacctccaattggtactgaggaatggttccccactcctgatttaaaggcattaacactgagaatggtggaaagagagcctatttcccaacactgctttgcaacatcctctaaatctttcataatggcctaatccacccattgcgcgttggttctcagtgtggggacaatgggggcattactgattttaaacttgttttcatcaactagctcattctgtgtagagttgagtttagaaaaaaaaaacataaaaattaatgcagcctgggacaccctctgtggaggatacattgaaaatacatcttaaataaaaacccaggaaattgtcccttctgtctttcacctgtcagaatcagcaatagaattctatagaccattcagtggcatacttaattaagcaacctatctgctgaatgtgctgggggttggctgacagtgcttttcactgctgatttggatgacaaaggatatggtgagatactcaacagtctggtggaatggaaagaaactcccaattggtcacacctacctatttctcttggcatgttgcattagctctgataatacagaaaatagactggcttttatgcattgagaaagtcagtggacaccaacctcttgccttttgctcttccacagcaagccctgagttttgcacacatttccattacagatgaatacagattttagttgtaggtgagaaacatgagcttgtaattttcaagagacaaaacctccagctgctttttttaatcctagtgcagaatagttccttcctgatcatcattctatattttgatggcagttattgcctatccctaatgtatattattagtattagggacagttttgcagtgtttatctggtgccagacacatgccaaagcatcatccctcttgccaactctgtagggtaatactctattttgcagatatgaaaattgaggctcaaaaaacttaagtgacttgcctgaagtcactcaaccaaacagtaagtggtgggtcaagcttagaacatagagctcttctaccctgcagtccgtgcttttaaccgctctcttgcatcgtctctcttgaaagccgaaagagtgtcacacagtacaactattaataactaggggttggggcacacgtgtattaggattacaaaccttttgggagtctctcccacaaaattgggctcttcacctaggttttgtagagcctttcagtatccataaagcccttcaaactagatgcaaaaatatgtgtgtatattcaagggagataggccagagttttcatcaacttcttgaagaagtccatcacacacaagagggttagtaacttccacataatcctaaagtgcatgtagcacttgccaggcatgaatatgattcatgaatatgtgcatgaacttaagcaaactcatttcattctcaccatagctatcagaggtaggtatgattatcatgcccattttacagaaggggaaactgagactaagagaggttataaagctaataagtgacagcactgggatttgaggccaagcagtctagctcctgcttttaatcacttttgactgcaatttcctttttatttacttgcatatctccagcacagtgcccgacacataatgggatgtttattgatatttgttcaattgaattgatttgcacactgccggctctgtgtagatttcatcttaggaatcattctcaaaggtgtgactccgtaagtcttggctggacgaatgaaaagaatcaacatggtcaaaagataatttattagagtttctaaagacaaatggcttggcaaagcataggcattttactttcaatcagtgttccctggagggctgttacactgatttccaagcccattcttctcccaactggctcactagattgttccaattggttatgtggtgcccctgagtatgggctaggtaactctgcaggccccatgaatctatgtgatgtttcatttcctgattactatgcataatctcccctgccttttatttccaagtgaccaaccagaagccacccaaaccctctgcatattgacatgattcaaatgtaggtctctacaaggtatgccaagcttattgaggggaaggtggggggagatgcgaatcctgttcaaccacctcaatgcaagttgactgtagttgagtctctaggatggggcattcttaaaaatcagaacaaaaattggctgtgattgtgaagagtgtatggtgaattggcaagatggtgagtaacaaggtggagcagcctgagtttttaatcaccttgattacatgttccaaggtttaactttgtggcctccactgtttccctaattttacctgctgcgatcttattttacttttcattttattctctaatcaccgccaattagagccctgagtccatgctggttctgttgtctgcctctcagcctaatgggcctctttgtactgaggcacagaacccagctggcagcgagacttcctagggcccggaagcttcattactctttgttggcagtgaactctaaagttgctgtctttggagttgggttttctcaagtacagtcacttaacatttggtctcaaagttgttgtttttcagatttttttctcttttttcctaagtcaatcagatgcatgagctaattataagccagcaaatattttgagaaaacttccctccagtggagacccttgcacaaacttcagactatattcccagtaattaatatgctccttttatttcctttgaggtggaaaacagtcattgacaatcattccctacccatttggttcaaataactaattttgtacctgaagactaattacagtagtgacaccatcttttcctattaggtctctcacttgaagaactcagagcaatttataacctttgaatcttggggactagtttaatctgttcgtgggcagcatagcagtgaacattgttatcagaaatatagttaaacctctttaattgagcccctattaattcaaaaggtaataattcaaacagtgtgaagaacaaacttgaaacgtctatgacaagaagaaagtaagttggcaaaggggttatttaaactgccaagtagagcacacttttagaagtgccagttcacatgcaaagaactggtaagtacacacaaattgttccattaatagactcagaatcttaagattaaaagccctgtagtacaactgttcataactcaaaaaacatttgttgagtaatgctatgtgctggggcctggggatataatttttttgttaatagcttcattgagatataataaatacaccatataattcactcatttaaaatgtacagttcagtgatttttggtatagtcaaagagttgtgaaaccatcactacagtctattttagaacatttcatcactctagaaagaaaccctgcatcctttagccatcactttcccatccccctattactcacagccctaggcaaccactgtggggatacaaatttgactaaaacacagtacctgcctttgagaggatggcaagctattgaaagagacatcaggcaggtgaagcgtacttatcatagcatcgtagaatgttgatattgagaggcactaagaagatcatcagatataatcttctcatttcacatatgaggaaactgaggcccaaagacaagaaatgacttgcccaagaacaaaaagctaacagagccaaaattaaaactcatgtattgtgccatcttagcctgttgcaatgttaattacaatacaaacttctggagcatagtaacagttgagagcatggattctagagccagactgcgtggatttgattctcagcttaccttttataggctgtgtgacctcaggcaagttacttaacctctctcagcttcagtttcctcatttgttgtcttgaaataataattgtaactaccttataggactcttgtgaagattaaatgagtttctatatgaagtacttaaaatagtgtttggcacagaataatcgatacataaaatgattgttattattatttcattacctagttattaaatataaaaacatttcgtaatgtcctaaagtatattttaaatatttgttcttcaggttttaaatcctgactgtattcatacataatttctatttcgtttcttccaacatatatttttgagtgttaggggctaggtataaaaatgatgtttaaaacagagttcaaatgcctaagaagttcagtcaggtaaggaaggcaggtgaacagatatgtagctataaatcaaggcaagcaacaggaagtgccccaaataaagtatgtatgaagcataaagggtataagaaaggcttcaaggaggctgtggcatttgacttgggttttaaaatgtgagccagatttcaccagactgaagagggcgagagaagaagacattccaggctgaggtaacagtagaagtggagaaaagaaagtatttgccatggtttgggaaaggctaagtgttgtatgtgttcatcgcatagggttttgcaagatgtcctgggagacgagcctgaatatagatggggccgtgctcagtaggaaaagggaggagaatttatacttactgaacaccttttatataccaggttctgaggttgggcgcagtggctcactcctgtaatcccagctacttgggaggctgaggcacaagaatcgcttgatcctgggaggcagagaagtgagccgagatcgtgccactgcactccaacctgggtgacagagtgagacaatgtctaagaaaaagaaaaacaaaaacaaaaaaactatataacaggctctgtaaaataccaagtactagatatgtatgggtaactattttgattctcacaatcatcctgaggaagcagtgtagacaggtgatataaattgatcaatatcacacccaatatgtggcagactccagattcaaactgaagtctctctctgatgctaatgcttattccctctccatataccacaccaactcctgaacttctgtaccagcttggacgttatggaaaatgggagctttaaatgttcttgaaggccaggcacggtggctcaygcctrtaatcccagcactttgggaggccgaggygggtggatcacaaggtcaggagttcgagaccatcctgggcaagatggtraaatcccgtctctactaaaaatacaaaaaaattatcygggcgtggtggtgggtgcctgtaatcccagctacacaggaggctgaggcagagaattgcttgaacctgggaggcaaaggttgcagtgasctgagattgtgccactgcactccagcctsrgcgacagagyragactcsrtctcaaataaataaataaataaattaaattaaataaatgttcttgaacatggggaaacatattttcattgcagtttatttatccaactgagtatttattcacttatttatttgctttctctagtggcagtgtaggggacaacttaaatggaggggagatcagaggcaaaaaagtcaattgtgaggcttttacggtaggtaaaaggcagcgaggacatgaactaggggcgtggtaatggagaggaggggacacatataagagagggattgacaagacaggacatgtgaccaatttgatgtggtcagagcaagagtcaaagagagtcamcaatgaaggcatgattttttcagcctgtatgttgtgatgggttgaactgatggactgagataagaagcctgggcatcggtttagaaaaggaaggaaagtcaattcaattttattataatctaactttctctgagtcctccacgtgttcagtaagcagatggacatatgggtctgaagcttgagggaaaacaaggatggaaccctggggaatatctatatgtgtgatctgggcggaataaatgtaacaaacaacctgaaccatgaggaaacagttggagaggtagcaagaggaccaagagtaagtgagagagagcatctaaatcatgggagaagggaatttcaataaggaaacggaggtcaacattgctaagcgctaaagaatggccaagttagatagactgaaaaatgtcccttggatttagtaattaagtaatttagtaattaaagaggttattgagtaataagaagcaaaccaagtagaatattatgggtggaaattatgtggcagtggtttggaaactgaatgaggaatggagacctggagacataaatgtagacaactctttctagaaacttgtctggtaaggtatagagagatgacagaatcttgaagacaaacagatcctgaataacttttttttaattatggagaaagttgagcatttattttggctgagaggagtgagtcagtgaagaaagagctagtaaaaggggagaaatcgggggataayggataaagattggagaggtagcaagaggaccaaaaggaaataggaaaccacagagagatggttagctatggacttgagcccttcctctgagatggggttttgaagcgaggatgcacaggggcacagataaactaaaggctttttccaacagagtctgaggtatttgtgattgattattttctttaatttagaattctctgcgtaagaaaccttgctctttttacactatgtaaaatccttatggaaacaagaacaacaaaaccaaacacaaaaacctactttatttaaatgtgggagaagggcttgaataatttctcccccccccaaaaaaaaaaagatatacaaatggccaataagcaaatgaaaagatgctcaacagcattaatcattagggaaatgcaaatcaaaatcacactgaaataccacttcacacccattaggatggccattattattattattattattattattattattatyattattattaktattdttatttgagacsgrgtcttgctctgttgcccaggctggartgcagtggtgcvrtctcggctcactgcaacctycacctcctgggttcaagcrattctcctgcctcagccwcyygagtagctgggattacaggtgtgcrccaccatgcctggayaatttttgtattcttagtagagacagggtttcaccatgttggccaggctgatttcgaactcctgacctcgtgatctgcccaccttggcctctcaaagtgctgggattacaggtgtgaaccaccgcgcccggccaggatgtccattattaaaagaaaattaaaagtaagtattgttgaggatgcggagaaattgcaacctttgtgcactgctggtgggaatataaaatggtgcagctactgtggaaaacagcatggtgctttctcaaaaaaattaaaagtagaattaccatataatccagccattccacttatgaatacagaaccaaaagaactgaaagcaaggatttaaatagatatttgtgactatagtcaataataatttaattgtacrttttaaaataactaaaagagtataattagattatttgtaacacaaaggataataaatacatgaggggacagatatcccattttacgtgatgtgattaatacacattgcatgcctgtatcaagactgtacaaacaaaatgtgatatatatatatatatatatatatatatatatatatatatatatatatattattcagcctttaaaacaaagttctgacacagctacaccttgaagacattatggtaagtgacggatgggtgaactttgaagacattatgctaagtgaaataagccagttacaaaatcactgtatgattccccttgtatgaagtacctagagtagtcatattcatagagccagagagtagaggttgccagaggttgcgaaagggaggaatggagtatggactttcaatttggaaagatgaaaaaagttctggagatggtggtgatggttgcacaacaatgtgaatgtacttaatgccactgaactatatacttaataatacttaaaataagttttaccaccattaaaaaaaaactttctagagccaccattttagcttgactggggtctcctgggttgttcgtaacctagagtagtggctctttccactgctgacagatagcaaatccagagcagacacctcgtgtaagagctacctcttagcagaactatgattcaggtttgtgtgcattacatttaagccagctgacatatcactttctttctcactgctgtgtacacaatagtgacatgatcaaacttgaaagtgcatgagaaacaatcacttggagaacttgttaaaaatgcggattcacaaaatcatctcttccatcaaactaatgtagtaggtatatcagctagtttgtgctatataacaagccacccccaaaactaagtgatttaacataactgtttattattttatagcctatgagttggctggatggttctgctcatctgggccaggcttcgctgatcatagatgtactcagctgcagtcagccagtgggttaaccagggcttggcttttccaggatggcctcagttgggatgactttaatctgctctacgtggcctctcatcctcaaaacatcagcccaggcttgtttttgtgctgtggcaggagtctaagcaagcaagcacaataatatgagggaacaagaagaaatgcacatgagctcttcaagtttctgcttgcatcctatttgctaacgtcctattggccaaagcaagttacatggctgagtggagattcagagtgggaggggtgtacaaagagggcaatagcaaggatgtagagaggtcactgggtccactaatgcagttaatctactacagtaggtttcagtaaagcctcggaatctacatatttagcaagcttctcaaagtgatttttttctttctctctttctctctttctgtctctctctttctctctccttccttccttccttccttctttctttctcatgatctcactgtcacccaggctggagtgcaatggtgccatcacagctcactgcagcctcaaactcacaggctcaagcaatcctcccgcctcagcctcccaaatagctggaactacaggcatgcaccaccaggcctagctgtttaaaaaaaaaattacagagatgaggtgtcattatgttgccaaggctgatctcaaactcctgggctcaagcaatcctcccacctcggcctgtcaaagcactgggattacaggtgtgagccaccatgcccagcctaaagtgatactgatgcaggctatcccttaatattttcagaaatattattctagtatctcttaacaccaagattggaaccagcatcattgaacgttcagaaaacgaagactcagtggggaagggagcacttattcttctccttatttccagcttatgattcaggcctcttggtctcttagaggcagatgctgaaacgaacactctctgtctgcttttcagacaatctcatataatcatttacttgttacaaagaacaatggagttggattaaactgataaagtgttatttttcaatgcaggtcaggaaggcattgttggtttgttttgcattgctcattataatttctatttttgtcctggggaagctcatggtaatggaatgaagcatcgaggtggtttatgggccatgtgataggatcataaagttgaggttgttgcttggacaatacctttcttagaatagtaatccaagcaaagagaacatggacaggaaagaaaagaaacaataagaagaaacttcagttatttagccagttgtatgaggttttcattgctcagatccttagttaaaatgtgggatcagaggcctgcaggtaatgcctgagctcaggaaaggcagggaccatgatgcttttgcattcctgatacgaaccacagtgccaaccacattgtcagtactcaaaacgtatttgttgaatgaatttctgctaattcctgggatctattctcagagattctgattgagcaggataagtaaatagtttttcacagtgtggtccctgaaccatctgcatcagaatcacctacagggcttgtttaaaaaatgaatgccagggccgggcatggtagctcatgcctataatcccagcactttcggaggctgaggctggaggatcacctgaggtcaggagtctgagatcagcctggccaacatggggaaacccagtctctactaaaaatacaaaaattagccaggcgtggtagcacaggcctgtagtcccagctactctgtaggctgatgcaggagaatggcttgaacccaggaggtggaggttgcagygagccaagatcacrccagtgcactccagcctgggtgacaaagtgagtgagactccatctcaaaaaacaaacaaacaaacaaaaatgaatgccaggatcccaccttctacttcttgcgtttgatgcatgagaaatcctagtttacacattttattaaatctgggactggttgtaactggcactaatgtagtcttgtgtgaaggtagtggtgcgatggtcattctctacccttgccccacctgagagcctctagagggaaggctgtggtccagtgcactgacctgaaccctcaccacatgcgtcccacacatatggaattgggagcagtcatttagcatctcttagccatttcgctctaatttctttgtttgccatttttgttgactttttccttgggaacctgaatttaaactcatgccacttttttgtcttccttattctagtgggtaggaatttgatcttgaccccaaaagcaatgataggttcctacagttctgtaaagtatccattgcttctgaaaggccttctttccccattgtctttgacaatttagattttccaagtgctaggattttggagaaagtggagccatgagcccaggcaagtggggtagcctgataatgccctcccatgacacatggggctggggatgtaaaaacttcagagtttccatgtcaaataatctcctttgccctgtggccttcggttacaggaatcatttatattacaggcacattttgaaatatcaaaacaaattggacactttttccctattaggaagaaaggcatgttaatttaagtgtggagtgtgacatttggaaatgtaaaaagaggctttyggggagtagttgggggtttgagtggaatatctccctttttgtatatctctcttgtttttattcatcctgtgtcttattcagatagtgattttcattcacctgcctgatcttctggaacagggattttagagaaagccattttctcagcagctccacaagggcgagatttccaaatgggcaaggaaaggctgcagagacacatctagcttggaagtaaatgcaccaagccagccaaattggaattgtcttatagggatccttgtgtgctgtcacagaagagttttcaggaggctttcctttgggcactaatggccaaccactgctgctgagtttctcccagccttctggagggaatgccagccagcgcactctcagctgtgacatgaccctcctaggagctgttcaatgctagcgccgttttgctctgatgcccagcaccctctgcttttagtcactttccttagcgtcctttcgcagtgcttgcatttcagccaaaatcgtgcctcgtgacttttcttttcctagagttttcgcttctcacagtgaagaatctatcagctgtttcctgaatccttctatgtcttttaaggtgttaacattttcaattttgccacattcagcatttttggcctactctgacctgagctcgataaagagcatcagaaattgagtaaagacagaaataagtccctataagcatgagccctggcactgtccacttcctcctcctcccctaccctgacagcactaatctcccttcagctctactcattggaccccctttattctttaggctctctttagtgatttatcttagtttagctatgagaagaatcaagctttttaagggcttcgctgaaaacgtaatgaaagttgtttcaactctttaaattttaagtgaattgtggccatctcaggcccactagttcatgtacctgatacaatttttatttggagccactgtattcacatcttcctgggacaggatttcacataattggggtaggttaatgagtgtggatttggcactccctttctatagagagtggtaaggagctcaggccttggagtcagtcaggtgtggttccaatcctggatctactattaggttggtccgaaagtaattgccatttcggccattaaaagtaaccgcaaatacttttgcaccaacctaatacttagtagctgtgcagtcttgggtaactcgtttcacctttcttgtgtctcaatgtcctcatttgtaaaatgggcacaatagtcccaatcacataggttgaagactaaaccaaagaccccatttcattagcttagccttatccctggcagataccatgaactcatatgtcattataattatgataatttacttaccctttcaattaggggtataagatgctacacagttttcctctaggacagggcccgcaaaccatggcctgcagcttgcctgtgagctaacaatgattttcatatttttaaaaggttgaaaaaaatcaaaagaagagtgccgtttcgtggcatagggaaattatatgaaattcaaatttcagtgtccataaataaagttttattggaacacaactgtgctcactcatttatatattgtctatggctgcttttgctctatcatagcagagttgagtggttgtgatagagattctatggcctagaaagcctaaatatttgccaccttgccgaccacttgccctaagacatttagccatgtctctggaacatcactgtgatagatagttcaggaattatttgcatattatcatcactgttattccaaaactctgactgcgtgtgtttctgtgtggagagtgatttacaaaggaagaaattatacaagtcataacaaaaagaaaaaaaaaaaattacacaggtccatgtaagacaaatgagatgaggcttttgtggcagttttagctaaggactcactttgtgccttcgagggatcagaaagaatttagaagtagtagcaatattggttaggagaatttacagattctcttgttttcttttcctctatcagtaccttctctgcaaggaggagagaatggatgttagtttctccttgtaagatgaattgaattgcttgtgttagtgtactaggactctgggttggttgtgaatgtggtataccaaggcaaagtctcatctgagcaaataccaccataacaccctgttctcccccaaaaggcaatctctgtagagaattataaaatcttagaatatcaagattggaaggagcctggagatctgagggaatgatattgatattaatatctccttgccgatgtagatacaatatcctgtttgaaggcaaaacattgtgtaataaacccagtctactcaatctattcaactaaggtggcctctagtgggtgtctgagtactggaactagatttgaatacttgtgagatattaaatttcatatgctttacaaaacgtgcagccatccgggcacacaaacaaaatgcccacttttggatgtgaaagtgggggcaggagtttttcccatttaggagctaaaagctctggagctctggtcctcagattcatcttgtgtctggcctgtggtcgcagtgagatgccttttcagtagggatgaggtatacttggggctgggagaggggggacatttggaggtctggcctcccaggggtaggtatgtgtttagccgggctatgcagatgaaccaatctgggtgtctctgtcagggaagaggctaggaaagctgctggtgagaggggtcagagactggtttgccccaagggggatgggggaggcagggaggctgtagaggagctgttgggccagatcttgttgagaaaatctctcagacccgagacttctcccctcctctcatttcctatatttgggctttcacacttaagggactggtcttaaggagagatgtactttttaacatttgatttgcccatgttgtgccccgtacttctgcgtaccaccagaagaccacaatgacaaagaccagcgaaggccaaaggtggccatgtgtgtatagaattgacactccaaggtcaccggatctgcaatctaccaaacagtcttgactcacaccctcaggtttcatatttgaacctcctttgcagggctggtcctggctcctttcaccttctagactgcctttcctttcttactgtcctctgagaggcacactgaacatctgtggacagtggcagttggtagctatatatatacatgtatatatatcagaatttcctctttgtacactgtagcagtggacttccattttgatgatattatacagggtataaatctgcctatctcaacaagttgctttaaagaagaatcagtttcaatgtccaaactaccacttcagtaaagtaacagagccaatgccctgtgtctttttcctttatttatttatttattttgacataggttcttgttctgttgctcaggctggagtgtagtggtttgatctcggctcatagcagcctcaacctcccgggctcaagcaatcctcccayctcagcctcccaagtagctgggactataggcacatagctaactaatttttaaaaattttttattttgtagaaatgaggtttcaccatgttgcccaggctggtctcaaacttctgagctcaagcgatcctcytgcctcagccrcccaaagtgctgggattacaggtgtgaaccaccatgcccacccccctttttcttatgaatgggtgaagcaggagaagagcagtgagtatggctagagatgctgacaccatgtagtatagcaacttgtgggcttctgccttcttcctcaagatgaggccaagaagagcactgggacttccagcctctggtgcatgtgtttcctctgggctaggtggtatgtggtgtccaggtatctgcacacttgctcggggcagggttctaagcagtggatggtggcaatggatatggccaacaagagacaatcatggcagtgtcactgagctgtgaactcccacagaatcttttggcctcccaagctcagagaagaagcttaagggagaaaacctgtcaacagtccttttgccatatttattcactggagtcacacttttataacaggcataggctcaaaggtgtaaataaagccaattattttagttcagcattgattttcatatataaattatcaatatagttttgatttagtaataaaaataacagcctggagttttatcccctgccatggccagtgagagctgtttttaagctgtttctttgtacagggaagcatgtgtcaaagtcacacctcctgattaataaaaacaataaccttttagtccttcctatgttccaggcattgtgcagagggctcacaaatactatttcatgtaatgctactcataattctctgaggtagattagtatttgtatacgtatgttatagacggggaagctgaggctcaggaaatcacttacccaagacagcagctggcaattctaagaaaatttttgaaattctaaaatgcatctgaggacctggcrctgtggctcatgcctgtaatcccagcactttgagaggccgaggtgggtggatcacttgaggccaggagttygagactagcctggccaacatggygaaaccccatctctactaaaaatacaaaaattagccaggaatggtggtgggcacctgtaatcccagttactcaggaggctaaggcacgagaatcgcttgaaccagagaggtggaggctgcagtgagccgagattgtgccactgcactccagcctgggtgacaaagcaagactctgactcaaataataaaataaaataaagcacgtctgctgccttcacaccccattttctgtaccatgcatgtcaacttctatagggcccttctcttgtatgggtgtccattaggtcatatcttgcagatatggcagagctagagacctagaggtaaagcaagatactaggaaaacaagtaaaagggagctattttctgggagactaggaaaaagaagagactaggaaaagtaagtkaagaagctctaactagtagggggccaataaggggcaaacaaaggagagaagctggctgcttagctaaccaagtagagagcctcggatctggaaggaactggacmgaacatctgtaactgggcagggctggccttgggcctgtcttgacttccttgaaatgtctcttttacctggcctccttctcatggctgtcatcaagcagccctgttgatcatgttcctgaggaaggacagaatggggttggggagattaagtttattagcaaggcaatttcctctagggagaccccaaacctggcttggtaactacagtgaaaggagagcgtttgagccccttcccccttctgcttgatctcctctccttcaccaggctttcttcagacctggttccaatcattataaggcagatctaaagccactcttcctgacactgaaactttgctgagcctggaaaaatcacagaggctcagtttggtgtttttgcatgcaaaatacgagaggcagaggtgaaggtgcattcctggtgccctgcggttcccaggcagtatctgagtgcattttcacctgttatcgcttgcctttcaaatattcgttagctcccccagaagtttagccacgagtcatcttctaggggaaatagctgctctgctctgtttgtagaatctcatagtttattttggaatgaagatgtattttcctggaaaagtgttactactttacagtgtccccttcatctgcgaaactgaaaaggcaggcagccttgctgtatgagaagaccacacacttgcggacagaaaaaagatgcatccgggcttctcttcaagtccaagacaattgatgacaaaggaagtatgacacaaacttattgagatctgttattatccttgtgctgcccgggttttagacaaaaacaataagcagattacataagtgagtgtcaccacttttgcataaccaaggtttcatttttctcttctcacttggttagtcttccgtgagctaagcaacatcatggtagttttctgtagtaccacttatggctttccttgttatcatcacctgcctttgacacatgccttcattaatgagttgatatatttaattatatgttatacagatattttatattacaagcaatgttaattgcattcattcagaacagctcccaattaaaatctataaactacttagacctctataaaaatcccaccatttaccttacagcttcacattaatatttaccctggagaggataaacatctcatcctgtatttatctgttagatcatttttgttgtcataaaaaacaaaagccacatgtttaattggatcccttcggtatgaatttttaaaataatagtaggaatccttacttgggaagatggtttcatagggcatcctaaaaccatcctttgttccaaatcctttgaggatgcacacatttaatgttttccttcttactactatgctatgaacttaacagtgctacatgctaaagtacaggcagcagaagttctctgggaaagtggagatccctagcaagtaaggaacccaagagaaggccattctaagctgtagtcccttgttggaccaagggaggaaggaaacagatagcatccacctggcgctgcaattctactggcctgtggggtggtctggctttaggaagctcactgtgtaatccatcagaggacaatcctgccaagtcttcttttcaagtaaaaaatgttaatgtttctttccatactttgtctcataatcaatattcaattttcaaggcagtaaaactaatcaaagaatataaaatgaatccaacacaagagaaaggagggagaatgagtaagctgcaaatgggactgagcaagaaaataggaggatattataactatagaattttttttttttgagacagagtcttgctttgtcacccaggctggagtgcagtgacgcgatctcgactcactgcaacctctgcctcccgggttcaagcaattctcttcttcctgttggtgaatttctcccaggaggcatgagccaagatcctgtttcatgggtttctgggtataccccttgaaacaccagagtcaggagtcaggaacaacacctagtgtattagttggttttcacactgctgtaaataactgcccgagactggataatttataaagaaaagagatttaatggactcaaagttccacagggctggggaggcctcaggaaacttacaattatggctgaaggggaagcaggaacgtcttacatggcagcaggtgagagaagaaagtgaaggaggaacagccaaacacttataaaaccatcagatgtcatgagaattcactcactgtcacaagaacagcatgggagaaaccacccctatgatccaatcacttcccaccaggtttctccctcaacacctggggattacaatttgagatgagatttgggtgggggcacaaaaccaaactctgttacccagttagaaaccggccagtcagcatgtagtccctctggagctcacaattgcagatcatggtatgatggagttctccactgcacggtaggctctggggcttaggcaggcatatggggcagcagtcaacataggggatggtgggagtgaggtgctctacagcagtggtcctcgacttttttagcaccagggaccagtttcatggaaaacaatgtttccatgggcttagggggtgggagatggtttcaggatgcttcaagtgcattacatttattgtgcactttattttgataattattatgttgtaatatataatgaaataattatacaactcactataatgtggaatcagtgggagccctgagcttgttttyctgcaattagatggtcccatctggaggtgatgggagacagtgacagatcatmaggcattagattctcataaagagcacacaacttagatccctcacatgtgcagttcacaatagggtttgcactgccatgagaatctaatgccactactgatctgactggaggcagaacagagctcaggcagtaatgcaagtgatagggaatggctgtaaatacagatgaagcttagctcgctcatctaccgctcacctcctgctgtgtgacccggtccatggcctgagggttggggacccatgctctacagcactgttatggcatgttccagactcttgagaatcggtccttccttgcatctcacctcaccttcaactttattgttcacttttagttcaacctttgccagcaggtaaagaggtaaagagaacaatgtgtcctgtgaagtatttatgagagaagcagataaatcattagatttattgagaacttttgaagtgcactaggcatctcacacacattacttcattgaatcacctccataatcctatgtggttgataattatattatccccacattctggatgaagaaagtggagctcagagaggttatcatgacatacatactgctcacaaaaccattctgtggcagaagtagattcaacagctcaaaaataaaagagggctgggcacagcagctcacacctgtaatcctagcacttttggaggctaaagtgggtggattgcttgatcccaggagtttgagaccagcctgggcarcatagtgagaccctgtttctaccaaaaaatgcaaaaaacaaaaattaggcaggcgtgatggcatgcacctgtagtatagcttcttgggaggctgaggttggaggattgattaagcctggaaggttgaggctgcagtgagcagtgattgtaccactgcactccagcctggatgacagggcaagaccctgtctcaaaataattaaaaaaaaaaaaagtaaaagagaacatgatgatttatggggaaattgacactaaaaatgtcttggatgaaataaagtgacccaggcatcaggatttaggggcttacatgggataacactgttctactccatagcacctcacctgtctaattagtgtctaattagagacatttttaatcagataagtgcatttatgaacattgcaatttttcccaaagtttaaccatcagtttctctgaaaggacttctaaagcctagaaactcacctcttgttaatagtgctgctcttcctcttaaggattctgcccaggagttcaacaccagcctgggcaacataggtagaactttgtaaagtggaataatgctattctaataacttatttagcaaacatttactgagcaattaccctgggtcaggcctccttgcaaggttctggggacatagacatgagggaattctcacccttgaggccatcacagtcagctagggaagaaaagaagtaaacagatcattataaaaccctgagataagtgctactgtgaaggtatgtaactctgtcccctgggtgctttggaagtgtgagagcttgggacattgtagcaggatgttggtagctccatcagatctggagtcttttccaccttgaacttgagatcagcctaaagccaaacacttgacttttaaatgatttgattttaacagaatcaactttttattatgcaaactcaaaagatgtattctgtagagttttactgagccttttttccctttaaaataactaactatatgttttgacatgcttcaggggactttttttgtaaaatagcacaaataggacaatactggaatacatcagtgtgctgtgaagcctgaatgagtaatacacaagtgactgcactttcaaaaatgtaaagaaaagtaacatgctaaaaatcataaactacaaagaggcggcatagcttggtgagacaagcgttgacttgtgaacaggaaaaaaaggatccctgctggctattctgctgagtgaccccaggaggtccctgttcctcttgggacctcagtttcctggttggtggaatgggtattggatgagaatctcaatctgaagatctgcattccctttcaagtcgctaaaatcctggacttctacgataatgctgcatccttctgaggttccaaacaacaatatgcagtaggggccccttttgcttccttccttgcatgtatccaggcagtctcctgagagcatccagcattggggaggaatggggtgtattgaagggaaaagcaggtgccccattgggaatgggacactcccgccccccgccctacctccttctttcaacttgacttccttttttttttttttttgagacaaagtctcattctgttgcccaggctggagtgcagaggcgcgatctgggctcactgcaacctccrcctyccrggttcaagcgattctcctgccwcagtctcytgagtagctgggattacaggcatgcactattatgcccagctaattttgtatttttttagtagagactggctttcaccatgttrgccaggctggtcttgaactcctgacctcaggtgatccaccngcctcagcctccsaaagtgctgggattacaggcataagccaccgcacccggcctcaacttgactccctttcttgtcactgtttctagatggtcaactagatcaatactcagatcagctcttctttcagaggaacaaatgagaactttcctcttgttctccatctcctccttctcctaatgcacacacatgtgcatacacacactccactgccatcactagagagaaggaattaggtccaaacctctgttcgcactcagagtcttaaagtgacagctttacgtttacaagttaggcattaaatggaattccattctccctgtcaagtttcagacaggggaaagcccagaattccaatagtgatggtgttcttggcaagcgctttttacagggtggtaagctaatcagtctgcagttcggcagtctgaaggcttgagctttcatctgacttggaatatataaagggcttggcattgcagcttccaaccctatgacttagctttgagcttcgcatcttcccatcaacttcgtagctctctccatcaaccaagtacccactacaatcaaggagaaaggatatggcagattaattgaatctttgtgtctttttagcacctgtgggctatggacttcttgaaattggagttacttttattcctttgaattgagcccaataccccgcttcagtcagggtgcttttaccttcccagaatcctcttgctaaggacaagcaggcaggctaatcggggactactgaagttttctggctcaaagaacataatgcagtgtgtttacaaatccacctcttcgccttcaccctaaattttcctttcctttatatgattttagcactttgggtttacattaagctctcagttacttaaagtaggctgaagaaaataagaagtgtagtagtgcttcactccccagtgatgaaatagggggtaattggctccaaaaatcgttgcatgtcttgtccctttcagggactttaactgctctgttgcccttgctccatggattggggctgcatcagtagcctaatgtgaggggaatggttgaaagtaattgtcagagcccagagctccacttgccatggaaagcctattgactttaatagtgaccatctggctgggcacctctgaagatgtctcagttaaggcctatttggtgaatggacctttgcttatttgaaagctacactgctgttccaacctgatcattgcattttatgtgatgggcactggaagtccaaatgaaagtttcttagaaaacactcccattaaatttaccagtccatgtgtgattgccactttcagtgcagtcagagcacagtcattctctttttattgaaagcatatggtaggtacttagagcataccctaggccagactcagttatggtgccatcaagggcagcaagaattaaaaagaggaaaatggtatccaggtggcagtaggaattcggtaggttggatggaaaatattcatagttaacgagctttcataaggagaacagaaacaagttagatgtgatttgcagatccataggcaatcagtctctgctgagcagaggggaaacttggagaagattctcagaagtgtgcctcacccttgacccaaacctttccctgaacatgtgcaataaatattattaagctttgagaatttctttaaaataatatctgtcaatggtaagtgccacatgccaggccctatgctaccagcatcatctcatatcatcctcacatgtatcctgtgaggtggaggatactatcccaatgttacagatgagaaaactgagacttaaacattaagttgttcaaggtcatacagctaagaagtcacagagctgctttgattaaagttctgtctgaggctgggtgcggtagtgcatgcctgtaatccaagcactttgggaggccaaggtgggcggattgcttgagccctggagtttgagaccagcctgggcaacatggcaaaaccctgtccctaccaaaaaattacaaaagttagccaggcatagtggtgcacacctgtagtccaagctacttgggaggctgaggtgggagaattacctgagcctggggagcttgaggctgaagtgagccaagactataccactgcactccagcctgagggacacagtgaaactctgtttcataaaaaaaaaggtctctgtgacttcaaggcctttgttctctatactattaggaagtccagtaagtgaagaaaagtacatgtaaatttcactaaaggatcacagcttcttgtacggaagggctttgagcacgtcggctgtggctcctgtgcagccagccagatctgcctaagcagctctgggagtagggccacacaggaatctgtcacagggaggattccacattccttcagcccctatcagcacagtcaaagaatggtaagaagaatgcagagggtggctttgaaatactcacagccttccatggataaaccatggagacattacactcatttgatagaagccagacacaaaaggccatattattgtatgattccatttatatgaaatatcagaataggcaaatccatagaaacagaaagcagattcgtggttggtaggtgatgggggaaagacttcagcaccatccccttccctctcagtctcagtgaagtggaaggaaggagtagtctcagctagggaaaagaggggaaaagctgaagacgacagatttctatgtctcccagtttaattacctttccctttgctctcgcctatgaatgccactgcctgcaggttcttagggaatcaaactgggacttcagtctggaaatgtgctttcaggacaaagacccatgcatacgagacaaggtgacaatcctaaggtggcccccagtacttcggggcagtggaaaggaccttgcgatgggtgccagaaggactaacatcaaggccagctctaccatgtctgaggtgtatgactgtgggcaagtttcttcattacaacttctgcaactgcacagtgactagcataatcctttcccattaggcactgctggatcattgcaaagattaaatgagggccaggtgcagtggcttacgcctgtaatcccagaactgtgggaggccgaggtgggtggattgcttgagcccaggagttcragaccagcctgggcaacatggcaaaacccagtctctacaaataataataataataataataatmatmatmatcatcatcatcatcatccaggagtggtgaaatgcacctgtagtcccagctaatcaggaaactgaggtgagaggatcgcttgagcctgggaggacagggctgcagtgagccatgatcatgccactrcactccagcctgggcaacagagtaagaccctatttcaaaaataaataaataaataaggagacatatgtgaaagcatttccgaagtctaaagctccacatacacataagtgattataagaaatttaacaaagggtagtcacataattgacattgtcctttggaggagagaaaattggtgctatccccttggtggacaggttccctcatccttaaagcacatttccagagcagaaggaagccttcatctaagtccaagcgctacatttctgatatgagagctagtttgagatttaaatgaaccctgtctctcaagacacagctttgcatctattttgcattcaaatttatttatctagagacaaaattgtgcattctttaattctactcacagcgtatgcacgcagaccaaatgaggtgctgatccagcaaaacggcaagtagccttttgcttccctgaaattgctaattttacaaatggcagagtggtgaaacgtggcacggaatatctattttactagaatccggcaaaacgggcacatatggtcttgtcaagaatgaatcaaacacagtttcgggattataattaagtagttgaaattccaaaaggaagaagttaatatgaacaaagtgagatttcgattgcttttggttagcattctctcaggctccttcctttacacattatcaggaacatagctactttgatttcttgtcctgaaaaatgtttaattgtaaaatatcaaacgttttcaccccaactctaattgtacttgatttgacatctgtacaccatgctcagggtaccaaatattattaaatgtaataagtccaggcatagaagtcaagccaaatgttcctacgtaagtatttaggttgacaccttctgtcaacaaagctaaacctctgaccaattctgtagcaggccaataaagatacaggaggaagatgggaaccattagaagaaaacactctctcctcatctctctctctttcagtactgtttctacctgaaatcagggacatattccattctggtccacaagcccagcatctagcacaggggctggcatgtaaaaagagttgatttgggctgggcgcagtggctcatgctgtaatcccagtactttgggaggctgagatgggtggatcacctgaggtcaggagtttgagaccagtctgaccaacayggtgaaaccscrtctctactaaaaatacaaaaryyagcyaggcgtggtsgtgggtgcctrtaatcccagctactcaggaggctgaggagggaaaattgcctgaacccaggaggcggaggttgtggtgagctgagattgcgccactgcactccagcctgagtsacagagcragactccmtctcaaaaaaaaaaaaaaaaaaaaaaaaaaaaaaggagttkatttggagatttgcaacttgtcatgggaaacattcccagggwttcttctagagttgttgtggacctgattttgggtgctaagtggtaactcactatatcttaaaaacacatcagctaaaaggtggaagcaatctacatgcccatcaactgacgaaggggtaaacaacatgtggtatatccatataatggcacgctatttattcataaacaggactgatatatgctacaacatggataaactatggagacattacactaagtgatagaagccagacacaaaggccatttattgtatgattccatttatatgaaatattagaataagcaaatccatagagacagaaagcagattagtggtgggcaggtgatgggggaagagggagattggtagataatagttaaaggatatgaagtttctatttgaggtgttaaaaatgttcttaaattgattatggcaatggttgcatgactgataatatactaaaaacctcaaattttacactttaaatgggagaattgtatggtatgtgaattatatttcaataaagctgttatataaataaaagtttacttcagattattttgatgtgcacttgcagttcagaagcttgagctagattaacagttcctaaccttagttttggctcctaactcctgtctcctctcagatcttaggaccttcaggttccacacagcctaccttgctgctacctagtttttgaagttctaattcccgaaacaaagaactcccttgaagagcattgatgccatggcggaggagaggaaacaagaacttttggttttaagctgtgtctacacttaaccaccttgtgcccacttgggtaggtgctctatcattgaggatcaggacccaattattcccattctcatgtttttccaggacctgacaaatcctaattcagattgctattccctttgagagtgaaatagcttaggtacgtttcttctacaacaatgcagatattctattaatgaaaggagctgctacaaagtaatttttaatgtttatataggaaagtgtaactttttttttttctggagacaggctcttgctttgttgcccaggctgaagtgcagtggcacggttatggcttactgcagcctcaatttcctgggctcaagtgatcctcccacttcatcctctcaagtagctggaactacaagtatgtgccactacacccagctatttgtttgatttttttttttttttgtagaaatgggctctcactaggaaattgtaagaaaaaggagtagctttcttaaaaccctggtttaacatgacaaacccaaaacattgagctgtacacttcattggttaaatcttctttttgcttatttaaagaaaggacaagaaaaaagaaaagaaaaacttttttgctagttcacacctcaaggtacacccagtttctgactttaaagggaatcagtccaaagtaacaaaatattattttgacatctgaaaaagaaaatgctcgttttataaattggatagtgatttctaaccattgttgatggacatagatatcttttgttaaagcctcatcaataagctcatatttctaggagatcatattgcgatgagaattatgaagagggaactggaggtccatgctggaaagtcagtactcctttaattcaactaaaaatatttattcaatagttaaatattgactgtgatatcaagtattttgaatgttggtaaaaattaaaggttttggcaaaatagacaatggtatacttacaagttttctgagggtggttcccagaatatattacccaaaatactatacagtgagaagtgatagtcaccattccatgtctttgaccacaaacatatcttaagattttctttgaagagggttttttagctttttgagacagagtcttgctctatcacccaggctggaatgcagcggtgcagtcatgggtcactgcagcctcaaactcctgggctcragcaatcctcctgcctcagcctcccaagtagccgggactacaagcacatgccaccacatttggctaattaaaaaaaaaaatgtagagacgggatctcaccatgttgaccagactaggctggtcttgaacttctggcctcaagtcattttcccaccccggcttcccaaagtgttgagattacaggcctgagccaccacacccagcctgaagagggtttacaaaattatttcaccaacatgtaagaaaatgtaataggcattttaaagtttaaccattgtcagtcactcttttaatgccttagtacccagaacagtgctacttttagagatacgtatgtatctattttctgaattcatttttggttgcaaagcatcattctacaaacattatgaaagagagccaaatactgtgacttcaaggattatccaatactctataattagtttcatgaccaaaatgctttgaataactgaaaagatgagtgaatgactggatacatgaatacatatcatccatttatatgaaaatacttttgaatacaggcatatcttagagatactgcgggtttcgttccagaccaccccacaataacatgaatattgcaaaacagtgagtcacatgaattttttggtttcctagtgcatatagaagttatatttacaacatactatgttctattaagtgtgaaataacattatgatgactaaaaaatgtacatgccttaatttaaaaagagtttactgctaaaaaaaagaggctatcatctaagctttcaatgagttgtcgttgttttgctggtgaagggtcttgcctcgatgtgcatggttgctgactaatcagggtggtcgttgctaaaggttggggtggctgtggcactttcttaaaataagacaacagtgaagtttgccacatcaattgactcttcctttcmcaaaagatttctctgtagcatgtgatgctgtttgagaggattttacccacagtaaaacttctttcaaaattggagtccatcttctcaaactctgctgttgctttatcaactaagtttatgtaatattctaaatgttttcttgtcatttcaacacgattattcacagcatcttcaccaggagtagatcctatctcaagaaaccactttctttgctaatccttaagaagcagctactcattccttcaagtttgatcatgagattgtagcaatccagtcacatcttgctcctcctctaattctagttctcttgctgtttccaccacatctgcagtgacttcctccactgaagtcttgagcccccaaagtgattaatgagggttggaatcagcttcttccaaactcccgttaatgttgaaattttgacctcctccattgaattacaaatgttcttaatgacatctagagtggtagatcagttccagaaggtttttactttacttttcccagatccatcagaatcaatatggcagctatagccttacaaaatgtatttattaaatgataagacttgaaagttgaaattattccttgatccgtcaactgaagaatggatgttgtgttagcaggcatgaaaacaacattgatctctttgtagagctctgtgtagatctccatgagagctctcaggtgaccagatcagtgagcaacaatattttgaaaggaatcatttttctgagcagtaggtctcaatggtgggtttaaaatattcactaaatcatgctataaacagatgtgctttaatccaggttttgttgttccatttatagattactgactgagtagatttaacataattcttaatggccctaggagttttgaaatggtaaatgagcattagcttcaacttaaagtcatcagctacattagctcctaacgagagagtgatgctgttcgttgaagctttgaagccaaatatagatttctctctagctatgaaagccctagatggcatttacttccaatataagtctgattaatctacattgaaaatctgttgtttggcatagccaccttcataaatgatcttacctgtgtcttctggataactggctatagcttttaactcagtacttgctgtttcactttgaacttttatgttctggagacagcttatttccttaaacctcatgaaccaacctctgctagcttccaacttgtgttctgcagcttcctcagcactcttagcctttacagaattgaagagagttagagccttgctctggatcaggctttggcttaagggaattttgtggctgttttgatctatccagaccactaaaatgttctccatatccgcaataaggctgttttgctttcttatcatttgtgggttcaccagagtggcacttttaatttccttcaagaactcttcctgatcaatcacaacttgacaaactgtttggcacaagaggcctagcttttaccaagaggcctagttttcagactatcttggcttttaacgtgccttcctcactaagtttaatcatttccagcttttgatttaaagtgagagatgtgggactctttctttcacttgaacacttagagaccattgtagggtagttactggcctaatttcagtattgttgtgtctcaggaaatagcgaggcccaaggagagggagagagatgaaggaatggctagttagtggagcagtctgaacacgcacaacttctaccaattaagttcaccagtttatttgggtgcagtttatggtgcccgcaagtaattacaagagtaacatcaatgatcactgattacagatgaccataacagatatagtaataatgaaaaaatttgaaatattgtgaaaattaccaaaatgtaacacagagacatgaagtgagcacatgctgttggaaaaatggagccaatagacttactcaatgcagggttactacaaatcttcaatttgtaaaaatcccagtatctttgaggcacaatgaaatgaggtatgcttgtctctactttctgaatatgcttttggttgcaaagaatcattctgcaaacaacatgaaaaaagatccaaacactgagacttcaaaggttattcaataccctatcgttagtttcataaccaaacaaagagaaatgccttgaataaccaaagggatgaatgaatgaatgatggatagataaacacatgtcatcaattcatccaaaaatacctcttttttttttttgagatggagtctcgctctgtcacctaggctggagtgcagtggcttgaactctgctcactgcaatctctgcctcccgggttcaagtgattctccggcctcagcctcctgagcagctggcattacaggcatgtaccacaacgcccagctaagttttgtattcttagtagagatgggggtttcgccgtgctcaccaggctggtctcgaactcctgacctyaggtgatccacctgcctcggcctcccaaagtgcagggattacaggcgtgagcctctgtgttaaaaatactttggagtatataggccaggcacggtgsctcangcctgtaatcccagcactttgggaggccaagacaggtggatcatgaggtcaggagctcgagaccagcctggccaaaatggtgaaacccccrtctctactaaaawtacaaaaattagcyggacgtggtggtgggtgcctgtaatcccagctacttgggaggctgaggcaggagaatcgtttgaatctgggagatggaggttgcagtgagctgagatcgyrccactgcactccagcctgggygacagagcaagactctgtattgaaaaaatatatatatatattatataaatataataatatattataaatatatacatatatatacatatatgtatatatatgtgtatatatatatgtgtatatatatatgtgtatatatatatgtatatatatatatatatatacatatatatatacacacacacactttggagtatatagttttaatggtggtaagtgctctaaaagaagaagcaagtgctatgagagcatatattagggacctttgacccagcttgggatttatgtttaatttgagacgtgaaaatgattaggagctaagaggggttaggctggagagagggtccaggtagagacaatatgtggatccaagaaggaagaacaaagggatcaacaaagtgatagaaataggccgggaggggtggctcacgtctgtaatcccagcactttgggaggctaaggcgagtggattgcctgaggtcaggagttcgagaccagcctgrccaacatggygaaacctcgtctctactgaaaatacaaaaattagctgggcatrgtggcaggcgyctgtaatcccagctacttgggaggctgaggtaggagagtcacttgaaaccgggagccggaggttgcagtgagctgagacagggccttggcactccatccagcctaggtaacaagagcgaaactctgtcaaaaaaaaaaaagtaatagaaacaaagacaggaagcaaagagaaagaagataatgacaaggattaaagatgcagctttgaggatggcaaaaccgcagagaggagaactattaggatggtgcaaaggtaattgccagtttcaccactaaaagtaatgacaaagctcaaggtggtggtaggagggacagctgagtgactcctgagaaaatgtaaagtgctgaacctttgtagtttggaagacttggttaaccagaatgattcattccccaattatgccacatcttcaagattttactgtaaaagcaagcaggctggccctggcattcctaccataagctggtgcttcaacttccacatctggcagaggctctagatgtcacataaattgaacatagtcatccagctcaaagggggcttggggtcattgagtccaattttcattttatagctacaaagtactgataactaaaatttacaaagtaatgcacacgtggcagccactgttctaagtgtttactgtgtattaccccatttaaccctcagaacaacccagtgaagtagaaactattatgattcccatttacagatgagggaactgagacacagagaagttaagtgacttgcctatggggtcacacagctcattagtggtgctgtagaccttgggtataatcacttgtctgtatctctcaaaaatcatacagctggatagcagcagatccaagaatggactcggctgtctcccagtgcagtgccctttctactatggtaaccagaactcgacggtgctccctcagttggttgtaaataacataatcccatagtaattgcaaggatgagaatgaacttttcagtctccctgtccccacgtttttggaatggttctacctctgagagcacatgaactcagcctagttttggggctggtctgcccccaattttaacttccatcatggcattgccatttgaacagtgagtgttttggagctggcagaaggtatttttgcgcttcaattcaattcagcgatcgtgttagaagccatcctccaagtgtccaatgatgttagtgtgtccctttgggagtgatttatagtcaaatgggctgcattatagggtgatgtgctgaacaggggaccaaagtatgaccagcaatgctagagattagatttcaaggtcgttgagtaaacctgttgtcaggatttccagggatgatttgattgggaagaaaatgcatctttgtttcatcatttcaaagcaattttatgctttggttctccccgtttctgtcttctgaacacttccaaggccacacttgagcctcagcatcagcctgaagtcttgtgtgatagagttgccatgcaaggtctctctgggggtatgttgaaagctaccagtaagacttgactttgataaaacgtttaattgttttcttttgcctcaattaagttgagaagactcaaatgtagcttttaaattgaaaagtgtaactgagtgagaaggtttatatcaaatattgaaaggctaaggagccttttaatacattgttagctgtcaatgtgtttcaacaaattgtttcagtcactgttgtgtttcagtcactattacaactggggcctgcaatctgaagtgactcaggggtccatatctctggacaaggatatccacttttctgaaccgaaccaaggacgaggtagagtgggacagaaaaggacagattctagagagctttcccaagggacacgtctggcacctggaagtggtcgagcctaatgtgtaaagatttcaaataccatctggtcatttctttaggacctcatttgacaatctgtgggattgttttttgatgtggtgccagcccgaccaaatgaagtttctttcaatggtgtggttggtgtctgctgagaaagcagaagagggggctcttgtttagctcacaaccattgtgtgttaggcattatgcttgagcattttacatgttctggaagtattctcaaccctggctgcgatttcagtcacccagggagcttttcagaaacactgaggctcacacctgtgatcccagcacgtttggaggccaaggcgggcagatcacttgaggccaggagtttgagaccagcctagctaacatagcaaaaccctgtctctactaaaaatacaaaaaytagccaggcgtggtggsgtgtgcctgtaatyccagctacttgggaggctgaggcaggagaatcacttgaacctgggaggcgccggttgtggtgagccgagagtgcaccactgctctccagcctgggtgacggagcgagactgcctcaacaaacaaacaaacaaacaaacaagcaaaaagagacattgaggctcagttcccatatcctaagattctaattcattcagtcttaagtaagaatcggggcgtttgtaattttaaaggcttgtcagatgactcatgtgcaaccgaggtggagaacccctaacttagagtgtcttgttgaatttggggatatttttctgctctgctcatccatccgcttgcaacttagagggagagtcacattcttcatggtgacaagagtgagaagtgtatacgttggcctcaatactccgaatgcctgtgccaaattccttcggcaccttgctttgatggtttggattgcctccctctcctgcctgattccagctaatattgctagctttccaggcgaatatttttggcaacccttgccttctgcattcaaaagaattgcttgccttcattactttatgactctcccagtgtgcaaaagtctatggagaggagacttttaggaggccccaagcaaataaggcctcatcttccatttaaggcttcattcccaggaactttcccaatacaaacctcagtgctcctgggctggccttgctggagagggcttcctgaggcggagttattgggacctgagggaggggttcctagagtgcagcaattccagactgaaattcccaggcttggggtctccctgggaattccctcaggaggaccctgtgtgcatttgggtgaaagaaagctattgttgaggaaatttgccctgccagggaccccagggcctaytttgggtgtgtgtgggtgggtagagatgaaggggaaagttccagctgcttcagatggtggcgaatgacttaaacaaacaaggactggggcttggaagaggagagactgcacgtgcctgggcaggtttcaggttcctgacaaagagacaaatctgagagagatttacagacaccctctccatctatcacacaaatctgtgtcaagattttgagtctgcaaaacagcaccagcattatttcattgtctctgtgatttaggaaatgagattgaacacttgtggaatacccactgtgtgccaagcaccaggcaccagggtattcattcacccatatgttaccctagcaaatgatttgattttcaaagtatgccctgaagtgcctatgattactatcccaattttatggatttagaaactgaggcccaggtcactgacatgatttactcaaggttacacaaactgtgtaagaacctgggttaacctgacatataattgaagttatgcttcttttacttcacctctcatgaccctcttcccctatgtctttttaaaaggatatacatattgttacttttcttctcctaaatgttgcctagatttgctttctccatagtttcacctttcattcttctttggttcctgaatctggcttctatcccagcatctccaatgaagcagtactcctgtaggtcatttgatgaccaaaccatcaaacccaaccctaatcagtccttatctaacctgccttcatagtatttagcatgaatggtctctctctctctcttgaattggactatctcattcattttcataggtgtaccagctctatgctgatcaatctcaaatctacctctgcagtcctgacctctctcctaagcttcaggcttatccatctactgcctactagacttattcatctgggatatcctacagaggctccacacactcccaaaaggaatccagcatttctcctaaccaccaccccattcaaccccctttgcaggatctatgaagccagcaacttgggtgtatcttttccctcacccactcatctaaatcagtccatcaagttctctccattctgttttgtgattatttcttaaagacgatctctctcttctctacgcccaagactccttctttaagtgaggattcttttcaagagccttctaaaaagtctctctgaatctgcttcactgcatgagtctgttttccatgccgctgacagagatcttttgaggtgctaattaaactgttccatggctctcagaacctctattttccaaagtacatttgcaacctatttttccaggatactctgtgaaaaataggaccactgtggtcaagtagctttggaaactttctgtgtactatactttttgtttccttttggagattcagatagcatattaaatgtcctgagaatcccttaagttaaaaacaggcttacatttacatacttcagcatcccaaatggatttcatcatggaatcacccctcctcccaaacactcatatttttaagcatgagtcctgctcacaaccttctgcagaacacatttgaaaccacaggatgaatgctgtgatccttggcctgccatacaaggctcttgttcatctgacctctgttcacctgttgatatggttaggctttgtgtccccacccaaatcayatcttgaattgtaatccccataatccccatgtttcaagggagagaccaggtggaggtgattgaatcatgggggcaattcccaccatgctattcttgtgatagtgagtgagttctcatgagatcggatggttttataagtagcagtttcccctgcctgtgctctgtctcctgccaccatgtaagacgtgccttgcttcccgttcaccttccacctcaattataggttccctgaggcctccccagccatgtggaactgtgagtcagttaaacctctttctttataaattgcccagtctcgggcagttctttatagcagtataaaaacggactaatacacttgtctagccacctctcccccttaaattctcactactctcaccattcttgagaatactcatcttcctcacatacctctgtgttgtggttttgtttttgttttttgcttgaaaagctattcccctcccctcaccatctcggcctgccttcaactcatcattgaagacccagctcaactgtcttcccctctatgaagctttctcttattttctgcaagggagaagtagacaccccttctttttacttagaatcttcctttataccttgaatattacacttaggacatacgaagttattctatgtctacctagccttttaacctttcaaaccaattgggttattgtcttatatcttttcatgttatgactacctttatctcctgtcagaagtttggactcatcactgacccaacagaaaacagtcttatcctttctagtttttggtaagacagtgtatgtgagaaaccttacagttaggtatgggtggaggacatgtcaatccagagtgtttgctaatgtgttcagctacagtccacaatagcatgtgccacagtatgctgtctcacctagatggtgtgtagattggcttgattgtaggtatatggtggataataacatcttggcacagaaacaaaacccaaaggcaccttatcccctgctcctaagacaggctcaaggctcagcttcagctagttagcctggatctgtattcagttttccagtcatcttgaggctgggggctcggagtagcagcccacctcatgaatcctgctcgtcagtaaggggaatattcattgtcaagggcttactctgttcaggcactgtgctaagtctttgcctgcattatctcatgtcattctcacaacaactccattaggtggaaactcttattttcatcatgtaacagatgagtgagcgcactgaggctgggcaagtaaaatgacctgtcaacgagccatagcttcaggccctaatccagcctgtggcactgccctgatgggttaccttgggcaaatcaattgatctaactgagactcaatgtcgtcatctgtaaaataggaacaatactagtgtctatctcatggaatagttatgagggttcaatgataggatgcatgcaaagtgcctggcatagtgcctgacacttggtaagtgctctataaatggtagctattatgcgctcacatcagagacgttgttttcagccaggatgaagggaggcatgagggcagttttatactgaaggagagggtaggtctaaaaattatttggatgatgaaaaggtcacaatcctttgggaggcaaaggaggaaaaatttatcttaaacacagggagggagatggcagccaggtaccagaactcttgatgtgtaaagggctggccatatggagactgaacaaagtcagtgaagcttggctcctgtgcaaatcagagatgggctcaacatgtattccatgtagctgatcttgcatgtgcacggtggtttctgatgcctcccccgtaagggcagcttcatccactcctgtgagaaatgcagctcacagatgtggaggaccatctggagaagggatgtgagtgaaggtgggtgactgacagtgggtggagctggagctagggactcaggcggcagacctactgggttagaattacgactgtgccacttgctagctgtgtgggtttgggctatccactatctctctgagtctcagtttccttatctgtaaactggcaatagtaagggtaccaaccttatagggttattgggaggaacaggggaatttattcctgtgaactacttagcacagaccaggcacatggtaaaggttcaagaaatgctgatttttcatcattattatgtgttctggacgtggcaggggagatggggccaatgtggaggatcatagggcttgctgaaacagtcccaaatgaatcttcttcaaattaacctctgcaaatattgcctctgcctccattaatttagagaagctttgcattcttttctcttaagtttattttgcagctcatgtcttaatgagctaaaaaaaaaactatagaggttttgatccaatttcagactaccctgtaagatatcagcatctgacagttctgctgtactctttcaggcattttacttgaaatgatagtaatgtgatatttgcatccagtgcaaattatgaattttcactaattcttagattagatggggcttaactgctaggatgcagcttgcacatttaatctacttcagagcagcttcacttactagatggtcctcatgggtctggggaaaggatgtaaaatatcatcaatgaggtatgaagcatgttttaaaagatggagtcttgttttcagagtggattgaactgctgctaaatcacagccattacccaagcacacatagcatgtattccagcctgagttgccaccagtttttccttgtgacttgatccagtcctccattccctgctggcagtttgtgcacccctttgcttttccctgtgctgctcaggcaggtggttgctgcctaattaaacacccacacagcaattctctctgttttcttcctccattccaggatactgtttattcttgtttttacatttttttggaaaaatgttttgaagcaccttttgaaaaaagaaacatagtgctgatgatcagctaaatgtttttatagcttttcaggaagtgtgaaatgttctgatagctggcagccaagtgtcaagaaggccttggagaaaaagaaaaggccaattccaactcctttaaggcaacttttagaaaagatttagggctttaaattcagcttcacatactacctcccaagtcctctctaattagtagaaggtaaaaacattttggccgggcctgtaatcctagcactttgggaggctgaggcgggcagatcacgagctcaggagtttgagaccagtctgaccaacatggtgaaaccccrtctctactaaaaatacamaaaaaaaaattagctgggtgtggtggcacgcacmtgtaatcccagctactcaggagsctgwgrmaggagaatcacttgaacctgggaggcggaagttgcagtgagccaagattatgccactgcactccagcctgtgcaacagagtgagactccatctcaaaaacaaaaaacamaaaaacaaaacaaaacaaaacaaaacaacgttttttgctcaatccagcatctgatatacattttaactactttattgagttgaatttatatttaatagagttgtattctgcatgttgaatacatacatcattgtatccagaggccattgtttatttaaagaacttatagaacaattgtctattttaatttattatagaagctacactataatttggttgtgattgcctttatgttacatgcatagtcgtatctgtgatatacttggagcctaatctctggtcaagattgcagcattattttcatgggaaaatgtatgccatgacagtgacatgacttctggcctgcagcaataaatgcatcataccaaaactggagaagtgagcatagcccggtgtctgctgcataatcggaattcattcaaagtctgctgaatgagtgaattaattgtctatattctgttcagacacaactacgtggaacatgaaagactgagaactgttctctcaagttccatcataatcgacaacttcagacaagcccctcaactactcgctgtccccatttccttagtaagggctatccatctcataaagatcttaagaagaaaggacatggagcattagtctaaaatgccattctttaaaagtgatatttaggccgggtgtggtggctcaggcctgtaatcccagcactttgggaggcctaggtgggtggatcacctgaggtcagaartttgagaccagcctggccaacatggtgaaacctcgtctctactgaaaatccaaaaaaaaaaaaaaaaaaattagccgggtgtggtggtggcatgcctgtaatctcagctactcgggaggctgaggcaggagaatcgcctgaatcctagaggcagaggttgcagtgagccaagatcgygccactgcactccagcctgggcaacagagygagackcrgtytcaaaaaataaatwaataaaataaaataaaagtgatatttaaacttcattaaaagtagaagaaarccaaatgcatcattttaacttattttttttctttttactcaaccagatagttggtgacatataatcaacacacatttatcgagggatgctattgtaggtactcagcaccgtgctagacacagggaatgccaatgttcctgctcagacagcttccaatcctgttgaagagacaacccttctcaacactggttctattgacattctgagctagataattctttgttgtagggggttgccctgtgcattgtaggaagtttagcagcatccctggcctggccctggcctactagatgccagttgtacccccttcctagttgtaacaatgagaaatgtctagacatttccacggccttccatttcctctgtgatgcaaaatcgcctcctactgcaaaccactggtgtaaaaagtgatctgtcatgcaaattagtatgagacagtcaaatgaggaagtaatagggagtggaattcactggcgtgaatgagctggagtaatcagagacttaaactggacctttaaaaaactgagtgggattttgataagtggcaagattattgcaggtatagaaaattgcatgtgctatggttctaagactgcggtgctgcaatttggtgggtttgtgggatggcctagtgactaactgactggcttgagtgaatggagaggaatgcagatagtggacaatgaggcgaataaggtaggctggttgccacaatgycagtttaaaagagcggcaggatgcagggggggtttggatagtgactctgccagtagtgtgtaggatggtttggagtgaggatggatgggggaagggctgtaactccccttatccatgcttttacaaagagagaggggaaaacaagttgaaatagtgaacacagattcctaatgcagcaatagcatctcctaagctttgtgtgcactagacatcacatcgctcatgtcatagggtagattctgcagatttgtttttctttcttctttttgcctgtgatttggagatcagaagatgtagatgccacagatttgtctttgaaagtaattgtcttgttcttcacattaatatacttcattaggtcttttagattagctcctgggactaaaatccatattcttcagacagctctctttgcaactgtgtcttgcgacaattctcttttcaattatgttgtgccactttcatatttctttcaaaatgttctcratcaattttgccggcactttctctcctccaataatatggcaatgtattatcttattcgccatccaccccatgatcatacaattgttgcaagcacctggaaaaaacttttttttcattttgtcaaacttcatagtatttacattgatgagtttaacaactacatggcatgtagaatgtccatgaagaactccacataatcagcatctaaatttgagtatttgaatgtttagggcaacaacatgatctcaggacttctttttttcaggacctaagacaaacaaaaatggctgcaaaacatgagccttgtactgtggctgatatcattgaagcacgagttagctgcaagaggaaaattcacttggtttagtagcggaaaggtgatagagaagatctctagcacaactaatctgaaaattattaaaatctaaaaattaaggtagaaaatggcatgagaacagttttaaaagtcccatagttctgttcagtgaatctgagctcaatcggcttgccatttggtaatacaatgatgtggccttggcagatggtgagtcagtggaaggctcagtattattcaagctcagtttatataggaaagaagcagaaacaacacccccgttttcttgcattatgtctcataaagaaatctttttagtaatttcacttagaaaaggaaatactcaatgtaccctttcacatatctgaggtaggataagctcgcagaatcagtactagccctgaagcttctacatgcctcttattgtgtgagaggaactggaggaagagcggcaaaccatatgatcgctgacctcaaggagctcacgactgagctgaggtaattgagtagctgtgtgtggcacacctaaggtcactatggtctggagaactgtagaaagtttcctggaggaggttgaatttatacttggttttgaaaagtaatgtagagagaaaggtatgggcattttgagtaacatgagaacagaactagcgtggtgtctatagggaaaagctaggtgctctgctcagctggtggagggaagcagagaagctgtatatttagggaaagagtggaagtaaggctgatggacaggatgcccctggctgtgatgagagtgttttggaaaacaggctacttagtgtcgtcagcagtggtaaccactgcagtccatggagcagagatggatcatgaagaaaacggtactttgggccgggcacagtggctcacgcttgtaatcccagcaattttggaggccgaggtgggaagatctcttgaggtcagaagctcgagaccagcctggccaacatggtgaaaccccatctctactaaaactacccaaattagctgggtgtggttgtgcacacctgtaatccccactactctggaggctgaggcaggagaatcacttgaactcagaaggcagaggttgcagtgagccaggaccacgggactgcactccagcctgggcgacagagcgagactccagatcaaaaaagaaaaaaaagctactttgaaggggaaactcctttaaaactggagcagtcctaaagtgttcaacaacccaagtttacataaaatgaattgtgatgattcctgtaaatctgtaaatataggtcatgctgatctgttccctgaaggtgcttaaaccaacctcaacttcagtcgtccatgcctttcatgactcactctggctttccccagatagataaggtctctctgcatgagaagctgggatttagcttcatagcagttttgagacacggtctgtaggagcaatttttcaagaagcaagactatttgcacttcgtcctaaaaataaatgtttggggtggagagcagaaaacagcaaatagcactgttttataaatgaacaaggaggttcaggagcttttctctcaaccccctaaaccttcttctgggagttcctccaaacctaaagtcacacccatctgccagattgtgtaaagctgagtcctcggaatgtgaaatttatgagggcagggactttgttatgtccattctttattcccagcccttaaaacagtgtctggaacacagtagatgttctacatttccccctttaaatcatatgctgtggaattcataaactttccatttttgacacagacattatttgaataatcatctttattttcagttcatccatttcatattgagtttttaaaatagcagctttattgaagtacaattcctaagatacacaattcacccttttaaggcatacagttgggtggtttttagtttattcagagttgtgccaccatcactactaattctggagcagttttcacacctccataggaaatcccataattgtcagcaggcactccacatttccttttccctccagcttttggtggtcacaaatctgcttactatctctatggatttacctatattgaacatttcatgtaaacagaatcacacactatgtgatcttttgtgtctggcttttttcatttagctaaatgttttcaaggtgcatccctgctctagcactatcagagcttcacttcttttttgtgaccaataacattcccttgtatgagttaatcacattttatttatctatttatccattgatggacatttgggttatttccatttctcagctattatgaatggagctgctatgagcattcatatagaggtttttgggtggacaggtgatttcagttctcttggatatatacctaggagtggaattgctgggtcatatgatgatttcaaatttaactttttgagggactgtcagactgtattgcaaaatggctgcaacattttgcacttctaccagtagtgcatgagggttccaatttctccacatctttgtcaacactggttattcctggtcttttttatataaccatcctataatgttaatgagttaatgttgacttttggattataaatatattatatgtatatattatattataaatatataatacatatttattatatattacatatttataatatgcattaatatatattatatagtatatataatcaatatattcacatgattaatatattaatatctttaatattatatatttataatctatttatagattgtaaatctataaatatgaaagtttatgttaatacattataatatataaacatatatataatctattatttttatatctttacataaatatataaatataaaagattacattaatatattatatattaatatataatctaaattatatattaatataattggattatataaaatatattatattttatattacataatatataatatatgttatattttatattatagactatattatatgttatattttatattatagaatatataatataatatatattatattttatattatatcatatataaaataatatatatattatatattatattaagtatatattatattaataatgtagttctatatttttatatattgtatattaatcattacagttaattatattgtatacaatataattatattgcatacaattatattgtgtacaatatcattatatagaatacaattatttatattgtgtacaatatcattatatagaatacaattatttttattgtgtacaatataattatattgcatacaattatttatattgtatgcaatatatacatatattaattatatatatattaacaagtgtgaaagtcttatactttgcctcagaaatggccttgccagcacaatatttcccttcttgcatctttagtttgatgtgttgttgttttatttcctcataaagcaaatgaaaaagagggattggggatctgctaaaccagatgttagcactttttaaatttagagtgtggtggtcacaagaaaacacaactgggccttgagacggcatggaaaattctagaaatgtgtcatttcacagcatctgtgcagaaactgcttctgtgccagcatgttacatttgaaaccacattttgtgtgtgttcaacttttacacagatctcgagaaaagtgaaattgaattttatgcatctgtaatttgatttcagtccatgaccaggccatttctttataataattataagaatgtatccaatatatgactttcatcttctggtaattacaacaatttaccatttatagaacacatagtttaagacaccataagtaacatttcatgctaattgcttttctgaaaataaagggctctgttgtacacatccaagaacaatggtaggagaaaagaaaattgattgatacatcacatcaaagaggagatcaaaatgaagtcatccaatatatgccaaaggctctcataaattacaaattttgaactcactccaaactttatttttaggcaaatacagtatcttcaagtctcattatgaaagttacttcaaagatgatttgatgtgacagtatttttcccaaggctttgcctgttttctattcctaaggcttcccatgcgagcagggattcctggggcccaagctcaagcaaccaacttatactttgaatttgaactcaaaggacaagaagcccatttttgtgatgtgcttccccatttccttcttttgagcctaattgaagaattaaaagttgtcttcatttctaaagttatatgccgaacacaaaggggggtttcaacagctgcttcttgtcatgctgtgggaaaaaaataacatctcatctgaaaaatacctccaggttctccagatagttcttgcttttctcactcacatttttctctttacatgaacagatttggctcctcttcttcttttgtaggtagtatccattcagtaagatatttttcagatattgagagtaatacattgttcattagaaaacaaagttaaacatccataaaatactaaaaagaaaataaagatcacctgcagtgtcacaacccaaagtgtatcattttgctttagtttcttacactgtttgtttgcttgcattcattctttctttcactcgttgcatatttactgagcacctactatgtgccttgcattgtggtaagatacaaattgtgatcctaattttctttataataattaggtttataattgttggcatagtccatgcctcctctcctagactttagtgtctgggaccatcttactcaccatacatcgtattatgaccatttaccaggtcattaaatattatctgaaaataaaaagtttaatggctgcataagacttcactttcagcatctactagaatttactatttccttattgatcatttaagatattttctttttattctgctatttttgataattataattaattaattccattttgaacatcatttgtaagggtatacacatttttatggcttgtgttgtattagccacactgcccaccagaagagccctactaatttaagcatttaccgcagtaggtgaatatttctcaaatgaagttgaaggaagttccaaaatggcagacccaaggaactgaaagacttacccaatacatccctttgcctccaaggagagacagaatgaccactaccaccagaggggaagccagtttgtttaagagaattgaaaaacaccagggagagctctctcaatataatagtactgggatttgggggcaagaataagcagtggtgcaggttgtttatttacatacgtttataaattatctttacagggctaagagtgaactggatgaatggtgttggcataacctcagagaggcaatccaaattttattaattctctgttatgtgtcagagcttgagttaggtgctatgagtgatgcatggatgaactaaacacagttcttggcctcccagaatgttaaaatccagtagcagggaaaagtgtgtgcgagctggaatttgaatgacctgggttccaattctgattcttctacccattatagcagtgactttggagaggttacctgatgtctctgatcttctgttttctcatgtgtaaaacagggtgaataacagagttcttgtaagaaggaaatgagataatgtgtataatgttcttaggagagtgtgtggcacataacactatagcagcactcaggagatgataactaccattgctttggtaatgatgtttcctatcttccaagggttttgtgatgattcaatgaagtaacaaatgcaaaacacttagtgctactacagtctcaaattaagatgacgatctgatgataatgacaacctttttggtgaagaacatatcacaagcgagttgtaccaaacataaatgagtaacaaaagggtagcttgccccttgtctcagagaaagtgagtctcggcatgggttgctgcagaagacagtgttggctctccacatcctgtgacaccaagacttattaaaaccagacattcaaagcaattgcaagttctgatctacacaactgttggtcacttccgcttttgcgcctacctcatttgaggcacctggagtgtgttttttcttggtagaaccgtgacaacatgcctattgctggcctggaattgtctaccaagcccaaagctttttagcagtgggtgatatttgtttcttgtgccatcgctgaataatgacttttgtagtctgaaattaaacaagcattcaagggctctaagtgtctggcaaaaaaagttagtggctggaaaagctgcagaggatgtctatgaaatgcaattgatgaacacacttttccccctgagctgctttcctgttaggtggtggaaactggtctatttcggtgatgtgtgctgacttcttcccttctggagcccatgcattgggtgcctccaggtttcaaaagaatgaggacaaattaactgttcttctaaagtactaatgctgcaggtccttctgaaataaaacctttgcagaatggaaaatattattgtcttcttgctttcaaaagttacttgtttacctgttgctcataaaatgcaggataatttgtggttgggaaaaggtattctttgcctgatgggtttaatttcagcaccgtagacttccctgaagattacaaagctattctattgctacacatttatagagctcaccccgaggaaagggaattagtgtctggcattaccttcctgcctgccaattttacctcactgattcaacctttgaaactgatttaatcaatggatcagcacattattcaaaggtggaaatgttattacagagaagctttcaggagggtggatgattcgtacaggcactacacaggacttttaatcacaccacataaaagaagcaaatttgaatgttgcttatgcccagaattttgatgaaaagtaaaattttgatgaaacgtgaaaaggagtactaggagaagcccatggcttggatttatgttggcagacatttcttctgagaaagaaaactcagtatgttctaatgtaaagatccacaaaatccaaaaaccacaccaatgggtaagcctattgaaagtaagagagatgagaggttgaacatgataaggaagctgaaaagccaagcctgttcccaatagtcactacactccagtggaagaattctcagtttttgtgcagagtcctgcattttgcatagctcagttgctggacaagtgaatgatcattttcctcatctgtcaaatgggaatagtaatacttctcaaggtgtttgtgaggatcatcagatactaaggattttacaggtttttattttccttatatgatgtacacgttctttacattgaaaaaattatttctccaaactagaatcttaagttccatgggtatgatgggtctgataaagtatttggcatctcttttactaggtagatcccactcaccctgagttttttttttttttttttttgagacagagtcbcrctctgtcacccaggctggagtacaatggcatgatcttggctcactgcagcctccacctctggggttcaagtgattctcccaccctagcccccgagtagctgggactaaaggtgtccaccaccacacctggctaatttttgtatttttagtagagatggggtttcaccatgttggccaggctggtctcaaactcctgaccycaagtgatctgcctgcctcagcctcccaaagtgctgccaccctgagatttgacttaatggagcccatgggagatatagataccttgggtcattagcaaaaccttcaacgtaaagatgtatcaactctgagagaccctggctaggtctactaagttaagtggaagcaccacaacatcatggttaaaaggaaagcctttgtgttgagccaggtgttgttttgaatctcagccctcctgcttaggaattatgatcttgggcaagttacttaacctctctgtggttcaggttcatcattcaaaaagtaacaagcatcatactacccacctcaaaggggagcagaaattaaatgagattaagcatgcaaagcataggagcaccatgccgagcatagaggcacaataaagggcagttgagaggagtggcggcctggcagggtggctcatgcctgcaatctcagcattttgggaggccgaggtgggaggatcacttggttactttatcaaacccaccatacccatggaacttagattctagtttggagaaataattttttttcaatgtaaacaatgtgtacatcatataaggaaaataaaaacaagtaaaatccttagtatctgatgatcctcgcaaacaccttggaaattattactattcccatttgacagtgatcacttgatcacttcaagaccagcttgggcaaaacagcgagacctcttcactactaaaaatttaaaaaatcactgggcatggtgatgtgcgcctgtagtcccagctactcrggatgctgaggtgggaggattgcttgagcactggaagtcgaggctacagtgagctgtgattacgccactgcactccagcctgggtgacagagcgagaccttgtctcaaaaagagaaaagggagaggagtagcaggattgacagcagcggtggcgttgccccttgaggatggaaggtctcagtcatcttgaagtctgctggagcattagttccattgaacctctctttgagggagactatgttctttgtccttggccttttttgcctacctagaactggctgatcttgcatggactgctatagaagtcctttgtaatcaggtcgttgaggtcagataatcgagttccaatccaagctctgtcatttgccagctgtgtgacactgggcaagttgagttactcaacctcgcagagccccttgttctcagctgcaaaatgataatacaataattatttgctgcatagggttattgagagaatgaaataggataatccatgtaaaagtacctcaaccattcactggaacatggtaagtgcctaataaagatatcttctgagtatggaagcaagacttcattacatgtggtattgatttacaattgagtgcatttcatgatattaaaattaggtgagaattggtggtatgaaaatgcaaccacatcaccacaggcctcacacccatgcttcctgtgcagtctgtggaactgtgcatcaattaaacctctcttcttcataaattacccagtctyacgtatgtctttatagcagtgtgagtacagactaatatacctggaaaagttgagtgctctaggtcaactggcctgtttagtggcagggctaggattagactgtcaggaccccaagattccactttgtgacattgtcctccagagccattgccttcgcatactgattcaccttcctttctatagtttctgccctccatttaaccacttcttttgttcccctcaaatcccagatggccagccttttaggcctgcctttcttagatatgatatcaatcatatcatttcaaaatataaaatgaatttgttattttagttagttaaattaatggtgaaagattcatttaccaataattttgactgctcttcatttgttctgggatccctgtagtaatattctagctttctccatgcaagtgaatgctgtactacagtgattttcaaacattagttgaattagtttcaccttggggtctggttgaaaatacaaattcctgtgccccatataacaggattctggttcctgagtctgggccgaggctcagaatctgcacttttaacaggctttgccacgtgagtctaaggctagtggtatatgcagcccacacctttagaaaactgcttggctttgagtcagactgcctggcttgaaatccaggctctgccattgactagctggaagtccttgggccttggtttcctaaacttaaaaaggagaataatacatactagtccatgtaaggttgctatgatgattacatgagataataaatgtggagcacttagtattgtgctgaacctacagttggcactcaagaaatgttaagtaatattattttaaaatctagggccgggtgcagtggctcatgcctctaatcccagcactktgggaggccaaggcgggaggattgcttgagcccaggagttgaagaccagcctgggcaacaatatgagaccgtgtctttacaaaaaacattagctgggcatggtggtgcatgcccgtggtgccagctactcgggagactgaggtgggaggatcacttgagcccaggaggttgaggcttcagcaagatatgttcataccactgcactccagtctgggagacagtgcaagaccatgtgtcaaaaaaataaaaataaaaaatagaaataaatctattgaaacacacacacacacacatgcacacacacaaagtctacaatgtgtttttctggttattaaatggtaattagtgttaacagaagattctccttgcattaacacacgtgtgtctccacacgcattctttaaagcttagtgctaatgttctcttgtccttgaggtgtttgtgatcttcctcttcactggaataattgttcattttatatctctcccacttgtgcctcccatagaaggcattttgttctgcaacaaattctagtgagaattttgcatctctctcttccaggcttgcaagctgctgaaggacaggggagcagttgtagccatcctgcaccccaactcatacaccgtggcccaggtcttacccagtgcttagcactctgtagtacttaaaaccacacttgctatattcacctgaagttctggaagtgagaagcctcaaatgaaatactcaagaccagaatctctttactctttctggtctgagcaagtgggaggtgagagaataaaactgggaagtgttggatcttctctggcttgtttgttctgcagtacgattgggagaaaatgtccaaaaatgtagaattgagaagaacacccccaaaaccaccccagcaattactgttgttttaaaaaatcgtaaccagatggaagacatttcctgaaatcacacctttgtttcttggagaaagaaaaagcccattcctgtgagtgggtgttcattaacttggtaagtagggaagattgagcttggcctggaaggaggtggatttttgcaggggcactcaacagacaattaaataaggaggggcatttcccatcagaacacatgaaacaagaggctggttgaattttctgcaactgtctgcttgaaggtttatattcaatgggtgtcaccacaacttacacctcatagaacagggatttggtccccaagagatgtaatgcaaatgtcacatcataaactcccagactgccaatactgaagggattttaggaatcgtctagaataagaagtacagaccacccaccattgttttgttagtgttaccaaaatgtcaatggttgttcaaatgcctttagttgctgttttactgcatattttctgattccaaaatgattagtatttcttggatttatactctggctctgccactgactggctgtgtgaccttgggcatgtcagttgcccttttgggacttcatttccttttataaaaggagcaaactaggttgaaagatcttaaggttctttttagctctaaatatgggagagtctcccagaaatagaaatgcaccactcctttttttggaaaattcattctttcctaatgttgaaatgctggcagtccagtgagtcaggtaaccatgttacaagaattgtctcacaaattctgtaaggaggtagggaacaaagatacattctgatgtatgtttcttctattaaatctattttggtattccaagtgacatttgttcttgcacagcttatgcttcacaccaacatgctatctgtcagggcacacactgattaagacctattctgagaaaacatattctctgtgattgaaatccaaacgtattgattgttttatttccatcaggagagattgctttctatttggtgatggatgacaactcttcacacctctctgtctgccagctggacagaggatgacacaagcagcctctaagtcttgtgtgggctgagccattagctatgacaggcagctccaagccctcagtcacttcgccatggccctagcatcgtcaagtgagcaagattagacatgtcacagttgcaagatgatgcctaaaactgatggcttggtgaaaagaacctttaaaaatgacaaggccatcttaaaagctcctgaacagggtgggacatggaggggtttgagagcagagcccagctcggtgcagagagaacatctcgagtctgcactgtctgctgtttctccgtaccacggtgtgctagcaggaaagccttcaaaggattaaaacccaagtatttatgagctaaacataatgtttccctctctctgggaatgcccagtgagaataccacttacatctgcacagaatgattgcatttcgcaaagtactttcacatgcgttagctcattaaattcttaaaacttttactcgtgggaaatagatagacactacatttttaccatgttacaaatgagtaactaggtatgccctttaatctctgatccctgaccccacaagccactcttcaaggcttgaacccatggcttctagtccggtctttccatcatcctgaggtgctcagttattcgagcctgtagctaatgactgcaggacacataatcatagcaactcacatttattgaactcttactatgtcccagacacttcacataattttaatttaatcttcacaacaacctagtgaggatcatatcattattgtcatcggcattttacagaggaggaaaatgacattcagagaggttaagaaacttacccagggtcacatgatagtaagtgacagagttaagactgaagctgagtcaattgaaaagtagaaaaattcttaaccatgatgctctgttgctggcaactccctgtcccttaccctttccaaaaacattaagaataggaaaaaaaagaagagtgagttttccctcttgggctatgctagcaacagaggcccaaggggaaatgctgttttaarccaacctcttggaaagggtcattagcagctgacatgatgccaatatggaccaatatgtctgaaagcttgtttctgggtcttttgtggtctctgccattcttgtccctgtccctggcctccacattcctttccctctggatcctcagtaacattgtcatcctactttggacatgcaccactctccattttaggtgagatatgtagggttattgtaaataaatatttcagaatcagtattatttattccccacctatttctgaaaaggatctgaataaaatctgtctattaagtaatttgaagtttacaaaaagatctgaaaccttgtggaagaaagtcaagggagaagaagacatgaacaatggttctatcaagaacttggggtggaagtcatctcacacatttcataagcactgtgaacctggccctgggattgccactaaaaatacagagctgagtaaaacatggctcctgccctcaaagagctcaatatctagtagcattagaattactgaatttgaacattcaatttgactttgagttcaaaccaagacaataagtgaaacatgatggattatctagtactcatctgataaatggagtagtgtctgttcttcagaagacacaagctgcttataatgctgaataataatgatgaattatttcatatcagtaatagctaatattctttgagagctcatcatgcgccagctattgcactaagcaatagctgcattatcccatttgcatgcattatcccatttaatcctcacaaatgtcttcatgatgtatgcatataattacccccattgtacagatgaagtaattagggtaaggaggaattaccttgtggatccataagtaatacaaggggtgaaaacttcaatggagtttttacagaagattcagacccgtatttcataaggccagtgcacacatttctcggccatttctgtcttccctgtcactctacgggaagtggctatgaatatactgtctccaaaggctgtgactgtagccattgtgcttcggtattgccatttgggacctaacggttcagaagatgtaataactctccttgcatggaccaattacagaaaaactccctttgtaaagcaacagcatgagccagaacaggcacttcattatctgcctctgcccacagggaagtagagacgctggcgagaggatgattgacctgggaaatggcagggcttgggatccatgctttcagggtcaaaggccttcgtgcccacttccaggattggcttctcaggatgccctggtgctggctcgccccctgctggggtgggctcctggggtttctctctcagtgggatcccattggcagtctctcccctcccacagcagcaggcccattgacttctgggcactcacttcccaggacccttttcagtccctgagaatcagaagttcttttcactctgagagtttgcagacggtgttgcaccaagaatggatgtactttgcctgtagagggctttaatctagtgaattgtgctcagacagataaagggtaattttgcttcattttctgtacctttctgaaagtttccagggtcagttagccaggtctctgcaggcttctcagctccaaagcagaggcaaaagtctttttccaccatttattccttgcatatatggaagattcttaggcaaaaagtgattttttttcacccatatcttatcccagaaaacaatgccctctttttagttaaactgaatgactacaaatcatatcaccccaaattgagtaattgcaagtcttgttagttatcaaggttttattgagccttatttcagttgcttacatatgtttttgtttttaaagaaaaaaaaagtgtaacgcctttggcccgggcctcaaattcctttttttccctcaggcaagcacgcttacaagtgagggattcccagcctacaagggtgagttatgtgtgttgagagcagagtggaaaggtgggcatttactcgccctgccccctccactgaacycgaagtgctcattctctcccatgcctgtgtcctctctctcttcacacatggtcatgtatacacacagttgtacatgcacactttctccttgctaaaacttttctttgctctgagtagatgcagtccgttctcacactgctacaaagaaatagccgagactggataatctataaagggaagaagtttaattgactcacagtttcgcagggctgaagaggcctcaggaaacttacaattatggtggaaggggaagcaaatatgtccttcttcacmtggtggcaggaaggagaagaatgagcaaaaggggaaaagttccttataaaaacatcagatgtcgtgagaactcactgtcacaagaacagcatgggggtaaccgcctccatgattcaattacctcccaccaagtccckcccatgacacatggggattataggaactgcaactcaagatgagattttggtggggacacagccaaaccatatcatctactctctccctggcctcaccccacattactgctctggtggccaatgctgtagtcacgaattctgccttttctcatgtctgccatttcaaggagctcaccccactcacctcaaaaaccgagcttttatagacgcagaaaactcttcctcctatatgcacactgattgatcacctacacatgccatcaagagcatgtactctggaattagatagtagtgagttggagccatgtctttacttattagccatgtgaccttgaggatactacttaacttctctgagcctctacttcctcagtgaatcataaatagaacctacctcataggattgttgtgtggggattcagtgaaatagggcatgtaatttagtacagtgcctggcccatgtgatcaataaatgtttgctattatcattaagcgtggtgatcttagctgattgtattgttgttgttgttgttgctgttgaagattttgcatcttctaggttatgtttctttgctgctcaggaggcagaacaagtttctccattgccaaattgtttgcttttttttattggggtgaaattcacataacataacattcactatttaaaattatactattcagtggcatttagtgacactcattatgttgtgaaattatcaccactatctagtttcaaaacattttcagcaccccaaaatgagacccgtatgcattaaacaatcactccccatcacccccacctaccaaatctttttttaatgttgctttcagatcatatgccattccataaatctgagaagttcaggaaggctagatagtgagcttttttccaaaaatcaatcagaaacatattcctaaataaaagaaatatactstgatattctgggactgccttatcagagagtgaagtgaaaaatcagaagtgatatagtctcattcaggccaacacagaaattactcctttaatacttattgcccatatttcacattattttctttgcctggtagctgagagagaaaaggagcttgaaactttgagtaaggggagggaaagattttctaaaccccctataaacaaatgatggtaaagcctaggaagaggttagcaggtcagcctctttgcatttaatttccatcttgccacattccaaggaaggaattttagtcttgggaggcaccaaataaccctcaggggaaatgtgaccctttgaagctcctggttgtctrtttctgcagctgcccatctactcacaccacccaggttggaggggcccagctcttcagcactcaaatacagtggagctggccacttctttgcacggggatggtttataggctttctatatcaggctgtgtgcagacgagacaggcttgatgagtcagctgaaaaggggaaaggaggggaactccagttggcttgatgctcaagtgagaagtgggaagaaggaccaacagttaagaggactcggtgaaaatactacgggatttggcaaatgtatgtgaaggcttttgtaggtcagccagtttgcccttggagctgtgggcctgcctgagaaggcttttgttggccttgggagctgaaagggagaccctttctttaggctctgcaggctacttggcaatcaatgttgaggcaggttttctgcttctgtggggtgcaaagctttggtcaatgtcatcaagagcatcctcttcttaggaaaccatgaccttgccttgggcaacttttctgtagcctttaagaccagaaaagtgagtagagaagactaacgtaattggacaaaccttgctttgatgggtggtgattgggactctcatatgaattccagaaggaaatatatgaagagtgtctgtaacttgaatgtgcttcctctgttgggtcttgcattaaatcactgatctgcacactttagcctgcagcagaatcacctggcgaggaggtgcctgttgaaaaagataagaagtttcattcagaaaagatgaccctgaagtaagtcttctcactcatttctatttattcacagttcctactttactaagaaagtttttaattattggccattatccgtgactgaaaatacattaagtaaagttgcaggatgagttttaacatttatgagttaacttcatccacatcagtaaatttgacaagtatttttgaagacccatctttgggttttattaaatagaaatttctgaaagttgtatgcccaagggtattttgtttttctcatgtgtgttcaaatttgggaagaatgaattttgcctcctattcactcggtaggagatttagtgtctccttctgaattagccctttctgttcctgaaggaaagtatttatgaaaaatcagactccattctggaaactgaatgatttttgtattttgctgcagttagatggagtcctataaatgagcccaaaacatgctggctaaatctctcataaaaggcaaatatcacaaagaggaatggcccaagtcttattttggcccctggcctgtgtttgtctaaaaagacttttagaagtgtcacaaaacactaaagcactgcctaaatcatcccttcctaactttttgcttatgggggtgcaagggaagttgcacgtggtgggtgggggtgctgagagagagagagagagaacacaaagggccagctcccacttggagctcccctcgtttctctccattttgctcttcaggatgtccccaccccactctgcattctcaccacacccacacatgaacccagcatctgcccaggtgccacgaatcatattacaactttgctccctggcagagagtggccagagagaagtttctggaggtgaggaagtgagcctgcctgactgctttggtggcagaaaccaggggcttaaccagtgactctgtgctcgaggcttgtttgtgaaatcctttagcaactcttcagaagcctctcctctctgacttctcagagatgctggctcttctactttgggaagttcctttgctagtaacacatttgaggtgagttaaatgtcttcctccttcagcctcagcttcctgtgcctaagggtgagttaagcaattagtcctaaatagccccagctgttagggtttctccagaggatgctccttgtgactttgattgcttctaatgaggctattggctttatctgtaatagacaatgttagattacacatctatgtcttttacagcaccttttacccccagggctttacgttttctgagaccactcttgagaaccttggatccagtggcatttttcttcttgtgaataaaaaattattatctttcctgttctccctgtgagatcagccttgttcttgttctgctctggggtactctgtatttagggaaattactcatgactctcgggtactgaaaagmcacacacacacacacacacacacacacacacacaccatgcacaggggaatgggagagcaagaacgtgtgagagagagccacttgaagagagacagggagaaagaaagagagtaggagaaagcaataaagaaagcgagatcacagtcaggcctgagaaggtgacagcaagccagtgttttagaggtagggaaagagcccaagatggatggagaaagctcatgcaggagcaagagagcacacatgggagtgccagcaaccttgaaaaaaagcaccagtgacagcaaagggaatctatgaggccaggaggctgggcgagcaaaagcaagagagtgcaagagatcaagaaagggggaaaggaggtgggagagggagagcgagccttcagggcaaaggagtcaatgagagagatcagcacattatttgtgggcagatgaagagaaagtctaaatgaggagctgctttcccctcatcttgttgagttggtggaagaggaagagaagatgcacagggcacagactccagctttcattaatccaaaatggaatttctgggacatacatgctcaggatcaatgtcatctttaaagacccagattccaattagaaccacaagtacacctccccatccttcagtattatttgaaattttagaacaactgccattattctacacaaagtaaaggatgatcattttggagtatgtttttatcaaaccacctccctatccacagacctgtgttagacagcttaccttagtggttgccaaacaccagaagtagatcattgtcatgattttggagggctgggccgaggcctggaattctatggctttaatacgtggctccattgggagattccattgcccaggaagacactggccttaagctacaccctttttcagaaagcagtaacaaattcagttggaccactgacctgaagccagattgctttccaacaaggcccaaactaaagggggtaccaaaaaatcagtaatcaacataaataacattttaatgatatgattttttaaaagagaagtttctacttatgttgcccaggctggagtgcagtgtctattcataggcgcgatcatggaactcttgagctcaagtgatcctcctgccttggtttcctgagtagctgtaatgatatgttttaaagacttaaaattaatgtagacaaatccaaaatgaacaaatatcaaaattttaaatacagtttccaactctgcccttgcacacccctgcctctcttgacccaccctaacaccatccttggttccagttaaactttatatacagaatcaggcagccatcctgtgggccatattttcttgacttaaaaaaaaaaaaccattgccttaaatatyatttattcaagtagaatccaaatcttgtttgttttctaatactgtttttcaataaaagcaaccagggctccttggagaaatgaccgattccaggactgaggcagaaaatacacaagataagcctggaacatcttgtattgccagaaagtaaggaagtgttaacaaatacacaaacaaaaacaaaaagcagaacatcacaggagccaactaaaagagctaccaacagccaaaggtataaaaacttgagaaaatatactagtattattggactataacccaaagtataaaataaacatccaagagtccatactgatataattaaatggttaaataaatggatgatagacacatcttttgtgcagggtaattccaaataatttgtgtagattctctgccctcaaggaggtggagtgtaactcctcactccttaagtatgaactgcgaatagtgacttccttgtaaaagagtatagtatgggccaggcatggtgccgcatgccggaaatcccagcactttaggaggttgaggcaggaggattgcttgagaccaggagtttgagaccagcctgggcaacatagtgagactccctctctacaaaaaaattwaaaattagccaggcatggtggcatgtgcctgtagtcccagctactcttgaggctgacatgggaggatcacttgggcctgggaggttgaggctgcagtgagycctratcatgccactgcactccagcctgggcagcagagcaagatcctgtcaaaaaaaaagggtgcaggccgggtgtggtggctcacatctgtaatcccagcactttgggaggccgaggtgggcrgatcatgaggtcagagatcaagaccatcctggctaacatggtgaaacccagtctctactaaaaatataaaaaaattagatgggcgtggtggcaggcacctgtagtcccagctactcvggaggctgaggcaggagaatggcgtgaaccaggggggcggaggttgcagtgagtcaagattgctccactgcactccaacctgggcgacagagcaagactccgtttcaaaaaaaaaaaaaaaagtgcagtatggaaagggaaagacaagtatccttaccatggattaacctgacaaatactgcctcagccaggtgatcaatgtgaacatcaccaatcataaatcatgctgattgtatgtgtctttggatatgatgagatgcgaatggcactttatctctgtggtcttcttccctataatccataaccacagcctacttatgagaaaaacatcagaaaaattccaatagaatgggattctacaaaatagttgaccagtactcctcaaaattatcaagtcatcaaaatccagaaaagtctgagaaattgtcacagccaagaggagctcaaggatatgtgacaactagatgtaatgtgggatcctgcaaccgaaaaaagtaaaaactaaggaaatctaaataaagcatagactttagttaataacaaattgatattagctcattaattgtgacaaaggtaccttattaatcaagagatgtttatgtgggaaactgggtgtggggcttatgggaactcattgtactatttcacaatttttctagaaatccaaaactattctaaaatacaaaacattctttgaaaaagtatcttgatggctgaatgttttggtgcccccttaaattttacacacaaggtgagcaccttgcttgcctcaccttcatcctggccctgctgtctgagtgcaaaatacatttgtagcactggatttcctaggagacacctgttgtattagtctgttctcatgctgctaataaagacatacccgaaactgggtaatttataaagtaaagtggtttaatgaactcacagttccacatggctagggaggtctcacagtcgtggcagaaggcaaaggagaagcaaagtcacaccttacatggtggcaggcaagagagcttgtgcaggggaactcccatttataaaaccatcagatctcatgagrctyrttcactaccacgagaacagtatggggggaacggcccccatgagtcaattatctccacctctccccatgttgacatgggggattattacaatcaaggtgagatttgggtggggacacagccaaaccctatcacctgtacacactgcattctctttatttgtatataaataaatccatagtattctttcctccacaaccttctccttagcataagctgaattacattccttggcttctgacaaggaatgaatttagatgaagctcagtgtgcacttcccaaagttgcagttgtacagccctgtgaagagaagaggcagtggttggaagcctaagycacagaaacagagtatagtccaagaaaggttataatgctgtgcccagcagccagagcttctcctgcagctgctttattcctgccaagcaaagccatgagcttctcctgcagctgatttattcctgccaagcaaagccatcctcgcaaagagcattggcccctctgctgcctgggcctgcctctcagatagagctctggaagcctggacctttgtcctagaaaatgacatgactaaagtgggttttgtctttcctgttgctctctttcctcctttccctcttttcacatcaataccaattagagaggacaagtgttcaatcaagacataatgtcataggcacggacttctcctcactgtcttcctcagggcgaagaagctgccagcctggagcasaaagctgggtagagacactgctttaactttattccctcagggaaaactgcagccatgaaagtacaacattgagctgacttgacttggcagaaagatgtgttttgcgaggaattgggatctgggagaaggtgattctgatactaactcacagagcataccatcccatttctgatcagcgtctgcgtgagaagatcgttcaaagctaggcagtctgagtctcattggaagaagtggctaaatctaaatctggtgtcagttctttttttttttttttttttgagacggagtctcactatgtcacccaggctggagtgcagtgatgcaatcttggctcattgcaacctccgcctcccagattcaagcaattctcctgcttcagtcacccaagtagttgtgaccacagatgtgcgccaccacacccggctaaattttgtgtttttagtagagatggggattcaccatgttggccaggctggtctcgaactcctgacctcaggcgatctgcccacctcggccttccaaagtgctgggattacaggcatgagccaccatgccaggcctggtgtcagttctttaacagttccaccacatgggatttagcaggggaaatgctgcagagtgaatgccagagactttgtccagtttcatgtatatgaccattggctctggtttcagagagacttgggtttgggtcccagaatttcttaattgtgtgacctgggcaagtcatgtagcccccacagagccacagtgtctttatctataaaatgaggatgctggtagagttgctgtgagattaaaggagctaattcaaacactcatcccattgcctggtgcaggaaaggtgcctactggatgatagctctcatcgttgaaactctgaagcttgggactggggtaggggacacttccactagagtacagacccaggaataactctggagacatgttgcaggaggcctgccagctttgttggagtgtgtccttcgtgctggttaatacatgggaaatggctcaggaacaatagcttgctcttgggagaatcccggaagtgacagtgtgaaaaatgatggttttccaaggtggtattccctagggctgagatttcttgtccttccttttccatgctcacaggaagaaggggaggtatttggtcaagaaagggtttccagaagaaagtggctcagagtcttgctcctccttcctcccctgtctgtaaattctttgcatttggaatgtgtgatgacccctgtctgggctttgcactcagatccctgggagctaggagcagccctgagaatgggcagcatcctgcatctgccttcccaggtgcagtcctgagaatgtgctgatggagtttagttttaatgacaatcataactccagaggcctgctctttactgtttttgattgtgcagctgaagactagatgacctcattgaaaagtgggagacagaagcagctgttgccacaggaaataagcccccccgccccgccccacctcaggagacacactgcttctaagagttctttggagtgggggtggatccagaatggcagctgtcctctacccagatctttctttgtgtacccagaggttgggctgagctgtgggtgactagactgtggattaagaaaccatgaatagcgtttccagaacaaattcttggcctgtgaaatctccatttagcttgctctaccaggaccacatgtgtctatgatttgcctcctttctctttttggattagagtctgtgccctgcacctcatcccctggttaagctaccatccctcccactgtcggcttggagctggtttgctatgctgtcaaagatctgagtagcaacagatcacgcagcctggtgtttgtggcttattacatactccccaccttggctgagtaaaacatcaagagagatgtactaagcttccaagcacaggggtgaatactgaagccgaaggcttggtgtactaatggtgtaatttgaggtcccagctacaggttagaggtggtggggatttagagacaggggaatttcctgggtatttgttaaattgcagtatcctgagagctcctttatcttctgtagacaacattatgcctgtttggggaacttcacacatatatatccacgtgattctacccagttcccatacccttggcccatcacaccacaaaataaagtgctggagccaaagaaactctaaacagatgtctttagatgaaaacaaagctagcagcactactgtacagcccacatattgttgtagttttaaaagtagattgttgtggcttttggtttacttgctcactccttaccccatttcctgttggtgtgatactgaccagcaaagtcgcctttgcagcgtttccttggatctcttttttttttttttttttttcttgatgggcatctttcacttctaggaaaaccaaacaaaaatttcctccaaaaattcaagtcagtcaacatttattgagcacctaacaggttcatggtgttgtaccaggcactgcaattggagaagaatgttacaagtacacatgcccaaactcgactgtgtccagtctggagagaaggctggatctggccccacagattgtggtgggagactggctggggatgaggctgttggctcttggtgttttgcaggaaacttcaagaaggaagctggggggtgtgtcctccctaggccccccaccccggttaatttgctttgtttctgaaacacactgaccagtagctaaatgggcctagctcatgttcagggctgcgtgctgaaacttcattagctcttttcaaagccctttcctattggtatagaggttcctcttaacactgccagcttccttgaaaggtttttcagctgctccttatagaatcacttcgaattaaaatgcttcattccaggggagattttatttacagccaagcaactgtaactagtagcactccccccaccaggctgcagtgactatagatctttgatactgctgaatgactctgtcaagggttccaatttgcttttatacaagtgcatcacccaattcaaaataaatgcatccagactcccttgtcctctcccaacccccacacactattccatttcccataagcacgtggcctgcggctcaggggtgtcagtcacttagccagctgtctgttgcctgacacagacatatcaagttggttcaccttaactaagtgattgagcttgattgccaaccatctggtgagtttagttaagggaattgtgatttctagaccagtctaacacggccaaatatgtacctccccaagcccccaaaacaagtgtgtctgtgggaccacattttatttgtacagttacagaattttatggctggggaggactgctttccaacttcattgctgaagtctgaatttaccccttcaattcaagctctgaaaattttatgggctgagcccaaggctaattgttccaatattagatgaagcccctgtcctcaagaagctcacagtcactcagaggtaaaaggcagtcaccacttggctctaatgtaatgtaataagtgccatggtagcggcaagaacaaagtgtgctgtgagaatccgaaggaaggatggattactctgcctgtgaggggagagggtcaggaaaggctgctcagaggaggtgatatttgagctgggtcaggtgggaaggctattccaagcgaggagaactgtgtgagcaatggcatgcatgcatttgccatatttggggaatctcggtttagagatgagaggcctcccatgggcacaggttttccagagaataaatgaaatcaagagtgtctgaggctgggaacagtggcccacgcttgtaaccccagcactttgggaggcttgcctgtgttatatgcctttggcaggtggattgcttgagcccaggagttcaagaccagcctgagtaacactgcaaagccctgtctctacaaataatagtaataataataaatcatctgcatgtggtggcacacacctgtggtcctagattcttgggcagctgaggtaggaggattgtttgagcccaggagatcaaggctgcagtgagccatgattgcaccastgcastccagcctgggtgacagagtgagaccccgtctcaaaaaaagagcatctggctgtagaaaggtttttcccaagtatgatccaagcgttaggactcagctccatcctggtcagcattcgtagatggccaagtgtgtgtcattgtggatggctcctccctgggcaccaaaggttggtatgtagccaccttcctttaaattgtggcaacagtggtggcagccaaggacagctgctttgtgggagagaggagttaaatgtgagaagatttattttggttctattaccagcggtccttttctgagtgaggcttaacaagaggcaaacgcctaatgacctcctgagtatcaccaaagtgttcaagataggcttgaaaagccaaagaagatgaaaagaaagaaagaaatcaaagggtccttcaaaagaaaagaagtagacagtaacggctataggatttgggatcactttttccctgcttggcaggttggaattgcagcttaggtatgttgaagggtagttcccctctaatggtattattgatactagactctctgttcccacagagagagctatgttggggaagaaagaaaatatttgatgtctgattcatgaacacgctaactggcccatgcattgtggcagagaagtaacagctttattttgaaaaatgtcaaccttttaaaaaaaaatcaaagaaaataacataggatttttgtcactcatggcatgccttccacatggctttgttttccaaacctggccagcctgcagtttccttcccatagtggggaggagaatgagcctcccacctggagagtgtggagccccaagaagcagcatcctctggtggtcccaacatctgcaaatagatgagacagctgactcctctctggctggacttttgtttttgccctgtgcctgtctaaccttgggcaagcaaaagatctgagagcattagggctggaaggggccttggagaacattgagcccaacctccctcccccttgtacaaatgggaaaactgaggcccacagagagggagggacttgctcatggtcacacagccatggagatagagccaagatttgaactcagggttctttcttctagtctttgcaactatgggctgcagtctctctcagcagtcccaagcagcagattagtctcctggagaggcaggggcatgctttaattgctgccaatagggaaagttatagaaaagagggacagacctacttgctgctctcctcccttaggtaaacagccttgtctatttctagtcacatttcccttccagcgagctttcctatgttatatgccttgtaagtagagaatcaatgaagttcctcagttacagaggagattcaggtggacaaagccatgttatagacctaagtccccttgtggcacaggttttgtcctcaaaccatcatactgaggcacagttcatgcatcacctcctccagggagcatttcctgatttccaagactgagttgcacaacccctcctcaccttagcctttatcaactgtctgtcatggttgactcatctgtctctttctctgggctttgaacttcttgaggacagggaccttgtcttctccatgtcccaagtggatagcacggggtccagcccaaagtagacaatcagtgttttttaaatgaccgaggactcagattcccatggtaacaaaagtttgactcttgtttcctcggtgaattgaaaaaccaaccactgtaggtagggaaatgggaaatccaaacgagttgtttgttattcactgggcaggatacttcatgggactctgctagctcaagtcctgaagagccctgctctgtggtggtatgtctgccataggcccacctgtgcaatccctggtgggtccatgggattgtttcgcttggatgtctgtgactgtagacttcaggaacaggatacaggttgttcaatagatttcagttagactgaaaggccatggctgaattctgttgtccttcacctaaacattattggagggaggcatcttcctaggcagagggagtgaggtggggattggctgattatgaggaggccagagcttcaggtcagaatgttttttctcatctaaatgtattaggttggtgcaaaagtaattgtggtttttgcccttaccttttttttttgagacggagtctcgctctgttgctggagtgcagtggcgcgattttggctcactgcaagctcygcctcctgggttcacsccatyctccygbctcagyctcccaagtagctgrgabhacaggcgmcbgycaccaydccyggctaatttktttktrtttttagtagagacggrttttcaccgtgttagcyaggatggtctcrayctcctgacytcatgatccgcctrcytcrgcctcccaaagtgctgggattacaccgtgcccggccgcccttacttttaatggcaaaaaccacattaacttttgcaccaatctatagcttggttttcattctctggccttggagtaagccctacaggtttacatgcaaagatattcccattcctaaaagccgtgtaccgtaggatcctgggtcattggaggcagtatcttttacttagactcatttgctccaggaaagtgagcaaaacatctctttttttgtactgtagccaaggctgttgtaggaagcgttgtctgtcattctcaatgctgactgcacattcaaacctttttatgtaaagttgaaaattcacctaagattttaagtaagaaaaaaacagaaactgataccagagttaataagaaaaacaattgttgctcaggccctactcataccaattgcgtcagaatctcatgggtcagccttggaaacactctctagatgttttttaatatgcagccagaattgagaaccactgatctaagtagaaggtgataatgtgttctcttcttgttctcagttactttctaagggattctaaagccagtgacccttgaaaccagaactctcaggattttccccaactctgtgaaggtttgagacacaacagattttgagagaaatactcattctgctctcacctagagctttgcttcagtctaagttgtgtctgggtccacatcaagcacatgggtaagggtacaaagtatttggggaaggcaattctcttcccactatgctttataaggccccagacactcataattttgacttcgatttcattgcttgggcagagtatctagtcctttctcacagattacagaatttcaggtcttaaaaaaaaaactatcggggctgggcgcggtggctcacgcctgtaatcccagcacttcgggaggctaaggcaggcagatcctttgaggtcagaagttggagacagcctggccaatatggtgaaaccctgtttccaccaaaaatacgaaaattagctgggcacagtgatgtgctcctgtagtcccagctattcaggaggctgaggcaggaggattgcttgaacctgggaggcagaggttacagtgagccragattgtgccactgcactccagcctgsgtgacacagcaagactctgtctcaaaaaaataataataaaaaaacctgtggatattttgctcagtacctgggtgatgggatcattcttaccccaaacctcagcaattacacaatatacccaggtaacaaacctgtacatgtaacgcctgaatctaaactaaaagttaaaacaaacaaacaaaaaaacccaaatcataaaaaagttacctccaaagtacattcataatagtatagccagagcagttctaagtaattttaaacggtgagtgagagaatgtttgatacctggcttccattcattcattttctttggtctgaatgtgtagtgggcacatggtggaaacagatctttgactttggggcttttgaggtttgaggcttacagagagagccctcagtaggaggaggggtgtgtttacataaccctggggcaccctgtcaatgtattctgtgcagccaaacagatcaatagagtgaaaaaaacaattcagctgagtgaactgataggctgataggttatttgattgactgggctggtggagccactcaagaagaaactacagtgctataacttgggaggccagataaacagctgatgccaaaagcatctgcttagcaatcactggagcccagttgacacaagctattggaaccacatttgagtaaaaaagatataaagtgcactggggtaccatgactatgggtgaatcttcttcctcatcatactgtagtccttcagatctcaggggccgtgtagcttattacctccaagtttcttcttaaggagagaagagagcacagctctgtagtgactctaaagcttctcagctgtgtggacttgagcaagtgatttgacctctctgagcctcagttgcttcctccagccataggagtaaatatattatgtacttcatagggttgatgggagagttcagtgaggttagacacagaaaatgcttagaaaaatgcttgatgcatatacataggaagcatctaataaatggtagcattgatgattcttataaaatagaatgctgcaggccaggcatggtggctcatgcctgtaatccaagcactttgggaggccaaggcaggagatcacttgaggccaggagtttgagatcaacctgggcaacatggcaagacccgtttctccacacacacacacacacagacaaaattagccaagcatggcagcacacctttgctcagtacctgggtgtcacagctactcaggagggtgaggtgagagaattctttaagcccaggagattgaggctgcagtaagccatgttcacatcattgcattccagcctgggcaacagagtgagaccttgtctcaaaaaacaaacaaacaaacaaacaaaaaacgctgcaattggtgcagtggataggacacagactttggtgtcagatgatctgggttcaaattctggctctaccacttcctagctgggtgcctagggcaagtcagtataaaatctcttggtaggtcccacttccctcgccctctctcatagctgaagggtgaggtgaggtaagcctttagcaatgggcttggtatgtaagtggtcaataaatgctggtttttatgattatcaatcgccatcaatatgatagttactgggaaattgccctagttcttcagtcactcctcagtaggacgcaatttccttagtgctagtcattgcagtcccctttttttggttgtgttttggtttgccatttactcccatgtggagtgtgggatacaaaatgaaccctagatccatgccctggggcctagccttttcataaccctgccccactcattcctgtttgcttatgcagagcttcccgtcaatgaaagccccaaggtcctattgtaaggcctgctgtgaaaccaggtctcccccagcttctagctaattgatattctaaaaccttggattgcagcttgacctttatccttgtcaaatatctcttgggttttggcccatgattccagccagtcattggctctttgtatcccactttcttgattattttggttgcgttttttaattaggcgttgtgtgttgcagagacacatgatggtgcttaatcatgccaccatctccctcattgctctttgtggttttgtgagtcttgaattgacatgtgtgctcctcatttagccttcctgaaaaccctacctgctgcacctatactttcaaacatgcactgctggtcatctggaggcatttacctgaaatgttaccatggtgcctagacaggactctataaggcttaccctgaactcctaaatcctttaagtgttgaggaatgtgagaaatgtgtatgattttaagtatttgtctgaacttcataaattagggaaattacgtagtgacacggaaagccagatatacatgtgtgacttgtggattatccatgtaattgtttccttaaatcggtgcatacaaaaataagagtcagattttgaatgggcagaaacacacaaaaaacctgtattgcacctgttgttgggaagatttggctggttacaataaggctagatgggctagatgaggatacacaacaatggctcaccccaatttggggaagtcctttttggcctttatgcaatgggctctctaaaggactagccatgtggtagcctgtctaggggtggggtacacagtgggaggagcccttattgatggtcttggggtctggaacccatttcctgctaggcaactgactcatcctgtgacttagggaagcaagccattgcccatctctgggtttcagtttccagagggtgttagattggaaggtttcttccagatttgaactttgactattttagtgacttaagagaaacagctgaatccaagtgcaaacgtctgtcttgcacctttaaaaagaaccaaaaccacattgtaggcaaacgatccccagtttgaaatagcagcttccgtctttggattgtgtcctgctgcccattctttctcagacctgcctggttccacacactggctgaccatacaagaccttttcatctcagcactagatgtgcacgtcttttttcttgactgtgctctcagaatactgggagagattttttacaatactgttactactgccatgaatagcacctaccaatgactgtgtcttgtgtgacaggcactgtgctgtatgctttgtgtacattttctcttttgatccttataatatcctatggagttggcattgttattaatcccttttacagatagagaggagggatgactcatggaagtgacacacagctagtaagttgcagacttagtactgccagatcccagggtcttaatgagtattataagtatgctttttgcatccctgggtggaacttggatgtattaataataacaacagtggcagtatctcttatacgcagtgaggtaggtgctgttatcctccattttatagaggaagacagcaaggctgagagagatgtggtaacttgcccaaaactgcataactataagaatccaagctgaaacgaatctgaggctaattgccctcaaacccatgctgttggccaggcatggtggctcatgcctgtaatcccagcactttgggatactgaggtgggcggatcacttgaggtcaggarytcsagaccagcctgaccaacatggtgaaatccaatctctactaaaaatacacaagttagccaggcatggtggcgtgcttgggatgctgaggcaggagaattgcttggacctgggaggcagaggcttcagtgagccaagatcacaccactgtactccagcttgggcaacagagcaagactctgtctcaaaaaaaaaaaaaaacaaaaccaaaaacaaaacccgtgctgtttcttctacaccatgctgcctttagggctagaacaagtcttaaagaggctgtgggtttgctttctattctctgctcccaggaactgtggcactgcttttctgaatggctttgccggcgcagctggccaggcttgggcaattcagggttcccatagtgcaagagcagcatccacccgactccatctcccagaagcatgcagtacttactgacaattgtatgcccaaagtaggtaattttgccttttcaagcacaaaaaggtaaatcaaattatacccaatatagagcagaggaaaagaaggaacaaatgaagtaggaagaaatgcattcccttctgtgactctcctcagccactgtctgtgtcactgtctataatatatactccttgcttttcatttccttgcatatcagtgatccatgttcccagtggtgtctaaaggccacctgtattcaactgttagctgccttgcatgtgcctatctctcagtttcagcagctgcttcctcagtttccctagtcttggcaggtaggagctttttacctaaccaatagaggattgccatccagtggtacatattgggaactgcatggctgaaaaaaaaaaagtcctgaatttttttccccctttctaaaggcaaacaccacccattcctcaatcctacttaagggattaactatgccctttcttctcttttttcttagtcttttgtcagctttgctgctcattagctcttatacaagaagcagagcaggagaagtaaatgcagggaaatacaaatcactgccggatttcagcacccccacacccccgctattgtgaatggtttgctgggagagaagctctaggaactgatggggttcagctcattcagaaaatcctgttctcctttggtattgatggctsaaaactctgattacatctgcagagcagtgtgaatagtaggttctaaaaggggctgatacaaaggacaattcacaacagattacgtacaagtaggtaataaacaaaaggcaaaaaatcaacttcacttgtaatcaatgaactgtaaattaaaactaacaagagaaattatttttgcatataaaattggctgagaaatgttaaaatcaaaattcccagggttgacgaagatttcgtgaaatggttgtttttctacactactgctgggagtcataaattactcagcctttatggagaacatgttgacaatgtaatcaagagaattaaaaatgtctatgcgctttgaccccatagctttgttactagatttcacataaagaattcatcagacactactgtttatgtctacaaatcttaactttccctattataatagaaaaaaacaagactctgaatgtctaaaaagtgtttcttaaactaaggcataatcataggctagaatattacatagcaatttatccaaaatcatgttcttagcaaatatttaaggatttaaggttttaggaaaacgcttatggcataatattttttaaaaaattctctcagggtacaaaactaatcatatctcctctttgtacgatataccttttttttttttttttgaaatggagtcttghtctgtcacccaggctggagtgcagtgaygygatcttggctcactgcaacctctgccccctgggttcaagcaattatcgtgcctcagcctcaggagtagctgagattacaggcacccagcaccacacctgactaatttttgtatttttagtagaaacggagtttaaccatgttggccaggctggtctcgatctcctgacctcaagtgatccgtctgcctcgrcctcccaaagtgctgcgattacaggcatgagccacaatttatagaataaaaaatgaggctaagggaatgatagtccagcttaaacayacagtcactactaagaaaatgattaaaagcctgtacattctggactcatggagttagaacttaaaaggaccttggagtacatctagtgtcagccccaccaatgccactgaaatcccctcggtgactacctgacacactggttcaggcagtctctctttaaatactgtggttaaggaacttgctcaccgcctctggcaaccgcttcttcaaagtaaatgatagtgataatcccatccctggtgcgcgtctagtgatttatagtctgtgaagcttctaaaggcacattttcctctcacgaaccctgggaggcagggagaacaagtacatttatctgcattttccagatgaggatcctgagttgaagtgactcccagtggtaaagtgacttgtgtagctggtggataagataggactgcagtccaggtttcctgactcccactctgaggcttgttccagccctccacaaaatccagggtctagtttcattcaagtatctccttttattgagtttatgttggtcttgctatagctgtgacccctcccatgatacctcatacatcgtctcttagaccttgaaagatgtgcttggatgtggggccacatgctagctagctaaggtccagagtagggtgaacatggaaagagctcagggggagaatgaagaaaccaatgagtccaccttgctgcaaattctagcagtctccacacaggaatctgcaaccatatttatgaaacgttgttttcataaactgctgcttgttcaataaggcataaaatagccagtataagatagttatttgctctacaatatcgtttctgcaacacagcttcaatgtcatagcagttactgcattttgtttagtttcttaagagatgtgacacagtagattaaccattgacatcaaaatgcagaggttcccttagagctgtcagcaatcttgttccattcttttcccacaactctgcatcccgccttgggaaagcatttgtacacttccactgcaaggtctagtcacagacccactcggatttgtcaatgtcatgggaaagcaacaggcaggaagacaactttctatgaccttgggatgctatctgtgagttaggcaaaggaagctgagattcagtccattactggttatccctgtacacggatggtccacatcccattccagggactatgaagaagggcaaggaagacacagtagagttttccttctcacagaggtggcaagagaaatacacaggaaaggaagaacaagccagaaaagacaggataggctgactcttccaagtgcagtgagagctctaagagggaggtgactcactgagggctgccggttcaggtcaggactaggtcagaaacctgctctggcctagacccaagggttggcagagaacagaaacagctcagtgggtttgagaacaggatgggcactggccacgggagccaacaccatgaggtcctgatcaaaccctgcaggcgtcttctctggtgcagaggcacctacttccaggaactcagtctcagaactcagcaggaagtcacaccagccctcccacgcctaatctgccagctgctgcagcgggcacttgcctgccctggctttggagccttcattcttgccctagtgggggcagggtatgttctaactagagaaatgccaaacacctatgcttgccccttccgctggtttgactgttttcccggaatggacctgagaaattcagtgaaatgattcaaagaaacaattagttgattccattagaaagttagtcaaactggtatttaagctgaatttattctggcagatgggcttgcaggggtagactcctgccatagttcctgaccatctctccccaccgtgttgctaaaggtgggaggaactagaagataaagggagggccccagtgggaacgaatggaaataccaaaagctttgtgcgtgtctgcttccatccagctgctaactgttgtcccactccattagcccaatcttgcccagtaagttctcatgacagcagtgcacatcccttcccaagagcaccagaaactgttgtctagcagatgttaggatacgtaaggggccaagtgagttaccacgaagggactctcaggtccatacattgatatgaagactaggtttgaagccatttttcactatgttcttcagtttgtccaggttcccaaagcccaggttattctcagtctaagatttttttgctcgactccccacagggtcgagctatgtgatctatgtcaagtggtacctcccttctgagcctcagggtctccatgtgtaaaatgagatcgttaagtcagatgagctcagtggtaccttacagctcaagcattcattctgtgaattcaggtttgtcctcttttggtccaaactgaaattgccttcatgggatgacccaagtgtcttgttcctaccaatattcttataaactcaattcttttctatctttttaattccctaccaatgtgggcatatgggtccactttgttcctttcacaaagaaaatggtctgcattgaggtttcttttcaagaggggcaaggaggaatctcgtatttatataagatactcaggcccatcacctgataccacccttccatcttaggtgtgtttgatcattcattcatgtatatatttattcattctctcattcagcaatatcaacggtgtgactacctcatgcatagtatcatggtgggcaatgcatatgcataagaatatacagcatgatcacttttgtaagatgggaggtgattcacaatgaaccctgctgccatcctgagctgtcaccctactggagtcactctgcgctactacataccacccctggcagagaccctgaaacttacaccatatcattagaaagacaagctacctgtgtttaagagtattgcaaatgatcaattcataggctaagcaatctagaatagagagtacttaaaagacgttaaacctaaaagaaaagaggaaaaattgtgcaaactaacagaagctatatgtgtgtgttttcattcctttgatgggacactcaggagactttgagtatcagacctagtgttaagagggctattcttaagacctttgattaaatcagtcaaacttggagtcagatgctttcaatgatactcttgtataattcttacccctttacctgttttacagaaagggaaactgaggccctatgtggccttcactataatgtctggttgcttagaacacagttgcagttgtccgggcacggtagctcacacctgtaatcccagcactttgggaggccgaggcgggtggatcacttgaggtcaggagttbgagabcagcctggacaacatggtgaaaccccgtctytactaaaaatacaaaaattagccgggcctggtggtgcacgcatggcatgtaatcccagctactcaggaggctgaggcaggacaatcacttgaacccaggaggtggagtttgtagtgagccaggatcgcattactgcactccactctgggtracagagtgaaactccaactcaaaaaaataaataaataaataaataaaagcacacagttgcagtgctgcaaaattcctctttctttaagggagaagatgaatagtgctcaatcctgatatcaggaaaagtcacaaggccctgggtctccagctccaacagttctttctctgtggcgtcctcgggccaaagcccagctatatcccagctccatgtgggcatccagagaaagcagaactggagaaagccttgagaccagccttcctgtttaagctgtagtgattgacaccaggaactttcctcacacacctttatttcagattactggcctactcagacctttgcaaccttcctgaccccacaggcatgattaactgcctgaattttttgtcacgggtcggttttcccacctggtgtcttgcgtgcttttttccttggaatttcttggaatctttacacgtttttgacacctgctttgaccttctagatcctggagcttttgcccaaaaggctctgaaacatgcatcttgcctatggagcccgcatcctagcctgccttacttgggctgccttgataccatcccccatcagtgtgacaatgatgattctgggcacgtacaagcctctttcccaggaagctggagcaccaaatgacagctgtgtttgagggatggctccgttgacaactgattcagaatattgacaagacttcattatgtttttgctcttgtgtttacatctttcaagtgtgtttgaaaaatcaagaaaacaatacaatttggtttcccaaattgaaatgacaatgaaactgcctttttatttatttaatttttgttattctcatatttctctaggcctcttctcacacacaccaccagccaccaccccccatccccatctccccaccaactttctttctggaaaagacacatcccattgtagctgtactgatctctagtcacatactgtatctttgcagatctctctgtcattgctctttctgttctcattcatagatgacacagctaaagacggtatccaggcctatgcaggtttggctgaaagggccaacatggcattttcttttcctaaagatggtgctttggtttgtagctgtttgctcctgcctttctgtttttcgggaagcctgttggctttgcttgtaaagagacagcctgtaaggctatggtgattgaaaccagtcagcccagtgcaattcaattcggtggaagaacactgagtgcctattacaaccaggaatctaaaggaagggggagattcacccttaccttgggagcccatgtggggaaatgcatatcttcagagaggggaaaaggctgtgagagttcacaagtgggagtgacttggctctctcacctagttttcaccaactctgaccactttatttcacctcccattttaaaatgctatcttgtcttggcttgattgatatgttatttctgtgattttttttcctgcttttcttcgttgctaggtcttctttctccctctctctaactgggatttcttagatttcttaaagacctcatggacattcctataagtatgtgttgccaaccttctagacccaccaatcagaaaccaaactcatcatcatgccttcccgttttgttaatgaagtgccacttttttgtccaagatagaaacatcactgtcatcttgagctattccgtcaccatcctttctctgccgtctgcatattaattgcaagttttcttgattctattaagaataaagaaatttgagagctgccagtaacctaagaggtgatctagtatggagttttcattgtctcagggagtcagaggattagtagttaagctgagactagaactcaagtctaagattcctagactgttgcttttttttttacttcacatgaccctaaaatataggtaaagttcatagactttagaaagaaatgactaagttcaagtctccactcatctctaccatttgctagctttgatcgtgggtaagtagcttaatctctgtgcttcatctgtaaaatgaaatgaaaataccttatgtaaaggaatggttgttagaatcacatgagaaaatagcataaaacacttagcatcagatggactctacatgagatcacctcagttccagatctactgctaacactcttctagacctttccatgcttactgttaaatcttatctttctaatatggaacatttagactctaaagctttttgctgttctgaatcctatggtcttaactatgtaaggaattcaaattgaagtagagtttcaacatcttttgaaaaagagagtttctgcaaatgttaatacctcagattagctcaaagaaagataaaacagagagctcattagtaagtacttgtgaggtacttccaaaattctgctttgttaactttgagaggcaagcaaaagagacccgtagctagtctagacttaagccatgtccagaaagagtggctgattggtttacttgtgaggtttgggtagggggaatagtatcatactagatatcctgtttaatagcctgttcttattttcacttaacaatatatcttggtcatgtattgtcaatgagcaaataactccttatgagccctagtgtacatgcacatttagtaggggaaccctaagagattggaaaatgcatgagaggaagagatttctggaactgcagggctgtctaaaggagtgggaatatccttggagccattgagaaagggacagagacagctgacatctttctgagagtagaggacaaagggaggaaaggtagaggaagaaggttgcctaagaactcatggctctaatgtccttggtgattgcttggcctaaaacacttcaagccttacaaactgctttttaagacaaaccagtgtcatttaaaatcactgctagggatagcctttctatgtctagttaccttagattatcagagctgaaagaacttcagagatctctttaaatgtaatatgaggaaactgaggcccagagagcagaggaatagttcaaagccctcccaatggtttgatccttggtagcataatgagcagcatattagctcattttcatgctgctaataaagacatagccgagactgggtaatttataaaggaaagacatttaatggactcacagttccacatggctggggagccctcacaatcatggcagaaggtaaaggagaagcaaagtcacatattacatggcagcaggtaagagagcttgtgcagaggaactcccatttataaaaccatcaaatctagtgagacttaccaccacaacaacagcataggggaaaccagccccatgattcaattatctccacctggcctcgcctttgacaagtggggattattacaattcaaggtgagatttggatgggaacacggccaaacggtatcaagcagtatttaactggttttgtgtgtgtggagagggaacagatgaatcatttgtattattattcctatgcctaacgaaactaagtcatatgtgtacttaagacagagaaccaaaaccttgatttttctcttgtagggggtggctaaactggagttagaagcctactttgcctgacctttttagctttgataaaggcaaccttgattcatgatgcatgagcctgggtctttgaaaccaataagaaatggtttgttcattgaacgtgcaaacaaattactttccaaagactaaaatttaaactgacattaagctccaagagcatctatatttaattatacgtaaaggccagaaaacaatttgtaaccttaacatagtaaaattaaaagagaaatcccacctatgcaaataatttatttcagtgcaacactaccctttaggattgccatcgtttgcctgtattagcagtgctggctttaccaatatttccagggcggccctgaaatatgagtttagattggaaaaaaagcagtcagagtagctcccagggcaggmtgatgctatagaaccacggagtgtgctggcttccccaatttccttttttttttccttttcttctgagacggagtctcactctgtcrcccargctggagtgcagtggcgcgakctccrctcactgcaagctccgcctyccrggtwcacrccattctcctgcctcrgcctcccgagtagctgggactacaggkgccyrccaccacactcrgctaattttttgtrtttttagtagagacggggtttcaccvtgttvgccaggmtggtytynatctcstgacctcgtgatccrcccaccttggcttcccaaagtgctgggattataggcgtgagccactgcgcctggcctgagtgtgctggcttctaacaagatttgcctcttggtaggaggaataataatgaaataccgtctatgataatatatttctctcgggatgtatcttaggggtcaaaatgtagtagaaggaacacaggcaagaaagcacagagatctgggtcctaaattggatccagagcaactcccatctccactctggccctcaggctcttcatctataaactatgaggcttggacccagtcagtgattacattggaagaaaagggagagaatgtgaaatgaagaggatgaatcaaataaaagtggcttcgttatttctgaatgctccctcaccttcctccactccttgacatacacacatgcatgcatacactagttttcccctcagttgagcatgagagtcagttcccctcagttgagcatgggagcatgagagtcaggatatctgggttctcatcccagctgtttcttgaactctctgtgtatcctaaagtaaatctcttgccctctatctctgttccccatctgtaggatgaggagagggtgttgggttttcattggtacccaccaggagtgtgtatatatgtacacacacacacagagtccatccccagctaactaaagcagggcttcccctggggcagggctctgcaggtctgtgtgtttcaatggcttcccaggtcactctgatgtgtacttctagcttagttccctggctggccagtctctgtgggccttcccagctctgccattctggaagacgaatgggcaattttaggggccttttcaggaactgtgtgtcctgctgctgtattctggtggcacagggattagctcaactgcattttcagctcaccccttccgagcagagtgatttcacaggatgggagctgtgcagagggcaggaggcacaaagaaacactctgtggagtcacaatgtggcaagccgccatgacgctgctcttaacctcccagttgttgcccacgtgggcttttcttgaactatgcaggaacctgattaaattaattgattcctggcttttcgaaaatccctctctggtgggttgcatgctgcttatcaagatgttctcgggaagctgatgccaggttaaattccttgcactgagaaggccagagccggcttgattcagacatggatatggtagaggagggagggcagcctgttgcctgcttttctttccttgtcgctttagcaaacatggagcattacaggccaaatgtgcttgctgagtggaaaccaggaggcactgagcgggtggctcagtctggaacgcacagggcgtagtgcttcttagcacagcttctgagcacagaggagactgcaacaaatgatagctgctgtgttattgtagtggcagcgcagtgtaagggaagagaagctccctgaagaagacttggatgtaaccccagctcttctgctcttcttgacttgcagatccaaaattctcagcttccttaagtttcttggtctctaaaatgaggaggctggactcaatcaattattttcaaacttggactctcagggttctgaggaggcaccctgagggctgcctcaggggtatggaaggtggaagaggaggctgagcaggcagaacccagaccctctaactgaccacctagagcctcaagaacaaactgccattcacatcatagtctatgtcaccagttctcaaacttttccatctcaggactcctttatactcttaaaaatgactgaggacctcaaagagctttggttcatgtgggatttatctattgatattgactgcattagaatttaaaactgagaaattttcaaaaatatgtattaatccatttaaaagaacaatagtacctattgcatattaacatatttttattaaaaataacctatttccaaagtaaaaaaaaataactgagtggcattgttttatattttgcaaatgtctttgatatctggctccatagatgatacatggattctcatatcagcttctacatttgatctgttgtgatatgttgtttcggttgaagtatatgaagaaaatccagcctcacacagacatatatttggaaaagagaggcccttacggactccctgaatgattctggggaccaccagtgtctttataccacactttgagaactgcttctctacctgaattgcactccctggagatgtacagtgcccatcctgctgggcaatgaatggcagctcttctctcactccctcccccttcactgtatcccctctttatttaaagcagctcagtttttctattttatataatggagatcctggaagattttatttgaaaaaaggagtctgcttctaaaagtgtttgaaattcacccaccttaatcttaggttactgaagatataaggatttggaagctgattgagatcctatcactcggatttttctcccctaaggatgcaaactcttgggctttgaggagggtcctttggcattgtgcctcagctcttcctggacagtgactggcatgtcatcttgacagtgacagtcttagcacatgaaaatgccactgaatgacttgaaagatttaatgccacttcacaatgggactgacctgcccagggagtgatacaggctgaaggtggaggggattcaatatttgttgagctgtctgatcactgaagcagagagatgggccataagggcaagtttcagtgatatacttctatgtcgtcatctttagagctagacattcatcatcattatttatttcctagatttatgtcgaactttcattccaagggacaggagccagtgttgaataccatgggatctaagtgccttcacaacccattgaagcttcctccaatttcttgtttaataaagaaggccgtgctcttctttcccttattgccagagtcattattgatttcatgttattccttttataaaatcacctcctgggttttcctaggcttggctcttatagccgagaatgttctctcctcagccttctgctgggcctgatgctgtgaatcccatctatgtgggtcaggggacaattccacagccatcttgccaacatgcccgcgttaggctgtgagcatgcgcagaagtactctcagagctgtggaggaggggaggctcccacacccgctgccttgtccttatttgttttgtttctcccaccagcctaggcattaattaagaggcccagactcaaaagcccaccgttagggtcaatcatttgggctaattgagtgtttccaatttagtggaactcttctctgaaagtaagaaataaaactgaatccctgggagaaaccggaacccttgtccattgctggtgggaatgtaaaatgttgcagctgctatggaaaacactttggcagtttctcagaaagttagagtattatatgatccggcaattctactcttaggtatatatctaagagaaatgaaaacacatgttcacatagaaacttgtacattaacattcatagcagcattaatcatgatagtgaaaaaatgaaaacaaccccaatgcccatcagtggatgaatggataaacaaaacgtgctgtgttcatacaatggaatattgtttagctgtaaaaaagactgacatgatgattggtacatgctacaacatgcatgaacctcagaaacttgatgccctaagtgaaagaagccagacaaaaaagaccacatactgtatgattccatttatatgaataatccacaatagacaaatccatagagacagaaaacagatgattgycaggagctgaggggagggtggaagggagagtgactactttacttaatgggtacaaggttttcttctagggtgatgaactagatagaggtgacagctgcacaacatgtactaaattccactgaattacacactttaaaatggttcattttgtgttacatgaatttctcctcaataaaaaattcaaaacaaatgaacaacaaaacaaaacaaaacacctgaatccgtggctgctaccctctttcgagctagtttctcttatgaatgtgtgtggaataaggaacccaagcctgggccgtgaactcttccagagtgggaaatgggcttccaataactcgtagacactcaatagttatatactattgagtatataactattatcatgtatggagatatcatatatggtttcccatattgctgtcttcactgtaggctcatggaaagcagggaccatgtcttattcacccttgaattccaagcgcctaagcaccattcccagcacataggagacaatagatgtttgctgaatgaatgaatgaatatgtttgtgactcctctttattcatctctaygcccccccccccaataatgctagtaatagttctaccacagctggtgctcagaacagatctatggatttgtcaagtgagtggggatgagattgttttagttttagtttttttttaaggttatttatttcaaatgaaccttaaagtaaacttaagttccataaagagtcatattggggttttgattagcgtttcattactattcactaaaaacacttttttcaaaaatgagatataaaaattggacaggatgtagaaaaataggagatttggcctatggagattcaaaaagagtaagagagagatctcagctttaataaggggatgagactgattagatgcattttactttaaaaaaaaattgtggatatctataaaatggaacattatccaggccatgaaatggaatgaagtactgataaatgctacaatatggatgaaccttgaaaacattatgtgagtgaaaaaaaagccagatacaaaaggtcactgttatatgattacatttatttgaaatgtccagaataggaaaatccactgagatggaaagtagatgactggtagtaggggctggaaggaatagccagataggccagggacagctaaagggtacagggtttctttggaggtgactgaagatgttcagaaatggactggtggtgatggttgcacatgtctgtgaatatactaaaacccattgtatactttaattggatgaattgcatggtatgtgagttataccttcataaagctgttagaaatttagataaatgtcagaaaagtaaagaatacaatttgaatcaaaaacaagtgtgactgtgttttgggagagatcttcatctaaaatataaaataactgcctggctagattcaaagggtttctctaggaaaagattcctttactttttattttttattattttttcatttttaattttaattttttgtgggtacatagtaggtgtatatatttctggggtacttgagatgttttggcataggcatgcaatgcataataatcayatcatggaaaatggggtatccatcccctcaagtatttatcctttgtgttacaaacagcctgattacacacctagttattttaaagggtacaattaaattattattgactatagtcaccgtgttgttgagatatcaaatactaggtcttattcattctttctatttttgtattcattaaccatccccaccttccccctacccccctccactacccttcccatcctctggtaactatccctccactttctatctttatgagttcaattgttttgatttttagatcccacaaataagtgagaacatgtgatgtttgttcttctatgcctggcttatttcccttagcataatggcccagttccacccatttgttgcaatgacacggtctcattcttttttatggctgaatagtactccattgtatataagtaccacattttctttatccatccatctgttgatggacaccttaggttgcttccagattttagctattgtgaacagtgctgcaacaaacatgggagtgcagatatcttttccatatactgatttcctttctcttgcatatatactcagcagtggaattgctggatcatatggtagctctatttttagtttttgaggaacctccaaactgttctccatggcagtcatactaatttacattcccatcggcagtgtatgagggttctcttttctccacattcttgccagcatttgttattgcctgtcttttagatataagccattttaactggggtgagatgagatcttattgtagtttttatttctctgataatcagtgatgttgagcaccttttcatatacctgtttgccatttgcatgtcttcttttgagaaatgtctgtttaaatcttttgcccattgcttaatcagattattagatttttctgtaaacttgtttgagctccttatgtattatgtttattaatcacttgtaatgtcagtagtttaaaaatattttcccttcactttattatattattatattatattatttctctcttcactttatttattatatcctttgctctgcagaagctttttaacttgatgtgagcccatttgtccattttgctttggttgcctgtgcgtgtagggtattgctcaagaaatctttgcccaaacaaatgtcctggaaactttccctaatgttttcttgtagtagttttagagtttgatgtcttagatttaagtctttaatctattttgatttgattttcatatggcaagaaataggggtctagtttcattcttttgcatatggatattcaggttttccagcaccacttattgaaaggactgtcttttccccagtgtatgttcttggcaattttatcaaaaatcagttcaatgtccatgtatggatttgtgttggggtcctctattctgttccattgacctgtctgtttttatgccagtgccatgctgttttggttgctatagctctgtagtataacttgaaatcaagtagtgtgattcctccagttttgttcttttygcttaggatagttttggctattctgggtcttttgtggttccgtagaaattttaggatgatttttttgctatttctgtgaaggatatcactgttattttgatagggattgcatcaaatctgtagattgctttggtagtatggacgttttaacaatactgattcttccaatccagggacatggaatatctttccattttttggtgtcctcttcaatttccttcatcagtgtttcatagtttttttatagagatctttttctttgactaagttgattcctagatatttgattatatttgtggctattgtaaatgggattactttttaaatttcttttttagattgttcgctgttggcatatagaaatgctactgatttttgtatgttgattttgtaattgcaattttactgaatttgtttaccagttctaatagttttttggtggagtctttaggttttaccaatataagatcatatcatctgcaaacaaggccaatttgatttcttctttttcaatttggatgccatcatttgtttctttcttttcttttcttttcttttcttttcttttctttttgaaatggagtcttgctttgtcaccaggctggagtgcagtggcacgatctcagccgcagccacgcgtgatcccaggttcacgccattctcctgcctcagcctcccaagtagctggggctacaggcrccygccaccacacctggctaattttttttttgtatttttagtagagatggggtttcactgtgttaaccaggatggtctcaatctcctgaccttgtgatcygcctgcctcrgcctcccaaagtgctgggrttacaggyatgagccactgtgcttggccaaaactacaagtttcattctcttgtctgattatgctagctaggactttcagtactatattggttaacagtggtgacagcaggcatccttgtcatgttccagatcttaggggaaagactttcaatttttcctcatttagtatgatactagctgtggctctgtcatacatagcttttattatgttgagctatgttccttgtatacccagttttttgagggtttttatcatggagagattgaattttatgagatgtgttttcagcgttaattgaaatgatcatatagtttttgtccttcattctgctgatacgatgtatcacattggttgatttgtgtatgttgaaccattctagcatccacaggatatttctcacttggtcatgatgaatgrtctttttaatatattgttgaattcagtttgctagtgttttgttgaggatttctgcatcaatattcattagcgatatyggcctgtagttttctttttttgatgtgtctttggttttggtatcagggtaatactggcctggtagaatgagtttggaagtattccctcttcctctatttcccagaatagtttgagtaggattggtattagctcttctttaaatgtttggtagaattcagcagtgaggccatgaggtccagggcttttctttactaggagtcttttattacagctttgatctcatgacttgctattggtctgttcaggtttaggatttcctcatggttcagtcttggtaggttgtatgtgtctaggaatttgtccatttcttctggattttccaattttttggcatatacttgctcatactggccactaatgatcctttgaatttttccactatcagttggaatgtctcctttttcatttctgattttttatttatttggatcttttctcttttcccttagtaagaaaaaccaactttttggtttttttgtttgctttttgtttttttttttttgtttttttatttttaacataattttattttaatacacctatatgtttgaatatttgaaatctcaatcaccttcacagcacaatgattctacaaagcattctttcctttagcctcactgtatattttatcaaatgacatgactgttcctaattcataattgggacctaaacctaatggaaaatactatttcatgtattcaaaaatatttgtggtctttttctactatgtatatctggcattgttctcaggactggactctattagttttattatgaaaatgttaacatttctccatagagttgttttacaaaaacacctgtttttcaaaaacattctggggaacaacctgaaaacttttaaataacatttagagcatggatttattttaaaaattacctgatcccttttttaatgcatattgtgactttctttaatcatgaaaagttttcaacattattttggcatacctgaaagcttttaactgtccttaaaaaccccaactttgcaatagtaaattatttcatgcatcacaaaatagtcttataaaccaactttttgtttcactgatcttttgtattgttttcttcatttacattgcatttatttctgctctgatcttcgttatttcttttcttctactgttttgggtttggtttgctcttgtttctctggttcttttttttttttttttttttttgagacggagtctcgctstgtctcccaggytggagtgcagtggcgcgatctccactcattgcaagctccrcctcccaggttsatgccattytcctgcctcakcytcccvrgtagctgggactacaggcrcccrccavcacgcccggctaattttttgtatttttagtagaaacgggstttcaccgtgttagccaagatggtctcgatctcctgacctcrtgatsnrcccgtctcrgcctccyaaagtgctrggattacaggcgtgagccaccgcgcccggccgtttctctggttctttaagatgcattgttaggttgcttatttgaagtttttcctcttttttgcaagaagggtaataagccatatttattttaaaacataaatttaaaagtamctacatcaattattattaaattgaaccagcaatatataaaataaataatgcattgagtccaatttcagttgggttcacactagaaaacctaattagtataattcaaccacttcagcaaaaggaaagaaataaatatttcaatggatgggggaaatgaatttttattattccaaaataattcatgattttgaagaactcttagcaaataaaaattaaaatgaactttcttaacctgataagcagaatctaatgaaagcttacaacagtcaccccaaatggcaagaagttagatcattccctttgaagacaggtttttcctcttttttgatgtaggcacttatagctataaacttatctcttagtactgcttttactgtatcccataggctttgggatgttgtgcttctactatcatttgtttcaagacgtttttcaattccttcttaatttcttcattatccactcttcattcatgagcatattgtttagtttttatatatttttgtagttccccaaattcttctcattttttatttctagctttattccattgcagacagaaaagatgcttgatactatttcaggcttttaaaatgttttatggctggttttctgacctaacatatggtctatccttgagaatgatccatgtgctgaggaaaataaagtgtattctgcagccattggatgaaatgttctgtaagtatctattagatccatttagtctatagtgcagattaagtctggtgtctctttcttggttttctgtctggaagatagatccaatgctgaaagtgggtgttggaatctctgattattatcgtattgggacctatctctctctttcactctaatggtatttgctttatatatctaggtgctccagtgttgggtgcatatatatttaaaattattatatcctctttctgaattgacccctttatcattatatagtgaccttctttttctcttcttattgtttttgtcttgaaatctattttgtctgatacaagtatagctagtcctactcttttttttttttggtttccattggcatggaatatctttttccatccctttattttcagtctatttgtgtctttataagtgcaatgtgtttcttgtaggcaacaaatcattgggtcattttttttttaaataaactcagccactctatgtcttttgattgaagagtttagtccatttatattcaatgttattattgatgagtaaggacttactccttccattttgttatttattttctggttgttttggaaagatccctttaaattgggctttcctttcagcagcaattcatgtgagtttccagatcattacctacttgatgaggggctaggggcagagtagcttaaaggcagagtatgaagggcaactgccaactgttgggcagttggagattgatcagaatgtatgtcagtgggaaactaggattcgatttacacaaacccagctgcctgatgatttctgcactgcctgtaggatatatggggtgtccacattttcatgaggaggaatgagcaagcagtctaatgatgtgccacttatacaattagcaattcagcaagttcaacttcaaataagcagttctgaattcttcttcctactccaggggccgtccccactacttcagtgtctatcagcttttctgaaagaagagacaccatggctacagggaaaccatggtggggctgtgtgtggaggcaagtactgcctagtgttggatgcagactgcagctgtatcctttgcccttaggcaggaagaaactcccacagcatcatcccagctagagagtagcttggatgtcacagtcagacaggcagccccagcaaccttaggtggtacagcagtttctgtggggagattataaagccctctgtggttacgaaggagttgacaagctattctgatggctttctgcctgttttccttggatcctgaagacaagagcagtccaaagttattcctgggaagtgagaatcaggcatcagccaaggctttgtcagatctgggtttgcagatgagggctcattcaatgttccttacaattgcaaaaaaatggacatgtgaaaactcacttgtaacttgaaggggcatcatttctaattgggagatagccacagagaaaygaaggggccaaaacattgctagtgtgaaaagcacataggctttggagtcagatcaacctgcaagtcccattctttatgtcttagatgcatgaccttgtccaaggccttcacctctgagccttgatttcctcacgtgtaaaaggagataggaaagagcatcctacaggggctattcttctaattaaacaatgtccagtcctcatgcctggatctccgccactggctctcaactcacctttttcctcctatctctctagcatagattgctgcgttcattttattgtagagggaccttggtacttttaagattcctgaactggaattcacaaggtctgagagatggttttgaccctgttatgactgtgtgaccttggttgagtccctttctctctcaggacctataaaatgcagagtttgggcttgatggtctttaagggtaccttccaactttgataggtttctaaacgatgtcaaggtcaaattctgaatggcctggttcactgtgctagaggatggccctgatcatttggcaagcacaactctttcccaaggcgacattgcccttcttaccattgtagttacatgggccctgctggaatgagtcacatactctagcttcttccagtttcttcccccscttggttaacttggcttggacattttggattctgtctatatgtaatttgattgcattttcctatagataagaaatataggtataatagcaaggagcacctcaccccccactgcttcaaagagagagagagagagagagagacctgatctgtctgccaacttctctttccctgtgggtccctggcctatccactgctacctgatttatgtcctaggggagcagcatagctatggtgaagatttataccaggttttcatcttcaaatgagctactacctctgttccttgtgtattcaagtgcttggcactcatagccaagcacttgaattctggaattcaaaatgaaaaatagwcccatgagaggcctaaagagaggcaaacaggaagcacttcagagtgtgctgcagccttgtacagtaagtaggatgcagtccccagctctcagtggaggtgtgatatgcccagagagattatatacagtgatccctctccacattagtgccttgtgtaggcatggtacacaatgcattagaattagacaaggygtaggatttggagacaggaaatattgaatattcccatctcagcgccttcacttattaactgtatgaccttgagcaaatttctctttgagcctctctgacttccctgtaaagtgagaagaatgccgcctacctcacagggttgctgtgaaggcaaaatgaaatacagttagtacagctgagtggctcatgagcttggtcccagcaccctacaactctggatttgaatccagactctaccacttatcatgcaagtccgtctgagcctcagttttctcatttaggcaatgagtatagacttttgttcaggatgaaatgagataattcctatagtgtgtggcatctggcatatagtaagcactcattaaatgttagctaatggtatgattgttattgtttgtcatttaggtaaaatttccaataattctagaaaagatattttgtgtactgtgccagatggtttggcaaacttggtccatattttatatgcttggggaaaaagcactgggtatttttttggtcctggttttgaaactacaggtaagacatgaaactgagactcttccaataaaaggatacctgtttcctcatggaaagcaagtttgcgctcacaatggtgctacaccttcatgtagacagttgtctgcagcccacaaaactgttgaagtggtcatgatatttcaaaagtagcacctccatcgggagcagcagtgttaatccagttatgaatattacacctgccaaacagaaagaatcctttagccacgggtctcaagcacagccctggatgtgtggatttgccacagtgacaaagactactagcaaggtgcatggggacaagaacagcaatggcttaaagcctttttcatggatttttgacaatgaagttaattatccagatgtttcatgtacttgaccccggacactcagatctttggaaacatctggacaatgtgggggtagttttcatatctttcatcaaaaccgttggttgtattaaattcagcaggtttcattaatcacctggtttgtgccctgttaggtattattgatcacaaggaagtcacagttttattgagaaaaattagactaacaggtttgaagtgaccaatgaaaagtaggagagctgggatatgaacatagttccatcaactcctatgcttgtgctcacttcactctagcacatggcctcttttcatttggggctggctgaaaggaagtttcagaccaaatccagtggttcccaccatgccttgacttcagcagcgacctaagctcctttgctgaaagcaggtgacatatatccaaatggaccatttcatgtgtctccattgtctgatccttttagtgacttggtggaatattccctgagaattatcttgatccttattttagcactagccaaatcattacttgttagggagtttttcgttctctgtgttttaaatgtgtaaaaatgtgaatgaagcagttatatcttgtgttggcagcttgccatccttggtctgtgtcagcataaaatattttggattccatagagtagcagccccttgcgaagctgtgtaaaagatacaatgaaaaccttccttctgatttgaaacagtgctgaaatagcatcatttgtggaccttccagacccaacgatctgaaacatggaaatgaaatgggataaaataactcccagtacacatatatatacttaccttgtaaatgaaacttttcggcctttattaacagaaagcaggccctgttatacccagaaaatttctaagagattccttattcgttctttctttcctttaagtcaaaaatactgtatgtatatgatcaaactgaaatgcatcactggaacctaccatacaaatacaggtgcttgcgtttggagaattccaaaacacatatgaaaatcattgtcaagtttcagttgaagaagtcagcctgtacctatgcacattttttttataactcaactagctcccccacatcatgagtggaaaggcttctcagaagggaaaacaagccaggttttattttatggccttcaattttgttttatttcgttttactttgtttgttcaatggcaaaacatccttttcactgctttctgaaagactaaattgtcaaataggtgctgtgggaatgttttcagaaacaatgtatcctgccatagccaaggacaagttatagacaaacccgttttccacgraaacaagaatccttcagtgtctagattgttaattagatcagcactagagggcactcttatgatgccaaaatgggaaatttttactaaaatctgctgggcaggggtgtgagagaggagatgaggagggggcagtttctgtaaggactgcagaccacagacaaacagcttagacaagacatgtgcaactgagaattgactggatcgccaacagataaaacactatttgaaaagggctgtttggcagtgttccctatcagatccacttggtttccaaaatgcagtcggtgctttggcaatacacgatccaggtataaggcattatttctcaaaatgaaagagatataagaagctctgattgttaccatgtgatgtagtaaaagcacatttaggcagaaaacaaaatgtggagagaagcataggagaatgtgtttacaacttaacagctactgagaaagaagaatttcaaatccttggggtcttttatggttgttttccccatcttttgcagcccttgctctgtgaattgttctgaagggttgtgtgattgagtctgggagagcaggtgcttgcttgtctgctgcccctaggcaggctctgatggacacagggtggatgatgtgctgtcaagtaaagggacaaatggacttggttttgtctctggcattgatgtgctctgtgatctgtggcaagtccctgccctctcaaagtctcagggtcagggaagagttgggtgacactagaggtctctaaaagatcactagaagacatatccccgagtttgtgatttatgattgcggaaataacttttgttttgttttggttttagagacagtgttactctgttgcccaagctggagtgcagtgacatgatcatggctcactgcagccttgaactcctgggctcaagccgctcctcctgcctcagcctccagagtagctgggaccacaggcacatgacaacatgcccagctatttttcgtattttttgtagagatggggtgtcactatgttatccaggttggtcttgaactcctgggctcaagagttcctcccaccttggcttcccaaagtgttgggaatacagacatgagccrctgtgttctgccagaacttcccatatcagtcatttatagcagccacttgagttctgaatcgaacaagatatggtaggcaccctggggtagaaggtgactctatgctgtcagtaggatggtaccgaaatgatttgccagcacagaggggcttatttgcctgtattagtcattgctttaggtttatggctcagtccaaatataacctcagagagtgaccacactaagccgtcagtaggtcccctcaaattcgctcattatgtccaagttaagcctgatccctcacttgtgtgctaggcaccagccagaatctcaggcatgcccatgtgtccttccctgaggagccagtgtggggcaggggctctgggcacttgatgggaagagtggcacactgaagacagacttatctactctgactttggccccagtgtttgctagagaaatgcatgagtgtttttgtttaagtctctgcttgtaagaacccaggctatccttcataggaatgttcctgattgagtcaaattcattataaagtcttagaatgttattggccgggcacggtggcttatgcctgtaatcccaacactttgggaggctgaggcaggtggataacttgaggtcaggagtttgagaccagaccagcctggccaatatggcaaaaccttatctctactaaaaatacaaaaaattagccgggtgtggtggcrggcacctrtagtcccagctactcrggaggctgaggcaggagaatcgcttgatcctgggaggcagaggttgcagtgagctgagatcatgccgctgcacagcctgggcaacagagggagactccctctaaaaaaaaaatgttatcatgaacagggacctttgggaaatcagctagtccaacaccatcactgtagagatagggaaacggggagccatcttcatttgggaatggggttgcctagggtttcacagccagttaatggcagagctggcattggggtatcagttttttatttctattccaggcctctttctgttaccttgtgctatatttttctctctcctgcaatgtccattctagggaataagtgaccaatggctctgaacctaagggtttttgacatagctagaatagctccgtgtttatggattgtgtcatttaaggtagtacaagtggaaagatatgaggacacatccctatcaaaaatatgtcctgtttaaatgtcataggactggagatcaaaccaatataggatcattcctctggatctagaaggctctgaagtcttgagatgctcttgcccaaaagcaaggatcaggttggaatccttgtcagctggcagggaacgaaaggatgggagggtaggtctggaaaccaggtttagtatctcgggggagggcagacactgtgaaaagagcagtcaagacaacctcagggaacttcacagttgtgccaaaggctattccttgggaggttaaaacaaatactcaaagaatacatatttgaaagaatattctgggttccagtattctcatgccaaacataaggagctccctctcatgaggtatgcatgatttccagtggacttggcatggaacaaggaggaattaagagcggtcaaacagtagaacacagatgcaggggacaaccctctcccatatcagtgatgtggttactttccgcatggcctttaactgcacgtgtctttgagctctgcttttgaaaagctggttcctttcccagggcaacaagatggctcaggtacagggggctgcgagctgtgtggcaggcctgccgcagactcactatgcctctagacaattctctgattggtcttcctccctaggtgacagtaataatgcctaaaacgtattgtatgatgactgtggacctgacattctgctacatgatttacaggcatgatcacatctaatcctcccaagtactttaggaactacccttctagactgaaacacatgggcctacctacccatgtcgtttgctgttggtttctcctctgatagggctgtcttttcttctgattggtcagttccgataccatatctgttgttaaagatggtgatcatcaccagtgtaggcattatacttgtccccactttgttttttgctgttttttttgttttgttttgctttgttgagacagagtctcaccctgtcacctaggctgcagtgcagtggcataatctcggcttactgcaacctcctcctcccgggttcaagtgattctcctgcctcagcctcctttgtagctgggaatacaggcgcctgccaccacrccaggctaatttttgtatttttagtagagacgaggtttctccatgttggccaggctgatctcgaactcctgacctcaggtgatccatctgctccgcctcccaaagtgctgggattacaggcgtgagctaccatgccccaccttgtccccattttctaggtgaggaaatcagggctgagagattaagttgccttttcagtgtcatgcagttggtaagtgaaagagctttaggaccagattccagtctgtgtgactaatggacttatttcatggtcccacaccacctctcaggactgtgcataagcaaaaggctgaggtcaagcattttaacactttgcaagtaaaaaagaccagcagcttgttttgcatagggccttaagaaacacccaggccctttgcctggctcctccattcacctccaccagtttgagcaacagtccttagcctgggactttgggggcaccacacccctttccatttagggaaataaaatttagcatgtattaacataaggcattttttgctaggatatactactgtatttggccttcagagatcaaatgaggaaggtggcttgagatacaaaaggaagtggtgggtttctgagcagcaatagagtaggtgaagaccagaatgatggtggaagggcattctacatgggagaacgtggaaattctaaaacacgtcagctcttggtgtggcagttaaagggagggtgagcacaccagttcagtgtcagaaagcagagaggttgaatggaccatttgcttggcagctctggaacagtggtaggcagttatttatcatagagtgtactatctgctgcagatttgcaatctgacccaaacagtgttggtgtgggtttcttaacaacttccttctctctagctgttatatggaagtgtgtggctgtggaggtctctgctgttgaacagccatcaccaatatcccaggctcctggcagatgaagaacctgcatgaacagaaagagaaatgtggagggtggtggcggtgcaagagggtcaattgttcatcaattcgatttttcttgtttttctcaattaagtttccttctataatttttccatcataaagaatctgccactctatgtttcaaattaacaaagctgtttctctggacagaatgatgttcagctgcatttaaatttggccattatgattttggacatactctcatttactcataaactcttcgaaggctgtgctctgggctctgtgaactactaatagcatgttgtactgagaaaatgactagggattggtatacttctaagtaacatcaagggaaagctattagagaatgaaagaatattggaactgggggaattttagaaaccatcttgtcaagctcgttcatgtcatacagcccactgggagagtggagaagagaatttgcccaagatcaaatgagtcattggtaaaacctggattaaaaaccagggatcctgattctcagtcaagggctcttggatttttacctcatcctgggttttccaagtcttaatttggatccttcatacaaaagtgaatcgtttcactttcatttctcaagccctaagcacccaccctgagaatgtaaatgccaagcataagtgtcatggtctgaggttcctgattaggatgaatccacatctggagcttttggattcccaagtctcccgctattcccattactccagtgctatatatgtgttctcttcattttcatcttttgccttccctgcttattggatgcttagtcagttgcctaagtaccatttgagtgacatttagtcacatcttctggaacctggctcagaggaaggttattcctatggctttttctccagccagtgtctgggtcatgggcatggtaaccacagctccttttgtccttccagtgctgctgctttcccaggatgtggcttgctgagggctgatgaatcccatcttagagtgtcagccaggccagctgttaaagaacatgacagcaacaaatgagaaagactctgttgggatgtgggactacagtattatgaaactgccacttagaggcttcctgtttttacagtatttcaaggtgcaagcaagtggcattctctgggcagcaaatggcccagctgaaaagaaacctgatttacagcctgttgggagggctttccacaaggagaaattatgaatttgtaacgtcccttccaatccaaaagagaattctttctaatgcaaatgtttaatctgatgccatcgagtatgttctccatacataaacaaaggcataaataaaacagggagaaactctttcctagaattgataatatacagtatatttctgtagaactcttttccaagcagatggcctaaaaatattccacaagattgtaaactctgtagagtcagggatttttgtctgttttattcactactcagtacctctaacctcagtacctctaacaatggctagcacataatagataataaatattttttaataaaacatcatgattaaagggcctttttaaaggatttcattaaacaaccttcccaaagagagtgtgtgtgtgtatgcataaaatgggttcttaaaattaattcattctcttctaattagtatgtatcttttgttttaccttttccctatgaactttggctcacttctgatgactggccacccttttgattgatgcacctgtaacgtcttcatggatcgtcactcaatactccacctcttcccacctgggctcccaggtaaggcaatgagcttccaaaagtcttctcagtgcaatcaccaggcaaattttataaggcagtcaagaagtttacctagaaataaaaaaactcaagagacaataatagtgattaaagttaaatttgatcccgttcccatataaatcaattatttatacacttaacatcatttgagaatttctgttagtacagtgaaataaaaattatggctttggaaactgctgcatacttaactttggaattttctgatcctaggaatcaatatatggctttatgttttccttctaaaaatattttcttgtgtgtgtgtgtgtgtgtgtgtgtgtgttttgtcttttcacccaaagttgtgttgtttttgttcacaaggccaaattttgtggaagggatcatagcctctcttcactgtgtagggactctaaatcatggggtaggtcagtacattgtagattacttatttcttgcggctggagtagaagacgagcacattgggctctggatggtaagtccactaataggagtgtcttgtctaacagatttgatgttaggcctcaccaagtatatcgcttttgtttctcatgacatttgcttccccagcagtcttaacagctcagaaacagggaaagggggcttaaccgcaccagagactgataataaaagagccatgtattgcttctcaaatgatgattcaaaggctctgctgctagccatgctattaaaaaaggctctcttaactcacttctaaggcctgcaaagcgtatttgctgtaaagaaacatttctcccaagaaaatgcacaggctatatagcccacttcgggcataaaagaagtgttgctacattgtaaaattccttgttctggcataataaaaaacaaaaggctaactgagcccatttgaaccctcaaattagcaactgacctgtgtataacttcacagtctccgcctgctaataatatcagtaattcacacagtggaatgagtgttttgtgacccttaagacatacattataaaaacagctgagcatgttttttgaatggggagacattgcttactttgatggatgtcttgtgtttgggtggaagggactagagagatgatttatatatcaccttatgtgtgctttgaattttcatctttttaaagagcatcagtaaagtttaattgttctttattttccttttgttatttgtgtttcgtatattcctgataatatgaaaaatccctgccaattcctcctaggacctttcaatcagtcatttccatttcagtgatgccacagggttgggtttggtttgggttttgttttattggcttttgtttttttacctagattcccattgctctctgtgaaggggaatggaattagcatgagtgagtggtagatccatcattcccagaccacagcactccagggatctggctctcagtgcagccttgccccttttagccttctgattgggaatctccccattacttgagaggagccagtggggaacaaagtggagaagccatctatgagctgtttccctaaggtttgggaagctggagaaatatgctcttaaagcacaatggaaaacttttattattttatctcctctcctaccaagctcttgctagcgactggttttactgttcctttaacaggtggaggatttttcagattytagatgcagcaaggtaagtaacaatgtatttttagtttgactgaacccaagtaagctagaaaaaagagactytgcagttgcctgtccgtttaatttcagtacaacaaatagttaagtttttggcttggacaaattctttccagggctttttttttttttttttttttttttttttagtttaaaacagctgaaactacccaggcttggagtctcagttctgaaggctgacttakttcaraagggggatgaatgttcagggcgaccaccccaracaggtgtgcagtaggtcattagctctttttcctctttttgctgaaataggatgacacagtagagtgtgttgttgagaagaccccaaccgttggcaaagtgttctttacagtgcttcaggcacgtctgcctgtccctaggctggattgtgatttagagaacaagtaggtcagcatttccttgaagggaaatcaattatttgaaaatatcagggcttttaacgtatgtaaatacgtagacttgcatatttacaagtaatcccataggccagaggcctttttgacatgaagcctgcaggagagcaaatctaatcaaatacaagaaagttcctctctgtggggaagacggacgctgagaatgctcccagatgatgcccctgcaggcaacaactgttgctaagagctgtaccatcatattgccaccagaaccggagagtctagcaagaaccataagtcattttggaaatgtgtgctctagtcgcttggcacattgttttctaaggtcatgatgctcaccagtactgtctttggctttttgtaggcttattggctccagaaatatttactagtgcctctgttttttcttaatacccacctacaatccaccctgtgctccctggccaaataggttagcaagagcaaagactgtagctctggcatttctccacaaggacagactcccattaaaatagactacttgagccattttggggatgcccagtttagctttctgtagctgggcttccatactcccattagagcctcaatggatttacttgacagctgagaatagtaaatttagtgtttaattttgtagtcagattataatttattgagctaaatggcacagacacacatagacacctaatcacacagtattagtatgggagaacatttaaatatcatagattgggtgtgtcatggaggcaaagtaccaagttctgttactaatgaggtgacttttgtcaagcactagctccactctgagccttaatttcctcgcctgtaaaataaaatggagcggatgaccattaagacaatggtcaataacataggtaccactatccctataatagcttttatggggaagtcttgagaattttgttttctttttgctttaaaattgctagatgataggaccatctctttaaaacagttttgctgtataacaaagcaaatcctgacacactctttatttttactatggtgttgattagttggaccagattattgccagagcaactaatacctggtcttaatgagagaaaacaagaggagtacagatggtgagatgggaaagaaacrgttttggtaaatatcaatggggccctttttgaattttggtgagctgaatgatgtatgaaaactatttgcaaggctagcatatttttcaaccactagtaaagcaataaaacaaataacatttttggtaatccccattgtatatgcagtttcataaatatacaagattatgattatcgctgcctcataattaacaatttgcataagtacttgctattttttagttgtctgaatagatttttgtaatccagagaaagaagggaacaatcagtggaagccatcccaaatgcctagtattattgctacacacttgcacaattaacagcgatactaattgcttcagaccagaacctcatttgtttttctaaggacagcaaaaacattaatagccagagtgcctgtcaatctctctctctttttcctatagccaactgtatcatagggtctgcagttgactgtaagcaaattattttgttggattttcagtgtatcatcttgtaatggagtttccaagtttcagttagcaatcaatgccttgaacagccagacttatttttataatattttaacaatagacctctataaagttaatgaataaaaggatgctgacatgccaatcagttctgctgctgcatttacattctactacatatttcatatctttaaaattattggcattagacctgcatataagaatcatagaaagtccaggctggaggggagctttaagatcatcccgtcacactccctcctttttcagatgagtatgattgtcagtaatttgaatcttgataacaaccaccaaatcaatgatgccacacttttttttttttgtacctttcaaacgttgggaactattatagtaagtttgaatgataactggttgtttgggaatcatatagtttcaacttattttcaaaacaactgaatcagaattttaaaaatatgccctcataaggcttacctaaacatagccataatgttgatggtatatgtgtgaaaggagatgttctatgcaaatcacctggcaatgagacactcaaccaatatcagctctctttccttcatgcatagattacctaattaacattactatagtggaaacattacatcagtgactgacagtctaggcgtttagagtcaaactgacctcgggtccaatcctggcgctgctactttccagctgtgtgacgttgggtaatttagttcatctctgttggcttcaggtagttttcttatatgtgaaatgtagccagtatataggcttgttttgaggattaaaatgagatcgtgcatatcaagtgcttagcactgttcctgtcacatagtaaacagtcgataatggtggttattaccatcgttttttggcatacccagcggcagcctcactcaatagtatatttaatcttacagtgatttggggtacttacacatacacctgtacacatgcatatttgggcacacaagttcataagatttgcatcagaaagactgctttcccaaaggttacctgtgaccaccatgtttcacaattcaatggcctcttccctggcctcagtcttcttgacctctttggagattctggcacttttgcacatattctcttgcttgaaagggttcataatctatcttgatgtcttctctacattccttaggtttcctttgttgggatctcttttccacacgtacacacacacacacacacacacacacacrcgtgcccacatcttctccctcccccactgcccctttaaatagagcaattcccaaggtcctgtcattgatctgcttctcttctgttgctatattttctccctgggtaacttcacctcctcacatagcttcacctttaacctctacactaatgattcccaaattgacctctccaacccttaattcattccggagccccaggctaactccaatttccaattgcctgctgagaatctccagggcaggatgtcctaggagactgaaagcgtagtctggcttttgtcatccttctcaggaatgcagatggaggaatctagcttcagaagtattaagggttgaaaacaaggcacaagtatggagcattagtctgagcagaagtaacagtggtctaagttagcaaagtgcttcaaactgagctttccaggggaggcataacagataaactgtgaatttctgttattatgcactggagatgtcaattggcagttggaactttaaaaggtttatattttctagggataagggaacagcttcctaagatgaaaattgagttcagtttttaggtgctggaagattggcatgtttggaagaagtgttaattaaaatcatctttcttttcttttctttttttttgagacgagtttttttcgctcttgttacccagactggagttcaatggcgcgatctcagttcactgcarcctccgcctcyygggttcaagcaahtctcrtgcctcagcctcccargtagctgggatttyaggcrtgtgccaccacacctggctaattttgtatttttagtagagacagagtttcacsatgttggtcaggctggtcttggactcctgacctcaggtgatccacccaccttggcctcccaaagtactgggattaccggcgtgagccaccatgcctggccaaaatcgtctttctttggacacttattatcattaatcttgtttcagtgttttgtttaagaaacgcacgtgccaaggggaaagatgatgtactgaacttgaatgatgagcaggtgggaattttgtsagagcaaatgtgtgtgtagacacatacacatatgctgggtcaggtgtgcctgagattttgaatgtgtgcaaataattctatcagtgatagatttttttctttcattcattctgcagatatttacagaacatgccaagctctctgtggagcaacacagctgtgaatatagaacatatagggtctctgtccttaagtgtctaatacatttttttttgttatatgcaggtacattgacaatttaatttagtttagaaatatctgcaacatgtcacaaattgttcaatggccataatcttgctgacaatcttaatgaccaaagaggaacttaagggaaataagacagtgttaaagtgggaaaggaatgtacataaatctgaattagaaattgattacttcctttaaatttagtaaatattgaattgctttggggttttacatttcaagttggcttgccagtgttccaggccagggtaagaatgattatgtctaaccctaaaacttaattagagtaaaggaatagacaactcctggttaatgtgtgtactattgtcaggagaattagttgtaaatgagttatttctacagaaactgcaggctcagggctgatatctttagcacagaggacaatatccctttttgcagaagaatggtcccattctctaccttctcaaaatgcagtacagtcactcctgtttgagctactaccatatggcatatttgaagaccattttgtcctccaagtgggaatcatctacttgtgagttccttgacttcatggttgcatgccattctccccttcagaaatttggcatgggcctttgtctgtaagtctcaattccaagtgttcttggtcccagctgtcagtttcaaagtccccttcatggtccctctcaggtcccaaggatccctcattgcatcagtaaacctagagatctacttggatgcccagagctcctgtcagagctatgtagatggcagccaccctctgttccactatgctagcttctccttcagatctctcacggcacaaaacctctcattataatgatgtgcacattggccagtgcttctatttcctttgccttgcgtgagttagrgacattctgttattctcactggaggtaagaatgattaaaaacatccttgaatttagagtctcaaatgcctttattctcatggttttcatcaatcataatataacttctctttcctttcttagatttattcattcaatatgtatctattgagcacttattatgatccaggcactgttctagacatgggggacaatacgacagacaaggtcccttctcttgtgtttcttaaagtgtgtgtgtgtgtgtgtgttggagggaaattgaaaacaaagtacacaagtaaatgaacaagattatcatagggagtggtaagtgccatgaagaaatcaaacacattggacagagaatggtcagacagttggagagtgatcagagaaggcctccctaaggaggtgaattttgctctttgcttttgttgattttgtacagacttcagttacactttgggtcctttggtttcctccatttcatgatatcctggactcggtatgcattctcattttgttgcttcttgccactgtactattaggacaacctcccttcagctagtcctgaagagtaaactaatgtagcctcctgtcaaatatgtgttccacacttttcttgtcgtagtcagtattagaattcagcatgttcacgctcttccctgttatagaatataaatggatgctaatcctttaaggatattttacttgattactcagtgcatttttgttactcaaggcaaactacctattgaaagaaaaacgcaagcattaagagttagtaagcatttggctttgcctatttctgtaaagggaaaagctattgttaaaattagtgttcaaagttaaatagatgatcctggaggttctctttagttcgaaagtagtacaattagttgttttcagagacggagccaaaatctcttttcaatatgctgtttaattttgtaaagtggatatgcaggaacattttccagtgtatcagaagtgcttagattaagcatacattttccgacaaaagctagctttacaattcttgtaaatgtcacaggaacttaaaacattgtgtcttgttttaacctctgccagctagagcagcaattcagcacagcagattcaattgtcagtttcttaaatgtgaatatctgaaagttcattgtcttttcagcttgaccacagggaatcttcaaaaaactaaaaagccaaacaccactaaaatgtttggtggtttcaaaatgctatggcataggtgttgcttgctagtgagttaggtgccaagaaaagcatgttaactcttagaaggccattcggattcttccagccatcattttgttgtcttcctcagcacctagttaaagccccaggtaggaactgaggtaggagttagaaagtttgccttccctaactcctctcacacctcccgtcctgtcccattgagctctgtgggagaagatggggaagcaggtggggtgggtttggagaaggtgcaccagaatgttgccaatatcccaagtacccttgcatctcccttctttaaaacttctgtgtcgtcacttactattccacttatcactcagatacttggctgtgttctaaatacaacaatcaactccatgactagattttgggaaagcagttttttaaaaatccagagaaaagctgagcatgattctgtggtaaaggaatcttcaggagaagaggaaccaagagagtttggaaactcctagaaatgcaactctgatttacagtcacagagattcttgacatagaaaargagtggggtatagagaaagaagtgaggaaggcacacagcacagtgagtccttgtatgattttaattgaaaaggctgttattttctgcaggtgagaaaatagatgcacatcaaggcaatgacttatctaagtacgtgcagctaattagtggcagatgcaagagaagaacacaagtcaactgaatcctatccagtatcttgattggtaattaactaaactcgctgaatttttggcttgcttttgccgtttaattcttagcgctacgtttgttgccagcacttttaattcattatgctcaaaggactttatcaacaaaggtggacaaaatcccttagaaacaggtaaaaggaattttgttttggaggggttggggccagctgacagatagtacaggatcgcatagaggtgagagtggttggattggaaataaagcctaaaactcaagatttagcttaaaataaaatgaagaaagagaggattgcggctatagactggggatccatatttaaaggtacacatcatctctttaatgctcattcttaatgacagctgtagcccattctccatctgaagattgaaatgtcttttgtttagggttctcagtactttgagtctctttccaggcatatttgtggccttctccttgtctttctgtttttctattctgtatggtttttcatctctaatgttttccattagtttggtctcacggtcttgaccagggcactcatggcacaaccatatatatatatatatatatgatcttatgtgcacataaaatggagaacactatttaacaagttagaaactattagattatttctgttcctctttcggaactgaaagatttcctcttgacaaatggctcttctccaaaatcttaaaattgcacctcagaaaaaaatgacggtcactgtgctaccatgaagcttcctgtcccttcactttcattggcttactattcaatgagctccattgattttccagacctccattgattttctcaaccttgcctcatcagccagacactagaattacaagggagcttcatcaatatcttgtgtggtttcaaaacttttccacttttctaatttgggcaatgggtatggtacaaaccatccgtaaacggcatttggtggtgcattggtctttcttctcatggcttctacaattctaacttgatttctgctcaccacagggcacagtttgccttctcttccctgggagctcttgttcatttgtcaggagacctaaaagaaggctactatgtacagtggtggaatgtcagagtcatcctaaactggcataaataggtctttaatggcctttactgattgtttctatattgacatataaatccacatgaggctgtgtgaggagactgtgcatagtctttctcccgttttttcatatgaattgatttgacaatgtcatagatgatgcatgagacaaagtaaagtgtttcttaagctcactgctgcttgtttgcatgaaaaggaataaaagctacagggaagaaatggacattgtgtgatgctttaggcaggagccattttctgactcacaccttttagaccataatccactttctgaacctgtgcaggggaaagtggtcactgtgatattcttttgctggaaaacctcctaattaatagaggttttctgaaattcataagagatgaaatacagagtctcaaaaaacgaattagttgtaattataaatgcttgcatcttatatgagaaaatgaaatgggataagagctttttgaggaagagtctctgaaaataacacaatgttttattgttgaagagccatgtgatttaatactcagtgatcatgaaatcacatgtaaagcaatccaccaggagagtccagaaagcctcatttattcctctctatatgagcagattcagtgtctcctttacaatgctatcaaaatatgtataaataaaacaacactcttggggctgattttaaatttaacccacagtaactgtaatttaacatgagtacctgaatatttccctatttggagtcaaagtgggataactggggtaggggttggggagaggcccctagctttctgtcctacaacaatctcaagcacaggatctctgatttccccttctcatgcaggaggtattttatgtcttggcaatgggtacttttgttcactaattttcatggcctacaatcataggtcaattggctctgggtcattctggggctgagggaaaacaggtagtgtccttcaatagatttggagaaactggagggggcctcttaacttggtgattttccagtaatgtgattgaaaatgtactactacattaattaattcagtcattacagatacacttattgagcacctaccataattcagcacgattcttaatgctagagatatgacaattgaataagacaaatatagttccttctctcagggagcttatattctggtggcagatatagataatttggaggaagcaagtcaacaaaatgtgtccatattgtgatgaatgttatgaaagaattaagtggagtgctagataggggatatgtagcctttggaataacctcattgtggggcaaacttatcctttgtggatggatttgatttttggaaacatcaaaaatgatatggggccaggtcttataaatatataatggaagatcaaattgattgataaaagttttgcccccaaatgagggtatatatgtaattactgtaatatttttgagtgtcagtaaaaatatatactacactaactagtgataagcacgcccatgtttttaaaggcagtgaaagggctccagcaatgggtgttatcctttggcaagcatttaggcatctatagctaccaacagcactgtctccagttctctgcctctcctcaattctggtcaacccttgtcatcattggcaaatgtactttagctgttatattggtacataaaataaacattcagagacattccaaactatgtagtacagcagtaacatgtgaaatttgattctgtcacaattataatttagttctctcatttcattagtccaaataaagtggagtttcatttatgctattttgtatcaaataaatctgtagaatgctaatacaccacttcgatgagatacaatcaatttgagtctaggaaaggcaagaatgttataagctagaatgtcaagatgaagatgaacagacaaaggaagccatgataggagaattgaggaccccttgtgtgctccttcttgtactaacttaagtgatatctaccatgtccgtttagtgatcgttctagacatgtccccattaaaggatatctaatagagatggttttgtaaaatgagaagaagccaatgatagccatttaattacatctttagtgtgacgttagctccctgtcttgagaagcattgatattctccatgggtgtttacttgagcaactactctgccaggcactgggagtacagaggtgaattagagagagatcctgtctttatggagctcacattgaatttgggagatagaactaaccgttgtggtagaatatggttcatactaatatgtataaacgtagatacttggtacttcaaggagtctgctctaggttgagtcgttgggtcagaaactactaagggaactattctatggtttgctaaagctagtgatggggcaggtatgttcatttcttcacctcatataaatatctttggactcttggcatgattcacatgcatacactttcaatctatctgccagttttaaaggcaggtataatggtgaggtctagtttcaaaataagtagcttttataggtaatattctgtggtttcttcttgaatgtagaaccagaccgattcagaataactctcatgtgacctgttgtgaagagccggccttaatttttctttctctttttttctttttgcaacaccagctccatttctagtagcaaatctgagccaaaagcacagattcattgactgtttgcataagacactaaatagacactgaacagaggattaatgtagccctgtcttctgggagcttatagtctaaaacagacaacaaactggaaagaatatccaacacacctgatatgctcatttcccttctcatataaatccaaagaaaacagaaagtggcaagtcacattctacaggattgggaaaatcccctagagagtattttctttttgtgacttttcaagttaaaaggtattttgtatatgacatgtaatagattacagtgttatttgatgaaaatgcaagcaatgttcttcctttcttttttactatcaacaagttacattggaaggtgtggatcaaattaaaagtgaattcttgatttgccatggggaaatatgtgcagtattttaaatactctaaggtaagggtcaacttgtgggaagaagaggtatcataaaaattaatttaagaaactagccttgagatatttcctaataatcccacagggaaagcaacatctgtgtcataataaaggcgcttagtgtgacctttttgcaaaagggaatattaccgaaacatgaccaaagtttggagctgaggtactgcagtaaaataatgggagtctactaaatatttataaggatgtattcatttgtaagaaagtagtgaaacagtagaacatctgccaaaccaaggttaatttcccaaagctcatgtgtttgtgagagacacagagacaggcacaggaatagaaatgcagagataaagagacacagagagagaaagtagcaagaggctgagccagaggtggacagagaccaagaactgaaaatcagccaccctattgattaccttccaactctgtcatgaaatttactgagagaccttggtcaggtcactgctctctgggccttggtttcttcatgtgtaagatgaagggatggactagaatatgactctatagaacttaccaactccctggttctactcttagctgcaaggtaaatgaaaaggcaggcaggtgggtaggtaaagatatacacgggcaggcatggagacagacagactggccacatacatgcatacacaagtttcacaaaaatagaacaaagcccaaatcatggtagaccagtgaactgtgaatcacagagagcagcagccagatccacaaaatcgtctcatcgcttttgatactgccatggtgaaaacttggcagatttccttttacctagcacttgcccagcttcctggaggccagcattcagaccttttctgactggcttggccgaccctttcctccaccgactcagaggattagttatgtcaggatctgcaaatgacctctgatgcccaaatggaagaactcagcctactcttctaactcttaacacttgaggatgaaaaaactcacataacctaccatgcatattcttgtccaactttctgtctggatatctgtctggttgtaatgttctatggataattttaagcacgctgtgttcaccaggctttcaaaggtaaccacttttaaacttttgtgagtcttgtttgcaggggcatggaaatgaagagaataattagtacttgtcgagctcccagccagcgaatgactttagtaaggtgctaacaatgcactcaagtgagtgcagcaaaatgatgaggacttacagatggattttagtatctggtttatttcacttccattggtttttgcaagatgtaatatagtgtgatttttcttactttgactgcttataatttatcagccttccccaaaataatacccccatagtttaatctgagggcacatgagctgatagtaggtacccctttgggaaaatctgattaagcatttgtttctcaagaaactcctttggtatctgggacaccattttgaatacatctagagcttcacattttgatgctagtacattttataagaatctatgaaaagcaactccatcaaaattgtgtttccttagagaaagatagtgcattaggataacaatcngtattgcacccattaccatagtactttcttaagaggtttttgccatcactggaagccttactcttccaggacaagtgagccctgagaacacaggctagggtgggcatgatgtgtgaggatgaagaagccaggctggctgcagtcaagcttgctcttataccaagtggcggatgggtttggttgagtcattgtagctagcgagagaggatgctgaaagacacaagagaggcttggcttccacatatatctccagcgccacctcgtccctggggtccagactcctgcaactctcacaccactcctgtctctactgggaggtttagttgggatctcaaacttcacctgcccccagacaaactcctgacatttccccagaacgtggtcctctcccaatcttccccgcctcagtgagtggcatctctgtccttaccagttgctcaggggaaaatcttcaaggtatcttttgcatatctttttctcccccaggccatgtctaatccactagcaaattctgtctacttcacctgcataatatatctggaatttgaccgcctctcgccaccatcagctctgtcatcctagtccaagccgccatcatttcttacatgggcttctgtaaaagcctactagctggctcccctgcttcctytattggacccctacagtcttgtctaaccacagtgataacccttttaaaatgttaattgagatgttgtcattcctcttttcccagcccagcagtggctctccatctccttcaacaaccaaccctgcaaggttcctgcaagctccatctctgactttatattttattaccctgcctcaggcccatttttctctaatcacactggtctccttgctttaccttaaatataccaggcctcttgctgcctcagggcctttgtatttgctcctctttctacctggaatgctcttcccctagatatctgcagggctgggtccttatgttcattccagtctttcttgaaatgtcataggaataggattgccaaggagtccaattcttaaaaagaggtcactggtcttggccagcaggaagtcactgatgactttttagagggcagctgcagtcaagtggtagaagaggagccacattgtttttgaatcatctgtatcccttaccaggctgtgcaccgctcgagtctggtgctgttgtctcattcatttttgtctgtctagtaccctccacagtgcctggcaccagtaggcactcagtgtttgtgggatgagggcacgagtcttattttcaaacaattggttatgttaaaacacgttaaattgctgaatgtttgtgattgctttctcagtttttctcagggaatatgtttgaaaaacaaaatctgtgcatttattgtagacccattccctgagtattgacgggtgacatggtgctgtacatgtgatttagaggttttcagtgcacacaggttgtgggggaggctgagaccatcctcagtgtcttagggagataagaaagttcaatctctgcttgtgtatttactagctcacttcccttttaaaatcccctttctagactggaagggctatttaaattcaaaagctatccttgggttcaagcaaaatcttaatgactttagggacagatatttaacaggtggtttagatagttaacactcggctggtggtgaaaaaccacattgaaccacattgaacatggggttccctaataattttaactgagctcaaccttcatctcctttatcgcctctcctttatttaactatctactggagttcaaaacaccactgtaggaatggcttttcttcttgtatcttgccccccttccaggctctgccctctgagatctttccctagacaccagttagagaaggttggccttccctgaaactctttattcctagatccttttgacaccactagtaaatcctgctttctttgctgtctgagaattttatgaaggtcacttctgcagcatcggcctctacaccaatggctaggaagccgtggcaggactctgatcccatttctagtattgctcttaaaccagctctgcctgcaaatgtcagagttttagacctcaagccctctatctcctgaaagtaattgtgacttgtagcctatcacctgggtcagtccacagggtctgctctgcctgtcctgatatctaccatattcgtcatatgagacatttacctatgtgggagggaaaatggtatcacgagtgtggccaagaataggtagctatttctaccgggagtggaggaggtcatttcatacccctacaaaagaggatttttctgttaccccctctgctataaatcaaatacacacttaacagttatatgccatccaggctcattcaacaaacatttgccgagaaccacacagcctgggtgtaaaggagttgggggaaatagggacatgagacatggtccatatgccctcaaaaagcctgcaatccacagaaggtggaaatagtgagaaaggtacagacagagcctatgaatcagtgcaatataatcaggtctgagcaaagtggagccaagaggaagcaatttgttgttgcctgaggctgtagagaagactattcaacaggaaaggcagatgtgggttttcaaagagaagcaggattttgtggagaggagaagatggggaagtgctatcctgttagagaaagtggctttgtaaaggcccagaggcaaggaccagcatggaggatctgggaagggttgtggtgtggcatttagaaaatatgtaaggccaggttccatctcggagggtattgaaagccatgctgagacatagacctgattaagtaggcaataaggagctgcgtacggttgtcaagcaggggaaggagaaaacagctgtttcttccaaagataatagtagcttaactgtggagcaaagaagggagcgggttggcgctgtgatggataaataccatactctcaccatcactgcactgaccacactgagcaaacaactctcagtgtgaaagcggggaagtgatagtcctaagggctgtgtcacccgggcggaagaactgcagttgcatcacttgtcctgatcattgttaaactgagcgtgggctgggagctccttgttcctaggcaaaagtcctcagtaggagactgtaatcatgcctaaaattacttcattattggaaccagtgtttgatctgtgattaagagctggatgaagaaatcaagtaatcagccattgaaattgtaaccataaattgttctataaacaactaacttcccctgtctcccrgactccaagcaacaaacttgaaaacagatacttttcctgttgtttcttcacccgatgggttttagccagtgcttttgagccttgcagaagtcagagggtaacacctgccagccacagtgcccctttgtccctcacatatggatcactcatgatgttgtaccttgtcagactaagacaagatacccaaggagtgtggagctgttaaaaatatgcaacttattaagatttgtctagtgagggtaaagagatttatttttaacagaactggggagaaactgcctggatttcaagataaagaatagagaaagccctcagcggttgttgccttttcaatgatgtgttagaagtagcttttgtcctgaagggttttattttgcccaaagcattcaaatactacagcccatagagacatttctgtaaaacaacattagggcttattgactttttcttgtttggggttgcgctgtgcttaaccttccagatatgtaataaatagtaacaaattttaagaaagatctaaactttgttttggggaagaccatggcagcaaccaggcaatcttgacacatgaagtaactgactgtggaaccacaacctgctttgctcctataatgcctagggacaaccagacaagagcggttaagggagttatttcatgtgatcatttttctgacgttaagaggtagcacctagtagttgctcagcaaggttcattttcctcctctgttgtcatttacagcccaaacccttagagatcataacatggaagagcccttaagggtctgcccaaacctttccattttgcaagataagtaggaaggctcacagaagttaatgacttaccctttgtcctcgactggtccttagcagaagcagagctagaatcgggtctacaatccagctgctttgccttcttcgatgggagcagtacttcatctgtctcttgggaataactccagtagcccagtgaaaacattgcctctttcacaaaaattcactttcacaagttagcatccttggcacttggcataataatgcgaccaacgataacatagataccactttatagtctgcatagtgcttttcaccataacatcttgtgttgaactcccattgttatccatggctctactggtggcattttaaaggacagtgtgttgtagactgggatcccttacccaaagaggagtttgaactccttttttaaaaagagggctgagaaaggtttcactttatgttcctgtaatttcttaaaggatttatagataaaaacattaaaatattctgggtgtaaaataaaattgtctcagaatgggaatagacttaaggtacagtgaggagatataggagacaaatcaatggaagatttaaagtcaggaataaatgctgataatggatttctagatacttctcttgaattccaaaaacacgaaaaataaactgttgttactggggtggagacaaaacagaagaagataaagagaacaggctaaggagaaaggaagaggttaagggagaaacctctgtatgaggaacaaaccaaagttgactcttttttcaaaattcctacattctctgggataaacagctaatgtttgaacataaaacagctgaatctcccagagcttcaactactttctgttttggaagttagtactttgggaaattgaagactctttccatttcctagggaagttgccaatttagggttttacatcagaggttggcaaattatgtccccaggccaaatccagtccattacatgtttgtttgtttgtttttggtatggccagtaagctaataatagtttttatattctcaaacaggtgaaaaaattaagaacaatgttttgtgacatttgaaaaatatatgcaattcgcatttcaatgtctgtaaataaagttttgttggaacacagccatgcattcatttacatgttgtgtatgactgcttttgtactgtaacagcagagtctgcaactctgaaaagatttactatctggccatttacataaagagtttgtcaaccgttgctttaagccaatcttttggtttccctgggtcacattggaagaaggataattgtcttgggctacacataaaacacacgaacacaaatgattgctgataagcttaaaaaaaaaaagcgaaaaaaatctcataatgttttaagaaagcttacgaatttgtgttgggctgcattcaaagccattctgggctgcatgcagcctgcaggctgyggtttgtacaagcttgcttcaaactgaagtatcttcatgatctgaaagtgttaaataactttctctagagcccagctcttaaccagaggggagtttagacattgggataatctggttcaatataacttaattcaatgacttgtacttagaatcaagttacaaaagtggaatattatgcttcctgtctaactataaattgtattccatagaggtacgtcaaatatttcaattttctaaaatgtaatattaagcttcccagtaattcaaaatgagattaaggggaattttttttcatttgctctttgtaacaaccagcttcatataaccagcagcaaacaatggggtccccagactgtttgaggacacttttgtatcgattagctgtagttaaagcctgaatggttaagtcagcaatttgacttaaaaaaatgctgtagattctaatttataatacctctacagcaacagacttcctatcaggcagattgtggagacaagcagttgtttgtaccgatttctggctaattacttatctatttgatatggcatctcccaccaaaatgccataccaagctgtgctttccaagggcatttttgaataatgggattcaaacaggaatttaaatgttcacccgaaccttctctctcgatctgtgcactaggatgaaggagggttgattccagcttgggacagatgaccaggaggtatgggacagatgaccaggaggtaaatgaaggggttgaggatcagtattggaaggtcaggaaggacacattttacaagttgggacattcaacctatgaatcatttcttatgcagtttcaagatatattttgcattgattagctgtctttgaagcccatacagttaaggcagttttctgccttctgcctcttcactgagcacctgtattagctagagcttagatctaagaattctgtgacttgctgaaatttattctgctagctaagaggaccaagggcctttaagcttcagatttgcatcactgtctcttcaaactagattactttaatgagtacttgatatggtttggctgtgtccccacccaaatctcatcttgaattgtagtttccataatccccacttgttgtggaagggacctggtgggaggtaatttaatcatgggggtggttaaccccatgctgttctcatgatagggggtgagttctcaggaggtctgatggtttcataaggggcttttcccccttttgctcagcacttctccttgctkccrccatgcaaagaaggatgtgtttgcttccccttccaccatgcttgtaagtttcctgaggcctccccagtcatgctgaactgtgagtcaattgaacctctttcctttatarattacccagtctkgggtatgtctttaytagcagcatgagaatggactaatgcagtactgtacttttgtaattttcataattgtttcttacattttgaatcaatagtttcataccattatgaccatatattttcaattacatgttattttggagaccatgtcatttttcatgggttttcatagctctcttacttttggctctgtggagcctaggagaaaggttcctgtcatccccatcccctggcttttctgctctgctaaaatcattataactagcttaaatttatatttcaggaaccttctgtaaaatcacaacagagttatcttctgatgagtctggttgctagactaaagatttgtatgaggattgtcagaaatgttggctgggcatggtggctcacgcctgtaatcccagtactttgggaggccgaggcrggtggatcacctgatgtcaggagttcgagagcagcctggcgaacatgatgaaaccccgtctctactaaaaatahaaaaattarctgggygtggtggygggcacctgtaatcccaactactggggaggytgaggcaggagaatcacttgcayctgggaggcaraggttgcagtgagccgagattgcgccattgcactcagcctgggggacaagagcaagactttgtctcaaaaaaaaaacaaatgttgactagtgtcttctgtttgggctggttatagacaacacagcttttgtcatgatttcttgtagggccactggtttaagttccaaatgttgcacctgaatactctagaaactatcgtttagctgataaccttgaataatttccagtcagcccttttttattccaaaggggtgtcacttaagatcaaattcattcagagaagtattgatccgccagctgccactctccattaactctcccctcccccagcggctgaaagagtgcccttcttggggccaataaatgtttatattgcccctaggtacgattgttcctccagcaagagccttcattaagcccagcaacatgataaggtaatgaggcttctgctttaacatagcagaacatatatatccaaatgagcatggttccctggctctccttttttattatcctgccttctcccaggagaaagtagtgcattgaggggaccatcaaaactcctcctcccttccccttctgctgagttccccaagacacctggtctcaactcctattccaaattgcccagagaaagagagatgataagtggacagaagacatacaggcggcatggcaaagaagctcaagactggcaaagaacgaaaagcgctgaatacaatggtcacaacagaggactcatattggtctagaagggatgcagaaagccagactggtgtggactaattatttctttatttcttctaaacattctatgactgagcttgaagggtcaaggaagatggctcattggagtgtcctagaattccatattacaattcagtagttttctttgaaagtatggaacacataatagatatatctttgtatcactagcattttgcccgtagcaggtggtaagtgggttgttattgcaacaacagtagatctgagctgtgaacttatacaataaggcctatactgccataatgagtatagcaccagaatcatcaccacattttaattataaaaaatattattgtactctgccatttcccacttataagcatcatgactctgtgaagtcaggtggcaagcttggattatttttatcctatttttcatttgtgtgaaccaaggcataccaatcacttggggggactggtgtgatggcttagaataagagctccaggttttcagctctgcatgtggcactcttctcaacaatctggatgaaatcaggagctagcatcacacactgttgctatttacaaaagcctaattaatacctctcattccctaatgagatactttttctgactccacagacaagcagagccaagcaagtgatgtcagaatgccagagtgaattattgggcttgtgtcaacccaagcagagatgaaaaatcacccctgtgaacttgctccaggagcaatcaaagggccaaagttttaattagtgagggttgtgatttacatttgcattcagcatcctaagaatctacattagtcttcaagctcctgcacttccctagttgttgtctgacactggttaggatagttaatatgcttttaaataacattatatttaatggacctttgaaagcactgacatatgaatccattttctcacctgtcagcagaactgttttcattaaagaagtcagtgaaagaycacatgctgagaggagctaaaagttggtggcagggaacatttcagcttggtatcttgtcctttcacctatatctactgtgaaaattaatgaacagttatctaggaatactaatattaggattgatttctaatcaaagggaaaatgatgtcaaagcactatagtgaataaaggaatgcaatggatttatttttaacaaacatagcagaactgacataatggaaaagggtgctgatttcttcaacatattcaacatttgcatgttgctgtattggttagtacatttgacagctgtagcatgttctcttgactctgcttggttgagagatatctttgtcctttgagagtggattgaattttgggaatcagtcaaatgtcctgagaaggtaatgatgatgtactaattggatgatcagactgggtcctatggttgggggccagaagtgaggtgtgactacacagtcatgagtgatatttctcatgtggctcataactgtctatgaagatagttcccagggaacagctctggaaatgtgaacgccagcagtatccttggaatctgtatacagcttctctggrtaacaactttgagaggaccagcatgcattgggtacaacacaggccctcgtgcgcttgctaaagatctgcttcaatactttgtcacaccgcctacactggctccacatttgccaagtaactatgagcatggttctccttccaacaatctggatggagctagcatccttcatgagtgtaaatttacaaaagtttaattaatatatcttgcttgctaatgagttattccttttgactccatagacatgcagggccaaatacatgatgtcagaattccctgagtgaattattgagcttgtgacaacctgggtcagaatgaaaaatcaccttagtatatttaatccagaagcaaataaagggccagagaattaattaatatgggttttaatttgttaaggtcttaagagggagcctctgtttgctctggtacctttttgtgtgtgtcctctttgattacaggtgaayatgcctttgggaaaagatatctacttctttactgtgctcctcggtaacctatagacaagaaagaaaaaagtgggttcttagtcttcagagagcatcaaatcattgaatttattgtttaggtgatgagccaatgccctgttcccaggaataggtttcatgaggaattgctaggaggcatagaaaaagaattgcacatagtggaagtagatgatgataaaagaaaacaagtgctagagctggacaacagagcaacaccccatgagtcctgaacaaagaactagaaagaaacccaaggaaaatcagagtgcttctttgcagcctttggctaagtctccctagctcccaaaaggatgtagacagcagataacactgctgatgagagggcaggatccagacaggtgagctgtgctagggaaggggctgccaaggaaagccccaaatgcaatggtacaaggtgatccagtgggagcaatccttcctattgtcccatgagcaggtgctttagggagccactggtccaaggcctgcattcaaattcatgcctcctggtttttcaccatctttccaggatcaggttagatcacagaaaggccgcccatttgccactttagcttagctgttactggcctaccttccaatgtggtatccccagctgctattaaaagaaatggacatgagtaaattttactgaatggaaagtatatcccaattaacttgactttttaaaatgtctctctatatacatacatatatatgtatatacatatatatacatatatgtgtgtgcgtgtatatatatatgtatatacatatatatacatatatatgtgtgtgtrtatatatatatatatatatgtatatatatgacactgtcctgtggagactgctcctacatatcctgtaaaaatcagtgcttcatagttttggcaccaggaataagtttgattctcctgacaaaatgataccttctctttaatcacaagttgagaatgctattatccagcgtgtttcttttaatgtttattgccttcgttgctgggaaactcagagctaaccccagcattcaatttcagtaatcttgctctttaagattttgagaattagtctcttatcccttctaaaatatttctactgatcttgttcttccccagggtcatattacaggtacgctttaggwtaagctttctcaaaattggggtactggatgggttataaactataaaaaatagtgctctgaccctagtctgtgatggtccgaacacaccaacctgtgttcttcctggcccatgctacttgctctgacctggtgctccttgaaataaaatggatttctgttagttacagcccctatttttacactagagttgatgcttttttcctatgttagtcatgaattataatttctgtatgcccccaaatatcagaacaagtggggatggggaggcaaatagcggcatgcatttctctaatatttattcttatctctggagctggttgtataaagctgtcaagaagaaaatttccacttaaaccagaaccttccagcactaggagtgctgacctgtagcaattacgggtgctaggattgttttacttggtgtcttacttgactttcagtttgtgaccatcacttgacaggattaaaaattgcctctgttctatctgctaatttcttgaaggggacagcctattccagaagagacagtctgagcaggaaacaaaggctctgtactgtgctcagaaactaaaactagataggtcagggcccatgcctgaaagcagttggttctccacagcccattgttatccataggtcatggatacatcctggcaagcaggctgtaaaggacatgaccccttaattgaaataaaatgcccacctaggcatacaaaggatgagtagagaaagagtccttaagggaaatttttaattgtttacctcgattgattgattgattgattgattgagacagggtctcaccctgtcgcccaggctggagtgcagtggtgtggtcatagctcactgcagccttgacctacctggctcaagtgatcctctcatctcagcctctggagtagctgggcctacaggcaagtgccaccatgcccggatcattttaattattattattattatttagagacgagccctcactatgttgtccagacttgtcttgaacacctgagctcaagcgatcatcctgcatcagccacccaaagtgttgggattacaggtgtgagccaccgtgcctggcctgggaaatttttaaaaagaaacagcagaactttttgagagtaagaggggcatactccccttctggggttttatttcccccttgggcttctgaaactttaatgctgaactggcctctcacaagccacagacaaagctgagaatgtcaaaggtaactaataaactgctctgaaaaaaaaaaaaaaaagtaaacgtcattagagtggatggagtctaaaaatccataattctaagaatcccaggagaagcactgaacagctttttaaagccatttcttttgcccccaagccacaaaggattgtttatatccttttgaggcagctagctggatgcccctcttcccaattctgggattccctgagataaatactatcttgttcccttatatgccaactctactttctgctgttggaaacttctttgctacttgcagggccttctcctttcagatctgaaggtctggtctacttccccaaggcatgatgatagactgacgttcttgagccccagtgaaggttctagcctttcacagcttacattatcttcccatctcacatagaatcattctgtaaaatgtatatttctgaggtgtctggactcatacatcctccattgagagggggtctgaaaattgtttaatatagtttaacatttatggcatctcttccttgacagtgtcagtaacagagtgaagactgccattttctcaccaacgttaagggaagtcagggatagggcaggttcttcctacagtagcatctggtccaccagtactgagaacattctctgcaaggagtttgctctttatgtcatttagacattagacattttaaataataagcatgatttctacctttcatgtttttatcactggagttttctacctctccactcctccatctgctctaagccaagaagtgcctccagacagtgacatcttgcactgtgattaaagtgcttagtatagagaaatgagtggacaccaggtttgtataggtttaaagactttattaagtaagaagttgattgttttgtggctggagagaaccagaggaccattgtttgaaagctgacaacctatattacaaagaggtgacggagatgatatcatgactttcaggaagcacaggcttttggaagtgttcatcaagtgggtcgtggcataaggctgacttaaatttttttttaatgttttaatttgttgtagagacaggggtctccccatgttgctcaggctggtctcaaactcctggcctcaattgatcctcctgccttggcctcccgaattgctgggataataggcatgagccaccatgcccagcccttaaattctgattatatcagagccaagactttcttgacgttttgaagccaagttgagagcaaaacgacccatttctgattttctacataataaaggaaacaaaccaggaacaataatcaaaggtggattttttgtttctttgggaagttataaccatatttgcataaactttaaaacagttatgacatctagttgaggtactaaaacagtttctttttttaattaacttttgttgcaataaataaggccagactaacaaaaatatatccaaagccaataattctatatttgtttggcacatgttgcttccttcagcatacttcaggtcatctttgccaggaattgagaacaggttgcatgtaattacaaaggctccttggtgggatgaaggacaggatgactgacgaaataccacagctaatcagataagtgcaccagggaaaaagcaacatgtaatggctggaaacccaaaacacaagactttttttttttttttaagacagagttttgctcttgttgcccaggctggaatgcaatggcgcgatctgatcttggctcactgcaacctctgcctcccaggtttaagtgattatcctgcctcagccttcccaagtagctgggaatacaggcacccaccaccatgcccagctaatttttttatatttttagtagagacagggttttcaccatgttggccaggctggtcttgaactcctgacctcaggtgatccaccgactcagcctcccaaagtgctaggattacaggtgtgagccaccatgcccagccatcagcaaatgagtctattatgatgggaatactcatgcccccagactagatctagtttctcctttgatcccaagccttctggtgttgttctcctttgagcccactgtcccttctctggcctgtcctccttaatcttcttccaaggctattctcttctcatgctacacactctcctcatgtaatctcttctaaaggtttgaactaccatagactcccaaatctctaaagaccattcttcagctgagatctctatatccagctaagttctgcatccgtctatccaattgccaactaaacatcttacctagaggtaccaacaggcacacaaaactcaacatagctcaaaactgaacatgtcatcttcttccacatactctccccaacaaaaaaagaaggctgtgttgcgggaagtcagggaccccaaacrgagggaccsgctgaagccatggcagaagaacgtggattgtgaagatttcttggacatttattagttccccaaattaatacttttataatttcttatgcctgtctttactscaatctctraacataaattgtgaagatttcrtggacacttatcacttccccaatcaatacacttgtgatttcctatgcctgtctttactttaatctcttaatcgtcatctcrtaagcygaggaggatgtatrtcrcctcaggaccctgtgataattgcgttaactrcacaaattgtagagcatgtgtgtttgaacaatatgaaatctggccaccttgaaaaaagaacaggataacagcaatgtttaggaaacaagagagataaccttaaactctgaccgctggtgagccaggyggaacagagccatatttctcgtctttcaaaagcaaatgggagaaatatcgctgaattctttttctcagtaaggaacayccctgggaaagagaatacgcgcctgggggtgggtctctgaactggcccccccccaggcgtggttgtcttctatggtcgaggctgtaggggtgaaatagaccccagtctcccatagcgctcccaggcttaataggaagaggaaattcccacctaataaattttggtcagactggttgctctcaaaaccctgtctcctgataagatgttatcaatgacaatggtgcctgaaacttcattagcaattttaatttcrccccagtcctgtggtcctgygatctcgccctgcctccatttgtcttgtgatattctattaccttgtgaagtatgtgatctttgtgaccaacaccctattcgtacactgcctccccttttgaaactccctaataaaaacttgctggttttgyrgcttgtggggcatcacggaacctactgacatgtgatgtctcccccagatgcccagccttaaaatgtctctcttttgtactctgtccctttatttctcaaactggctgacgcttagggaaaatagaaaagaacctacgtgactataggggcaggttccctgataagactgccaacccttcttgtatggctgatattggcaaatggagccacaattaattcatgttacagcatctttgatcccacaccttctggccttgttctgtactccgtggtggctatggccctgtctgctatatgctagctaagttctgtcaagtcagtactgcatccttggatacttaccttgaatacatcccttctctctggaccttacttttctatttctaaggattcctctaactctatatttctaggcgtctttcccttgtctggggaggggtcaataaagagcctcactctttggctcagttaagcatcttgggtttaaccagactgtgattaaaaactcatgtgcatgaagcgaagtagattggtttaagttatacaaggtttagcgtttaacagtgattagtggatgatataaaaaagatgtgctttgtttccataaattgtcagaattttagtcttctgttttcatgcacactaaaataatgctcaattttccaaattgtaacacaatacaaagaggctgacaattgggtttcacttggaaaggaaaattaaaagtggtcaatacagatcacagaatagataatatttgcaaaggagaccctacttagaaataacacgcattcaaacaaaggtatgatgcctgaatgtgtgataactaagtagtttaaaaattgaaatagtttcatctgtccctgtaaataaacgtgaagagaaaagtacaaagtcctttggtttaaagggtcagtgtttttaacagacacatgaacgcatagtttaggggaactttcctttctaccccagaaggcattttcaatatcttgttggcatggcccttctacttgatttctaaggagccagatgcactgtttgcttttaagacaaggtctcgctctgttgcccagcctggagtgcagtggtrcaatcacarctcactgcagccttgacttcccaggctccagccattttcccaactcagcctctcaagtagctaggatgacaggcatgtgccaccacactcagctaattttgtttttgtttttgtagagacagggtattgctatgttgcccaagctggtcttggactcctgagcgcaaacaatcctcctgcctcagccacccaaagtgctgggattacaaacatgagccaccacacctagcccagatgcacttttaggtatagatgcatttggccccctagaaagtactcaagatgccaagttcagcaacaaggaaatatttgaatactcttggctttgggcacaacatggagctagagaatgggtaccccatgccccaatgtcaaaatcagcagtcttggttaagtaggaccaaccctgcctcaatgacccaacttgttcaagttctagctataaagacagaatatgacctcagctcttcctaatttcagtgcccaagctttttccacaacaccagggctgcttccagttagtatggcaacaccattctccagagttgctaattttcactggttttactctacttgagtttcctatctgtgggcactagagctaagaaatacttctgcaataggctgtcactttttagtcataaagtgtgagttaacatataatttgaacaaaaagccaaagccacatgactcctttagtaaacctctaacctagtttgcgtcagtcagtcaattcaattcagtaaacatgttagaagcccaatttaccaggtatggttttcagtcagcaggtgctgaaaaccttgtatatggcaagtgtgatcagagatattgtgaacagatgtgaatacaatttgcccttgtccttaaagaagttaatatgtaatgtgcaggcagagtggacattcttgaaaatcccataagaacatattaagtagaaagtgaaacaaagtggtaattcaccagggaggaggaaatgagcctytccaccaacacttagttcgtatcattctgtagtgtaaaatcagaatctcacctccaaatgaataggctgactgacttctctttgttctccgtgtgctaattcttgccattgcagttggctcctttggcttttcctaaaaagttcactgagaattttctggcctactctggggactccctaatgtgtaatgttcaccaactaggctccagttgtgaatttttaattatgccggatcattttcagtaaatagaacttcgggctcaactaatgctgtcagatctaatctttgtctcacctgctatggagctccactctgtggtgtttgcagtaattgccacttccccaggaaagaggagcttttgcagagatggatgtcagcagccctttgcattctcatctgccctcctcagaagccctacagcggggcactttatccagcagatttgaattttgatgtttggaaagtagagacaatggatacagctgattgttctctttcaattttcaccaagtgtgattgtctcatgcttcctgtgaggcagtagttctcaaagtgtgggccatagacaggaaacattaccgtcatctgggaacctgatagaattgtaaattctcaggtcccatcttagacctgctgaatcagaaactctgggggtccctgccacctgcatttaaaaaatactctaggttatctgatgtatgattaagtctatgagcccactattgagagagaactgtttcaaactaaggataagcataatttcgttctattttgtgaaaattctcataactcatttttctgatttacaattcttcaaaaacaaaaatcctaattttcataatggaaactcacatttacctttgctttccctaactttcccaagcataggcagttgtttcctgttttatttccctagcattttttcacacttgtttattccacttggtacattacattgttatgtagctgttaacatgcttgccttctccactagccttggggccacctgccggcgggaaccttgtcacactcatcatagtatccccaaggctacatagtaaacacacattaaagggcacagagtaaacacattcaatattttctgagtggataaattggttaacattgtataattttcaaaactaggtaatggccttaagaagtacgactggcagaataggaaactgagacccagagacattaaaggattcagttggtaagaagttgcagaggcagggctaacaacaaaagcttacctcagtatgggaaaggtgatggccacaggtccctcaaaactggcctaatacactaaactccactcaggaagcttgggatactttggctcttcaagggcaaagcccttgatttactcccagacaggttgctttctgccccaaaaccaaggatgctaagagagggtagctgaggttgccagttagtgagacacgtgcagagactgagaatcaagagggaagggaatcatgtaaaaaaaaaaaaggagattttagtactattggaggtataaattctagtactcggttaggccgtggtaaagagaaaagatgtgaactgcaagtgaagccaaggtagaaagctcaattttgctcatttgccagagtgtccttcttacaccaaggtgaaaacagcataggatgtactctgtgaggtatttgttataggaatgggctgccaatgattgccaccaatctcttggtacccagcttgccttgtcatctgtaagcaatctgggtgggctgggagaatggggagaagcagactatgggcatgggatgaagaaagccactggcctgcaccaggaacgaggccttcactttccctcattaaccttagcattaatctctacataactaagttacctgatttagatgcttttacttggacctctggcatacaagtctttgtaacgcagttgtaaatcctcatagagtggggtgggagtaaacagattctggcataggatgcttcttgaaacactccttaatcatagtggatcactgtctcatcaggcctcactgtttatctcatggctttgagtcccactttggagcaatgaccgcacatctgccttgtctttcttcttgagctccagttccatttctctaattgcctactgggacactgtccatcaataccccaactcgataggccccaaactgaatccgtcatcttctcctctagtccagatctccctcccaactactctctctttcactggcagagtaaatttgttctcagtcatccaacttgcaaaccttctcagtgactttcatttagggtttattctcattccccaaacatagtcaatccccaagttctgtcatattttcttttgccatgccaggcatagttattttccacccctataactgccattccagcccagcctctcattatatttcagatctcaattaccccaaaccatccaattccataactatggtttctgctcctcaatccctgatgtgatggagaagcccagagttagatgcgaacgcaacagttttataataccacttacaattgttagataccgttctattggcctctgatagtttgtaactacggtccatactgttggtaaagacacatgggattagtcagcttaaatgagaaaataatataatttagaaactgactcatgttctttcttgatcccaatgaggcattcagggacgtgactgtcactctctgggcaaaaacaacatgtaccaagaggtgaagagagcaaaatagcaacaaaaataaatgagcccattgctgcagtccctgatgccctgtggtgagctgctagagtgaaaagttaatggaatgggagagggcaagataatgtgagcgccctggttgccttttccaagagcttttcaattccagagtaactgtgagcttcattgtgaatggtttacctgatcagtataattccctctcctttgtagataagaagactaagacagcaagaagttaaatgccttgctggcagccaggattagaacctgggattcctgaataaatgctttgaacttatgaggctgcttctgagagatcatagttacactgggcttcatagcaataaaaatgagcttttcccttccctcagaaatcctgttattatccatagttaggcaaagggaaactagaagaggatgctaaataaaagcacatctcaatgaactgaactatctttgccaggtgattatcagaaatatagataatgagcgtaagatacttaaaggggcaaggactctaatttagacacctcgggcaaaagaagtgaaaaagtttggaacaaagaaaaccactcaggacataacctaacaagatagaaaaaaatgaaatgcgaaagtattatcagctttaattaaaggaaatcaatatttgaagaggtgtcttgctcaacaatagaacaagggcaaacatacttcagaaatgtgagtctcttagaaaagagaaaagcaagttttcatggggaaacaaccacgattgaaaaacctttcaaaagatgacgacttggtgtatctgttggagaggggcctgaagcacctgttggggaggccgactagatgagcttttatccctgggagagtctgttttaagtgcattttttcagtcagggagtgttcaggagcctagaggcatctctagggagtaaagaatagccagtatttccctcagagagacttgaaacaaaccctcaacaataaagtgggtttcatctcagttatcacttacaagaacacacattggaaaacattaaggactatacaaatgcaacagatgtgttatttcagaggcactctgcaaccatccaagcaagcttgcttgagaatcctttctaagctcacgttttttgtgatgcacatgatgaccaaccttcagtgactggagtccaattctcccagaccattcctcttcagggatggaagatatgtgacatgtgtcaccacttccttctctcaaactggtgcaagacattaatactcaatcatgacacttctttccattgagcccaaatgcagctttttcatttatttgttcaatgaatacctcttgactgcccatttaaaagtgagttggagagacagataaataataaaatataagcaacactacgagcaccacatgctaagtgcctagtaaaagatatgtagacaataaatatcatagccaaacctgttctcttgaaatacaatttcaatttcctgggaccctgaaaattaattcttaaaatttcagtactattgtagttgtatcagcacaactatttttcagggatctgagatgaattaattccgaaaagagcttacaaaggagatgcagaagtytctatatgccacccatcaaaaaagtgagtcaggtgtgttttaagccacagggttcttctcccacaattagctttgaccaaacagcaaaactcagattggagtgggtctgattgccattttggtttaagtacactggataccatttcagcatcaaatcattcaatcagaaacactgaaaatgctgaagagttgggttagttgcaattttcccacctgaatagaatgtgcataatactgcaaattgttttttcacttttgtagtgctggagacatttatggaacctgtgggaaagggttttcttgacagatggagatggacagccaaccagacagaaggagagctagcactcattaacttttcccaacagaaactcacctgtaattgttttcacaggcctttaatgaggcttggttgtgaggcactagagagaggaaagcagcttatccatagaaaaggatagctactcaggtgaggtagaggaagcctggatccatagccttggaaattgtaggacataaggtttgagattacaattcaaagacaagatgaaagtgatgagggctgacaagtagtctagagatgggcaaatcaaaagaataactactggggtagatctgtttcggttatgtaagttaggaactctaaatcaaggagcacccacccccccccaccaatctcatatatccaaaattatatctatgtgtctttgaaacaggttggatttattcttgtaaatccctgggattgcgggatgtttcagtgaccagagttcttggcaggatcttaatctttaggtctttgccccaaagatctttgaagttcccagacagtctgcagctgcagtattttctctttatttttcatgggacccttctagaaactgcagtgtccttgatatcactgctttagatctccttctctctcaaagtttcagaattatggcatcttgcccaggcttatctaactgacctggattttggtggaggaatgaagactttttctgtcaatgttaggtaaacttttctataccacagtcattagtacatctacaaaattaagctccgaggatccaagccagccacaagttcttcttgatccccctttcagatacatttcatcactgttaatggatctgttatttgcacagaacaaacatttccagttacttgattaattttacccctattcttggtgcaatgccttccctgtgtgatttattcctgagaatgtttttgttttcatttccccaatatctgtacttgggggatttggcagtaggttagaggggcccttattcctatcttttaaaggattactgctccaggaccacctcccgctagagcaccagttgacaataatgaggctgccgctgccagctgatagctttccctgatgtcctactgtgtcctgcattgagcttaaacagggtcaattataatgtaaactatagaggaccctagtgcccaaggcgcagacatgggaatttagcagtgggggattttgctttatcaaaaaaaaaaaaaaaaaaagtgaatgaatgaacttagtgactcagcacttagtgatttagtgatgacttaaatgaccacctactctgagcccagtagtgtgcatgagacacatcaaaaacatcccttgtatctgaatgcttccagccaagtttcccactgcctactgcttaagtgaggggctaggaggaggaaggctcagtggccagtgaccagggtgcaagagtgacacagagcatattagcatattgcattctttgcatcaggctatgccaaacttctggaagagacaattttgaatttgtgaggaggatagccaggatggtccctggtctcaggtccctaaggaatcctttgccaggaagtcatcgaggacggatagaggcagcaccaaatgaattcttcagtccccactcagaatgtggccacattctggtgagtctgtgagtggtacggggtaatggtccctgcactgtgcaggaatcccagcacttcattccagtggatttctgccccctcctctgggatagaatgtgtgtccactctctccagagccatccactccagcagcagagccagagctcacatgggtatctcccacttctaagagctgcttttcataccccctagacgttttttgttttgttttattcttgagacggagtctcgcactgtygcccgggctggagtgcaatcgcacaattttggctcactgcaacctccacctcccgggttcaagctattctcctgcctcagcctcccaagtagctgggattacagacgcccgccaccatgccctgggtaattttttattttttatttttgtatttttagtagagatggggttttgctatgttggccaggctggtctcgaactcctgacctcgtgatccgcctgacttggcctcccaaagygctgggattacaggcatgagccacygcgcccagcctagacactgactcttaagtgcttggacagttgctatctctctgacttttcctgatcagcctttttccatgcccacacacatctttattacctttgcaatcaccaggaacccatcattatctcttgttccaatcatatccatgaagtcatttgaagctgatgggtgcatggcagaatatcttttgtgacccccagcccaccccacatataaatacagctacttgcagacatctattttggagatacttaaaaggttcataaatatctgaaaagatgtttgacattttctgagacaatattctttgccactggaaggttctattatacacattaaaagcaaagatacatatttttctttcttaccttcactttttataaaaggttatgctgacgtagaacttactaacaaaaaaaaaaaaatcttcctgatgaaatcaggataaataattccacacatcttcaagtggagagaaaggctttgaattggtttccatggaaatctgaagatgaagtaaaggaataatttcaaggcagagcagctgaactgaagataatggtaaaatagtttgataaaggaaatagaataaagtaatcaagaagactccaatcaattattcctttttgtttacctttaggtgattaattcgtctgcgtttattaacctgatgagattaagcaggccttccttgtgatttatttcgtaattgtttccaaggtttgacataagctgtggagttattgaaggtggagatttaaattcaattactcatgaagcaggtggtgattctcctgaaagaatatctgaattcacggacttcccatgtaacattatgagtgaaaattattaattcatctgatagtatctcccaaagacttttagaagtcatttggcatccacatacttcaccaaaagtcagcagcttcagaactgaacatgtaatgaagagaattcagtgcctggaaagaaaggattttattttaaagactagttatttttatactttttttttaaaactagaggcccccttggggcctgggctgtggtgctatcattgatggaatccatgagctcaagctttgaatgccaaaaggatagctttctttgaacttgaccagtggttcccactctctacctttaaagggcacaactggataagatcatactttgacaggagagagagagagagagagattggccagggggtggtggggggatatgcaggctggccttgagagtctttaaatgaagtgactaattgctttttgtctctgtggtccttgttgtgtatatgttttctattctttctgtgggtatagtaaggataaacggggttctccaaacactaacgcaggcgccaactctccgtcatccacaaagacccggaacacatctaagagtgggaagtaagtgaaaaagtgctcctgtacatctgacatagctgtcaaaaagtcaagtgctgtcctccttttgtcatttattcatattcattcaacaaagatttgtggaatgtcttctgtgtgcctcccactgggctcgtcactggggaattgaaacgagcaaggcatgtgtcagtaatattgggtgcatgaagaactagggaagagggaggagagggatggaaaagtcaggagatgactctggaaagatagcttagggctgactgtgaagggcaaggacataagtccataagggcaatgtaagagttggattacaagttttaagaattaaagcagcagcagcagcagcactgatttatgacttacaaagtccatgaaaacctgtcctgatccatacactgagtttaggcttgagttagaagaatctggtaagcttttccataaatttcctggtttaagtacatttatgttttaaccatatcactgatttatatgatatgtatattcttttcctagtaactaatatgcaccaagtcctacatgaagctgtttttttggtattaccaaaacttgtatgggctgaatatttgcgatattagattgaccttttctgggcttattccagaagacaacaccagccgatctctccctttggcttcagcaaagtgtggcaaactcaggcagtgtgatcccacgcagatgacatacctctaattagacacttccccttggaagttgcttcaaccctgtggtgaatggctcgagttctccgtaagctctctctccagggtgtggggcattgtgacasgcagaaactcagtccagaaagagcacccagcctgcatctaggagaaaatgaaagataccttcatcatgctaaaagctctaatctagcaataagatatgtcactacaagagcacagctttgcaatgaaaggtgaatttgtaatggtcatatattttatgtattcagcattggaccgtaaatgctgcactttgaatatgatcttatattcaattcccaaagtgaaagatctactggctgcctttttttccttcttttcctctgaataccatttcaggtttgcatataaagttgaatgcgggttatcttgcaaaatataaaaaacggtgttaaagacataaaactaaatctccaagcagttagaactcatttcagttatttattgctgagcaccataatcaaaatgctgtataaattatgaaggaagggaattgatgcacacattcccaggcagctgaatgttttcaaattagtcccaattcattgttaacacgcactcttagttaacagggatggcattgcagaacttcttttaactccatgcttacaacaatggcagaccctacctgggcaccctgtacctacctgtcacaccaaaaaccacagggcacaatctccatttattagtccctgatgtataattatggatgtttgtgatttgctgttgcctttccaaaggggccttcccttgtttcttttggctttgcaggagttcactgtcttactttttgagtgaagaatctccatttgagctacaaaaggagcaattggtagaatytgagttaagatgacatagagaatgcatacctaataccatacccaggttttcaacagtgggagggctgaataaatacattcttaaggagataaaaaatgatctatatctcacttgccatacttggtcacatcccaagcttctgccatggtgaagggtctctctctttgcacattttgagataggtaacttttacttgacatgtatagtgactcatagactgagctagttctgaattcttcattgtttttattggttgttagtgaaaaattacaagttctccgacatcctcttcctagatatgtgtgccagggtttcttgcactgttctcctcctcttagtcctctcccatcagttttcaggagatttttctttttttccattagtgtacattttctccttcttgggatatcattttcaacaggagcagtactgaccttctgtgcatatggtgagactatgaagggcatttttcacactttatagaacagtgcctatggatgtttaggcactgtgttctagttcagagagagttgtgattgccagttcctgctgcactgtctatgcatttccttagctttggtgtgtgtggtggtgaggaggggataggtagatgtctccaccccaaggcttttccccatggtgtattttctttcacaacaaccagcccagaggatgccatgttctgatgttatttgacctaatgacaataggatatagagcagtttttaagaatttccctatgttattttgaggccagacacaggctgggagatagaaggagggttctttccttctctgaaaagaaattcagtcttctctgtttttgaagaaaacaaaaaagcaaaagtcaagctgccccaaatatgcatcatggctaaaaataaggaatatgtgttgactgagtgttacgggccaacctgtgtcccaagcacttggtacattttgtctcattaatccttgcctaccaaaagctcatgaaacaggcactattatttctattgcacacatgaggaaattgaggctccaagaggataatgatatgcccacctgaggtatccaaatgaacaattttggtaaaaaaccttctttggcaccaatgataataatagtagtagtaattaaaatatattaagcatttactttgtgccattgcactagactctggggccatataaatataaaatactataggtgcccccaagcagttcacagtcttagtagggaggacagaggatgacaacgtggtatttaagtgctacaatccctagctgatgccagggttggggtgggaaataggtcatatggggatatcaataaaggctcctgagaagcaatccctgagctctttaattttatccatttacccttcatgtagcaaggttaggtcagagaaagaaaatgcaagtcggtcactccagaggggcagaatcctctgtgtcttggtcagaacacgttggagttgtggattaggtcaaagctaaaatgaaatgtctaattccacctttttccaactttcaatccatttggagcctactgagattcagtgtagcatgctgagtcgcttaggaaacctacagcttgaatgttgcgtcagttctggttgctctatttcattgcctggatgtgaagctgggtagccagccctctgtttcagggaggaacagatggaatgggatatgtctgagcagcagagccagactaccctggaaatgactttcagggaggtgcaagcagtttcttctatgccaacagtgagccaaattgacaagacagaaaaaaaaaaaacttcagtgcagaactgtgtcactgagatcaggaagcataggttttgcagaggttgacccatgaccaatcaggccagaccactgcatttagcctcacatatggttccctttggtaatgtgaacctgttattctggccaacacagcagaacacagtcaatccatttgctgacccattggattatccccagaaagcaagtaactgtcaaagctgggcatgtgtagtagccaccaagagcctttataatgttcatttggtattgnaacattttcatactttacatgagaccaattattttgctgaacacaaggacactgagactcaagaaaggtaagtcactttccatgaggcacacacctagctactagcagagggcagcctagacacctggtcttctcatacttgtcccatgatctttccactgcaatgtatgctacagttcttctcccagagagcaagatacttcagctaattgcaccaagggaggccaggagccagatctcaggatgtccagccaggtgctcttccctctttttgtgtgggctctgccagctactgtgaaaatggagactttttggaaaaattagaatcatcctacttttaaaaaaatgtagcagtagcggtgatgaaaggaaaaagcatgtacttctcaactgcttcattttttcttctaaaataatggtatctctggttctatttggacagctacctttcctcaacagtattgttgagccatctcaagcctctaatctactccatcaatgaagcaatagagaactcatatatcactatagctattctctctcgaatcagccaaccaaagctaaggagatgtagattagataggtagatagacaaacagacacacatatatctacatctacgtatgacattcagaggcatccacttaaaaattaaattgcccaaagttgagatgatgatggaactcgatcactcctctcagtctgagatgtttttcacataggctcaggctagggaataacaaggaccaagtccagttttcaagtactagtgaaggccacaaatatggggccagggcagagcaaccaagcacagtgcctggcaaacaatactataaatgttgaattaagcactataagtgatgggttaaatgaattaagctaggggaaggagggatattaaaatggagaaaaagaaggtgtacagaaggggaatatgagatgatcaagtcaaaccctgcttactccacaaatctacttggagctgactctggtaagaccggctctaacctgcctttgccggaagtaccttatagtgaacaaacctgtttatctattcagtagtatccagataagagtagtcaagagcacatagcttcataaataaacataccagcacccctttgcttttggctggcaggagtcaaatgaaaaacttttcagctttagaaaaataaagtgaaggctgggcgtggtggctcacrcctgtaatcccagcacdttgggaggccgaggtgggcggaccatgaggtcaggagatcaagaccaccctgtctaacacagtgaaaccccatctctacaaaaatacaaaaaattagctsggcrwggtggcacrcgcctgtagtcccagctactcgggaggctgaggcaggtgaatcatttgaacccaggaggcagaggttgcagtgagctragattgcaccactgcattctagcctgggtgacagagygagactccgtctcaaaaaaaagaaaagaaaaaaatgaaagataaaatgaagtcttgcttgctctgtttggactcagcatggtgcattttcatgtttgacttcagctgtttctatgtccattgctggcaccagagtcctgcatattatatcgtgattatgttttttcctctaattgagacccatgtattttttctaagacattgggttgtgactgttgctaacccccactaattttgccactgtgtgtgtatgaaagtatgtgtgtgtatgaaagtatgtgtgtgtgagtgttctcttcaaaatggttgtatgttgcatgaagatagcaatccactggccaagtatttgactttgccagtaattgctgtagttttatgtgatgataatgtcaatagttccttagtttagctactagactaagtctaatatcacaaaagcttgtgacaaatgaaagcattaatattactgcttattttttcttttactttcttttttcttttttgcaattgcacctttgtagaaaaagacgaatgacaaaagcataaactgatgtcagaatgtattcctaaagatggcttttagtggagtgtgctcaaggatgaattcatttatagcctaactaccttttccttcagtagtcccccatccagaatagtgtgagatctttgatcacaacaaaaaattccagtttatcccagaaagtgcatttattaataaggcaggaaagtagcctaagctatttgaaaaggactttcaataaccggggataaataacataggctggacatgctttgatatttaacctagtgctagtcagctgtggcaaagggctgtttaaagatatctttaaataaattaggcagccttttgtgtatttgaaagaacatcagctttggagttaaatagacctgtatttgagtcctgactctatcattcattaactttgtacctacctcattgggctgttggtgaggattaaatgtcataaactaagtaaggctctcatagtgcctggctcgtgacaagccctcaataaatgtcaactagtgattatgcttgtttcagctgccaacgtattgcagtgggggacagtgtgacctggccagtatgattctgatgagctctgtttggctcagtttttctggttgtctgcttttgccagttactgaaatgtggaagcaaaagccccagcaccataataacaatataacataataacataacataaacagtgcccatagattagatgctacaagaaatgagtaacagatccaggaagaaagagtccagccatggaaatgtttcttagcaagttcacctgcatctctgtgatggttaggatatacagtacacttcgtgacataataaatccacccccccaacccaacatatatgactttccatgctggtcatgcttctatagcttagtcaagaagagtgttctgttaatcaagccttgaaaagcaggaaccatttttctctcccttcaactgccatacaaaaatcagggaggcaatgtgctgctgctctctagaacaggggtcctcagtgactctttttctacctctgtgtcatacatggttgagaattctcacttatattgctctagcagagctcagggttctgtccagttcccaggcactgtctggaattccactcttctctctccctattgggaaagactaggaatgcaaggaagagtgatgttaaacagtatgctatttttttccacgtaataaaaagcaaatctctctctctctctctccttctctttcacttttccctccttccttccctcatctgtttgttcattgatctattaattcttccaccccatttttctggctctcaactgagctttctttgaactaccttggcaactttcttgaagatcatttgtccatatgtatttgggtctatatctggactcagtgttattccattgattgatatgtttatcgttatgccagcaccacactgtcttgattactatagctttatactagtattgcaattagatgttgtgagctctccaacttcattcttttttctttcttttttttgagataagactgtcaacccaggctggagtacagtggtgcaatcatggcccacttcaacctcccaagtaactgatacgactggcacatgccaccatgcctggctaatttttttgtagagatggggtctcrctatgttgcccaggctggtctcaaacaatcctcctgccttggcctcctaaagtggtgggattacaggtgtgagccaatgcacccaaccattcttcctttataacttgttttggatgttgtacgtcctttccatttccatatgaattttagaatcggtctataaatttttgcaaaaagaaaaaagaagcctgctgggattttggcaaggattgccttgaatctgtatatcaaatttggagaaaactgacatcttaacaatattgagttaccatgaactcagggtatctatccatttatttgggttttttaaatttcactcatcagtgttttatagttttcaggatacacrcttttcctattttttttgtcagatatatccctaaatatttcacacttttggtgctatggtaaatagtattgttttatttcaatttctgattatttctaatagataacagaagtataattgatttttgtagattaatcttgtattctgcaaaacttactaagttttaggagcttttttttttttggtagattccactggatattcattggatattcaacatagatgattgttatctgtgactaaagacagatttattcttccttttcaatatggatgtctttttcttcttgccttattgcactggttaaagcctttagtacagtgttgaatagtgatatggttaggctatgtgtccccacccaaatctcatcttgaattataatccccataatccccatgtgtcaagggagagaaaaggtggaagtaattgaatcatgggggcggtttcctcgtgctgttcttgtgatagtgagttctcacaacaactgatggttttataaggggctcttacctcttcgatcagcacttcttcctccagccacgttgtgaataaggtgccttgcttccccttcaccttagaccatgattgtaagtttcctgagtcctctccagccatacagaactgtgagtagtcaattaaacctctttcctttctaaattactcagtctttggaagttctttatggcagkgtgagaacggactaatacaaatagctatgagttttttggtgtgtaaataatttctacccacttaagtctggaaaaagacacatacaataatggagagatagttgaacaatggaagcgtcctccgaagatgctattttgggaacaaatggttgatccctgcctttattgcatgtccaaagctagattcccatagcactgcacagatatatttcatcagagaaaagtagatcctattcatggggaggagggggaggtggaggagaaaaagtgaaaaacaagaagaaaaataaaccctaaagttcatagaatcatatatacttttctcattattctcattctttcattcatgttctctctctctctctcttctttgaaagaggtagtatagtataatggttaagacagcaaatgctggagcctaattactgccttaaaagcctagcattgccctcggaaggttaccggctctccctctgcatcagtttcttcacttataagaagaaactattagtagtgcatgcttcatagggttttcttgaggattaaattctttattcattcaaaaattttactgagtgcatagtaggtacaagatgctactctaggctctggggatacagcagagaacaaaacaggcaaaattccctgtccttatgcccattataatagagggatacagtcattaaacaagtaaaagacgtattattttaaaagggaataagtcataatttggaaaaagcaggggagaggtataaggaatcgtggaggcaagaaacttgtaaatttaaagtagttgagggaaacatcactaaaggtgacatttgaggaagggtttgatttatattaagtcagttaatgcatgtaaagaaatgggaatagttctttacatacagcaaaaatatagtacttttatgaattataatttattgagtactttctgtgtgtccaacactgtgcgagatgctttacatattatcttgtttaattattataataggcctataaagtaagggttattagccctttctactgaggaggaatctcaagacattggcttgtccaaagtcacatagtaggtgatagggccaatactcagatcacatctgagcttgtctcacgaggctaagttcatctaccccttctgaagacatcctgcatgcttagggactatattagactagactttgattcacaaatattagaagactggtcctgctgctggaggcctcagatgggataggattatgtagctaaaagcttctacaagggctgtggggagtggtgaaatatcaccttatctttagtatttcaacttgagaataagggcaatattgcctggcactccaataccagcacctggctctgacactttcactactatgtatgttgtgggcaagcaacctaagaatgggaagtggggaggacagaaataaaacaacgttactgggcaatagctattactccattacaaaagatgatttgggttttcaggatggtcgcttgctgaagtttaaacgaaaaaagaaaaatgaggctggactcagctcactgatgactgaactataaattttgcttggaaaatgctggcaatgctataaaattcaggccaccatctgttagtgcttgcttaaagtagcatttgcactggataattaagatgtcacatgcatttgaagcacaaatcatcagtgcatgggtgcctagcatccctggaaagattgtggatggtgaagatgttctgagaggaatatcatgttgcttgaaggatacatttatatgaaatcacaggagctagtgttttggatcacctgagtggggttgagtagaggaggagatgaggacactgagaaaactgctttcttgagttgactggatcatttaatcaaaatgatcaactggctaggcccatgcagtatggcaggcgtaataatatgtttggccatcactgtctgcaaagctcatagtgaattcagggatataaggaagaagggaggcaagtctggctaagcctaaaattcctaattaaaaaagaatttgcttgtaaagcactttataatttgcaaacagccttctcttttgttatttcatttaattaattttacccaccatcctaggaagcaggaattatatctacatcttacagactggaaaactaaggctgagggaaatagcatatttttgcccaaagccacatagatagtaagtggtagaaccatgattcaaaacagggcccttttaactctaaatcctaaagtattttttggccaaagcacaacgtgctctgatattagagtcaaataattttacatacctgaccaaaaaaaaagaaaaagaaaaaaaccatattttacaactttacaggcaggtagagaaacttacagacttcaattccaacaaagatgccagagactgccaaatatagcaagggcctggaatttttaaataataagaaataacatttattgagtgcttcctatgcaccaggccctgttcggagtgctttaaatgcatgcattatttcatttaatcctgagaactactccatgacgttgattcagggagagttcatcagtagcttagatggtgttgcccatacccaaatattgaaggttctctttggggtgatgtctgggtactttcagcagacacagcatggctggattgtggagctgagccaaggtaatgattctcccagctttggagtctaaagagtttcgctgttttggcatcaaagaccataattaatggaattaagaaggctgggcttgcttccaagtggctcttcaagagtgtccttctttctcatcatggttggggaggagatttgtgctccacgggctttaatgagatgttctgtacccaacgtctgcatgtttatcttcacttccccaatacgtgcctatggacccttcaaggatgatcaagctattttgtgccttcaccctaggcaccagggtatgttgttcagttgtgatatttgtcagaaaaatcttaggttggtgcaaaagtaattgcastttttgccattacttttaatggcaaacaccacaattacttttgcaccaacctaatagtatgctgccactgcccactctcctagtactgctcccccttcttctgtgaaatgcaggtaatcattctcatcactcctcctggcatcaccaggaggatatgaaaacaagcaatataatgtctccaaagaccttacaaaaaataaataattacaaaaacatacttcatggtggttttcagtaactttggggggaaaaaatgcatctccatataagtaaagttgacagactcttacccctttccctgagaatgtcttcttgccatctatgtgccaggtttgcagaggttgccccttttctcccacagatcgttatgtcctttcccaaccacatgcctagtgtctcaccgactattcatttctcacttgccctccattggcagccatattttcaggggctaactacacatacccagctttgtcctaaaaacacacaccaagtctggaggccacgagtttccttacctgattatctgggtttctattcccccacttggtggtgaggaaacacatgcataatgttgttatttttttctgcttgcttgtaatttgggaggcagtgcgaccattcattactgaatgcctacaatggacaaggcatttgtgttagtcaacaggaataccaaggaaaaggcatattgtccctctcccctgcaaatgcctcctggtggggaatctctgcctgctgtagccattcttcattccaattctggcttctagcagatgaaaaaggacgaaaagaggtataaagaagccacccaggccattgagcctgagttcatagagccattgtgatgcacttaccatgtccttcctctgtgtagaccagtggttttcagtctatgttctgtacagcccttgggttctgagggaggacctcaaagcctgccatgagtgaaagtgatggggtagtctggagtggtaaatagatggggctccaggccctcactctacctcttcctgagtgactccattttaatctgttttacatattgggatctgcctagatttcattttttaaagccctgctgctgctagaatggaaaaccaaaaaccatatgttcacacttatacatgggagctaaactatgagtttgcaaaggcatacagagcaatataatggaccttgagactcaagaggccagggataaaaatctacacattagatacaatgtacactgcttgggtgatgggtgcactaaaatctcagaattcaccactgtgtaattcatccatataacacaaaacyacttgtactccaaaagctattgaaataaaaataaataaataaaaataaaaaatacaaaagccccgttgctaagaaggaactgataactaccagtrtagacccagccagagaatactcagggagcaaggtttttattggaaaaccgcctttatccaccatgcctcagctccccagtgacaggcaaagcagttctggctattggacaatctcacagtcccctttctcaattctgcaagcttttttaaaaaaagaagaaaaaaagaaatgcttcctttcatatggccaaattgctctgaacagatgaaagggaccagactgacaggtgattgttccctaagattacagcctacacccaggctgaatctgaaacacttggaggaaaaaaaaatgctacaggttttgagtaatgctccccgactggcatctgctctcaagactaaatgaacacacactatttccactccatttccttaaactggcctctgtgctaggctgtaatgaaacctgtaggggaagaaagaccatttgcttggggaaaggattattttagttgcttaagccatcctctcccaaaaaataggcggatggttaggctggagtctttgtttttaatttaaatgtcattaggaggtccatgagttttcctcatatttattgtatgctatacatacacattgtagctattttatataaccctataaacaatttttaaaataaattttaaattgtctctttatattatattcactaacaaattcaaccttatcaccaacaatataatgttatcatcaggcccaaccttcatccccttcgttatactggtcttcttcttgtctataaaatgtctgcttttccataccattgcrcctatcttgaataacctgtgtccttcaactacccatgtccaaayactagttcattgaaaagagctcattctttcaaaatagataagatatgtatttctatcccagctctagtaccttggacaagttaatctctttgagcctcagttttctcatttgtaaaatggggagaataactggaccttcctctctgctaraaattccttgaatgttcactgagatgacttaggcagatcttctggtacatactggtactcattaaatggaatcgttgttattacttatatttcaagacaattactgtgccccttactccatcatgtctcccttgatgcaacctgagggcatctctccctcctctgaacagcatctatttagcattgaaccagacactaagatgtgccattcatttgtttattaattcaatgagcaactatttattgtgcatttagaatgtgataggcacattaccagatgctggggcagggtgggcatagagaggtggatgtgaaagaaggaggagagaaggtggagacagcagggctgaaacagatactgctcttaagcacctaattttctagtaaagaagatattcatatacaaaaataactagaatacaaggaacaaagctatgtgctttgtaagaaaggtgcagctggagactcggctggaggactgtctccactggaagaaaaagttctggaaatgtcaactgtcttctttcttgttaactttccctttgtttgcttatctctccagcaaagttctggctgtggctccttgaggaagagtgggagtacttctttatcttccacagagcctaccaaagtacaaaatgagctctcagtgtatgcgctgatgtgagtaaagtatctgcagtatctgtagtaaagtacctgcaaagtatctgcagtaaacagaataggtatacaacacatgccagaaaagaccacctattctcttattccatcttatagcatctcataaaaagtgcatgcactgcaactcgatatgtgaaaaagttctaaaaaaaatggatacataaagaagtattcttcctccttgaactttaaagattcttgagcttattttaaacaaagagcattttgttgaggattttggtattgagccaactatagtacacattgcatttccctgaacctcatgatgttacagagaggggctaggagcacttctggggtacacttaccctacaggcacttctatttgaacctactgcttgtccctgcctttctgaatctgagaaattatacctgagagtactttttaaaaaccagttgattgaagtatgattgacatataaaaagctgcatacatttaatatttatttatatttaatgtatatatctcattgagttttggaggtaaatatacatctatgaaatcatcaccatcattaaggacataaatatatctatcatgccctaaaggtttcctcctgccccatgattattattgttttgttttttgataagaacacttacaacataagatctaccctgttagcaaattttacatataaaatcaagtattgttagccataggcactatgctgtgtagtagattcccagaacttatttatcttgtgtaattgaaagtttgtaccctttaaccatcaccacccccttgcccagcccctggtagctaccattctcctttctgcttctatgagtttgacctgattgtgcttttgatggatgttagaacyatcttccttgacctggcttcagccatataagactgctgcagtgtctgttgaaagttgcatcccctaccccatctcagcacaacattctcctcctcctgttcatcttcatccctctttcaacccacagtagtcctttcattaacagagttgcttattcagtagtgcacagttcttttaaggcagattccaatgacttagggtttgtcctaattgactaagctggatgcaaaaaaccctgagagtcaaatgactgtggacatctgtccccatacctaaccctaagcaactctgacaccttgagaaagtcacctagcctctctgaatctgttttctctgctgttaaatgakggggctggctttgctgactaaagtacaaacaaatcgtgagacaagcccccgtcaccactatcaacacaaataatggagctagaaacacgagatcctttccaggtaatttaatactgctgcattttaaaagtcgtgggccgagaagatgagttttaaaaggagggaaaaagtaattcacatctcccaagatagtgtttataatggtctattaagaacacattgaaaagaaatggactaattctgtagtgttttacccaggacagcaggccagttcagtcaaagtgttttttgaatagggctataagcaaatctctttcggtgaaacctagagctgctttgcagaaagcagaaaagtggagttttcccctaatactttaaaaaatggtcacttcaccattgccaaacttcattaccactcccaggagctaaagcttcgagattaatgatcctcatcttaaagagaasgcagtgaccgctaaaagaaaaaaagaaattacaagcacatggtatttactgttctgcattctttgagaattaatgtcagtaatactgttgcaacatttttcaaaataaaggatggcgttttctaattgtctagttaaaaaaaaaatctaagtctgaatccccagagaagaaacctgagtttaaatcattaacaccacaaatctctgataattgtggcatgtttgcaagtgccttaatcaggatggtatgtcttagtggcctgttttaatttgatcacactgattaagcttctgtaagctaatatacgttgcatttccaattcaattaaatgagaatctcctggccttactagatattaccaaaatgccctgatgggtgaacactagacttggtattttcaattgctaccgactttctgattatataatctttgtattaaatgaaatcgatgaaagctcaaattaaattcagcaaactttaaggagtaaatatgttttccctgtatttttggcatactttcacctcaaggtgtggagcatgttagtcggaactcattgattacctttagtgataaattttatagggctctctcccccgtataccaattcctagaacagtctatcctgttagaaggcactgtaaatgtgggtgatgaataggcactctctctattatatatgtattatagttgtgcctttttcagctgtagataagagctatcttatgtaaatgtgattgctttgtaaatgtaaatgcctattgggtcatcgatcatcttggagatagaagaaacagaacaatagggggaggtgtgagagaaactgtctagggacagaaatgaagaaaattgctaagtgggtaacagattgaatcattagagctggagaactttgtggaggtggctaggatggaaacagcagccgcgaaactactggaagcctggcttgtgcctgcagagccctccaaaaggcttgcttccttgaggttctgaggactgactgctaaatgagaaatgggcctcttcagtgtaggtttgaagcaggaaggaactgaaaagaaaagcccaacttcattgttaggtgagcactgtgggtgcctgtcgtttgcctgcgcataacaggtttggaatctctcaaatccttcccactctcaacaacccacacaagttgtgagagtactacctaaaaacagccccttggtgtgccagtcatatgccaccccctggaggaggagggtactgaataatacctactgctgctgattcccatgccctagcagttctctcaattttttgggtggtatcaggaggcaggcaggccmagcagtgaactcaggaaccatcagggtgaaagtgcctctggaattttctcacaatctgttaggccctttttatggagtctggttttcaaaacctgctataagccaaatgtgtgactcacagagtaataaaggcctctaaatcaatttgtaagacatcttgaagttaaacaagaaggaaaggctgtttttgccccacatatttttttagatcctgcctacttccacaaaggatttgagatgacttccaaagcctttcttactcatgcctaagagtatttaagaactatttctgaaagttgaatccatgtgtaccatataaatagaggagaatgattatatggaaacacaaacagattggggctctctcactttatacaatagatcaactctggggaagtggttaaatgagggaagtatttggggcacttgctccagtcttcccttggttgtccttttacttccttctcccagcatctgcactctccaagtattgcctgcccttccaagcaaaacttccctgtcttgtattccatacctgcaaggaactttatttactttctaataaactctgctaataaatatgaaatagtgagtactagaggcttaatacatatgttagttgttctaatgttcaaaggaattcctacaatggtaggagagaratttgaggccagaaataatgccattaagcatttatcccagctgggcatggtggctcacgcctgaactccaacactttgggaggccaaggtgggaggataatttgagaccaggagttcaagacaagcctgggcaacatagtgagacccctatctctaaaaaaaattgttttaaattagtcaggtgtggtgacatgtgcctgtagtcatagccacttgggaagctaagatgcaagaatcaggagtttgagtctgcagtgagctatggtcacaccactgcactccagcctgggcgatagagtgagacctcatctcttaaaacaaaacaaaaaagaagagagagagagagagagagagagagatccctcctatggatttaataatcatatcctgcattggggcaggggtgggttgaggtggaaaagggggtgtgaaagccatattatagagatgggcaccaagaccgagttttaaggaaagaaaaagaggccaagaaggatcactgaggaccccaaaggcaaacttggctgccttagaattttgctggggctgaggactctctggtttaaaaataaatatgaaagcaaagatattaaaggcaaagcacaaggatttacagagaaaatgagcagactgatttttagttgaaagatgtccacaatttatcactaagttattggtccaagctcatattccatcctatcactgttctcctgcacagtgacctccatactctaagcaaaccaaacttcctgagccgcacattgccaccccataccttggctcatactgttctctccagacacatttcctgctctacctctttgtccaaataggactgacttctcaagacttcattcctcctgatgttcaacagctgaagcagccataccttcctctgaacctccggaatgggttttctggacttctcttaggggacgctgttcatctggctttatcatgtatattcatgtccaagtcttctcttcccttcaaggctgcagacatcttggaaggagggcaagtcctctttatatctttactcctctcttcccatggactgagctggcccagaatcttgaaaaatagccaaccactgataaatgctttctagttaagagttcagactctggagtcaggaagttctggcagcaagcctcagcttgtgtttattacttcacctctctaagtcttggtttcctcatctgtaatcacctacttcggagttgtgttttttttttttttttagatagagtctcgctctgtcacccaggctggagtgcagtggcatgatctaggcttactgcaacctccgcctcctgggttcargagattctccygcctcagcctyccaagtagctgggattacaggtggccgccactgcrcccagctaatttttgtatttttagtagacacaaggtttcaccatattggccaggctggtctygaactcctgacytcaggtgatccacctgcttcagcctctcaaaatactgggattacaggcgtgagccaccatgcccagcctggagttgtgatttttcaatgagataacccatgtagaatgcttagcatggtgcaagacacatggtatacattccacaattatttgttattgataccatttttcccttaaggaaaggtgcagtcttctctggctccctgtggcaataatccaactgagccattattccagaaggaaatcacattagggggcttttgggcaagggtttgctaaatgccctgactcacactatgtctacagtgacatttaccccatcaaaatgcagggaaagacaggaactggtttcaacttgaattcgatatttctgtggcccacatgctgaatgccaccaaagcctccactcccagagcagcagtttgtagagatggaatagtggcagtttttcattttccagagtccactcatccttccaagaatctcaatgcctcattgattcataatacagtgcataaagatttcatttttcctgcccacagtgatacattatggaggcaatctgttttgccactgaaaagtttgcttagtagaaaaatttggagttttgacattcaggaaattacagtcatctgtaaaacacgattgatatgccgaggctaacattttcattgcacttgcagagccagaataactatgataaaatatgtgttaccccacacacatttcaggatcttttaraaacattagctctgagaacctcctcccagggctccaggactagaatagctatccccattagttgtttgtttgccactcacaaggataatatctccattgacccaaccaagaatcagactgtaagacaaagtgatggctttcccgtaccaccaggttaaaggcatgaaagaaagtaaaaagatagagagataaagaattccaccccgttttggaattgttaaccagccacaaaaagcgcaggtataggttaggtagaactagaagctgaaggcttacaaaagagaaattagactgttctacatctgcctacaatttaaacttgttctctgtatttttacacccaaccttttttttttttttttttgtctctttccacatgcaattttcagtgttaaatgacatcaaaagcctagggctccggaactatccacttgttcaaaatttgatttcagaatgataaatacagttgttttagctgagagatgtagttgatttccactggcatactgagaaagtggtccattcagggtcagatttggccaggttgtgagcacttttcacttggtcctcatgcactgggacccacgggaagtgcacaaagtctgtggttccaaggcaaatgacaggtaccactgcttttgactttggaagtggcttagagtgaaccccattcagctctgggacagcttcttcaggcactgagaacacattctgcccaaagtgtgtaagtctgactcatgaatcaagcagtttttagaggtgtcattgaagtcctgcatgcaaccctatgcaaacaattattgccagtgcttactgaccttatattatgtgtcaaacacaattctaagtattaattcatttagttattacagccactctatgaggcaagtgatagaattatcatcttcactttatgaagaaactgaagcacagagtctgagcatctctcccaaagtcacactgctatctcataagaggtagagctggattcaaatcctcaacagaatggctgcagagctcatgctcatgatctatattatattgccttgcataaagaaattttataaaagccctctgttgtcagacatgctgcctggattatctcacaagtgccccatgcccatggtaggaaggctttcttgtcctcctaaaacacttggccaaacttcactctcctcctgtcccatggttaagcctcttgcatccaacaacttggcttcattcatttcctaccagtgtttgcacagatgctagaggagcaagaataaagccaatgggtatagggaggagaggagatggatgccaaagacacacttgggcaaagaccatgcctgcctaggagttttgggactctccagcaggggaataaggggaaaagtgatttcccagaggcatgttgaggattcacttgcttgtccccaggctgaagctttgggggtacccatattcagctttctctcctgctgctcacctctgggccttatttcagctgatctggccactgacaagggaaactaagagacagtggagcaaagaggactcatcagaatacaatgaggggacatagaggctggaggggtggagaagatagagggggagaaaggggagttatggcgtcaggacaggaaaaaaagatgaagagagaatggcaaaacaaccaggaggaggaggaagtcactgaaaaagaagaggggatgcacacagcatgaggtgggatgtggagaagactgagagaggaaggaaactgaggggaaaggctgatggagatgttctctctcctcacttctgtgatctcagtcctgtccatatgggcagtctgatatggtttggctgtgtccccacmcaaatctcatcttgaattgtagctcccaaaatccccatacgtcgtgggagggacccrgcagcaggtaattgaatcacaggggtgggttttccatgctgttcttgtgatagtgaataaatctcacaagatctgatggttttataaagggcagtccccctgcacacactgtcttgcctgctgccatggaaaacatgcctttgctcctcctttgccttccgccatgactgtgaggcctcctcagacatgtggaactgtgagtccattaaacctcttttctttataaattwcccagtctcgggtatgtctttatcagcagcatgggaatggactaatacactctcctcaccaccagtagtcttccttgactgcctgctgggcaccactgaaaggctcttacgttgcacggtgttccaactagatggccttgctcttttccttctgtgagctccaggtacacttagagatgaggcctgtcttcttgtcctgaatttggacacatgacttttttttttttttttttttttaagagacagggtcttgctctgttattcagactagagtgcagagctgctatcatggctcactgcagcctcaacctcctgggctcaagtggtcctcccacttcagcgtcccaagtatcagggactacaggcacatgccaccacacctagcaggagggatatcttagaggtcatttagtccctcccccatgcaaatgaccaataagtcttcattgcttttgaccccgtactccttatctcctatcatcccctacgcacaggaggcagattcttaaaccaaaggaataaactttacattgtggattgctggccaactgtgttggggaggggctgtgcttcccagcactcctgaacttatgccaccccacaaggctggccctggttgcctgtcccattatggtgttgtagaaagctctccgctgtcatgcaaattaccttttaaaataaaatgaacaaagtggcatggggtagaaaaatgagtctggatatctagacttgggtttaaaacatatgtaacttgatgacttactggctgtgtgacctttcacctctctgtgcactaatatcagtgtctatgaaatggactggaactgtctatttctcagtcatggtgtaaggctctatgaagaagaagatgtgttttgttaaaaataaatatatatttgctataaagaactttttagaagtagaagagaaagagggtgctattcctttcaaaagatttggaataatagctctttaatccttgaaaatgaactgagaaatataaatacttatgattatttaaaaacctcaaaggtgacctgctcatcacctgaactgtgcttggtatgctgaaatgcagcaatgccagtctcccaaaaatgtacctgcccatatttcaactgtcagcacattctttccaccacgtagaaggtgaaggtcgacatgttctccctgcgtgcatttctagtaacaccttaactcatgaatgttaaatggaaggaggtgggataggggaacaacaggacttcaaaaatagccttggggaaatcaaatcttgctttaacttagtgtgttcatgaccgattcatggctctgaaaaggaaaaagtgtttgatcaaaactgtcaccaaaagacctcattttaaattcctctactttctttgagcagaaaggaataggtatcctgattatgactattgaagcaggctttacctgtgcataatagctggtctcctatattctgtgatttttggatggcctcctgccccatagaacttgccctactgctgcctgaaattctaccataagagggcatagcattgccccttaggggctgcccctttaaaatggaaatgcttctggtggtgctaagtacatgacactttgacaaaatgagtttttctaatgactttccttctaggtctcagattttgaacagactaagcccagagagagagtccagtgggggaaaggctggaagaagggggaggtgtaggaggaggaatggagaagcttggagggccgaggtctcccagctacaacaaaggaccaaagaaatagtaactaaggatgggatttcaggcctcagtggggtacatttggaggagaaggggcctcctttacccttacaagttgtattgtgggtgcagcagtctctcctgactggggaaatgccaacctggggacctgaggcactgcaccagccagaggtggagtcactttgggactcgtttcagggcctgtgtagtttaggggacaatgccctttgtttctgattggtgggaggaggaactgatgtgcagtgggatgggagaggataaaatggagcatcctgggtgatttcaaggcttcatgctagaaggctcatcaattaacccaccagtctgagttcccataaggtgctgggccctgtgttgagagacaggagagatatcaaatagtttggctcttaaggaatgtctagcctggtttgcaagacaaaataagagaaatggagtatgcagccatttatttgaggcttaatgtgcaacagagaaaacatgggggaaacactgaattgggagttaggaaacctgggttctggtcctagacccaytgctgaccaactatatatccttgggaaagttgcctcctttgtttgaggttcagtttccttagctgcaaaatgggaattttatatcttgtcctgtatacttcataggattgagtgagaaactaactttataaaaacagtggaaaccttttcaaatttctcattgtgattaatcagccctccctccctcactcctatcttcccactttccctttttctgtccttccctccttccctccctcccccctttcttcctcccttccttccctctttctgtcctttctctctccctcgctccttcccatcttccttctttccttccttccttctctcaggcactgatatcaatgaattttcttcagatgacttttctgaaaaactattttgagaagggcaatgtcgtttagagtaattatctctggccttaaatccactttgcagtgagtcactatttctgagaattaagctcaattccagacaaaaaagcccaagccaggagggaaagctctgtaggtggctcacgcagcacgcaagcagatctctcttctcattgacatgtcctcacagtaaatgatgacttgaagaatctaagggaggttctgccctctagcatttgccttagttggaaagtcagggtcaggcatctgtcttaatgtgagcattgactttgagtccttttttatgggtttaaagtcttgcagtaaagaataagtgaacgtcaaccaaatagaggggttgcctttgcctaaagccgattcctgttcattggtcatcttaagggtgatattcaggaaagtgaacaaggagtcagagacttggttttgggtcccttctgtgccataaactggccaaatgaccctggatgagtccctatccttcacctctgggctttagcattctcattgctaaagtgattggagcaggtaacctctgagaggtctgccaaaccatctactctatgaaaaatatgagtttgtcactttcatctttcatttgtgagtggctctcattggttccattcacaggaaccttgcccttcatcggttggccagtttccacacatgggacatggctcttactcaacgagagagtaatccagagctcactgtatgcatggagggaggtgtggaacactctcaggctcccccttggttgaactgcccccaaccatgatgagtaaaatggcctcacccactttcagtgaagtaagatcccgttttgcacaagatgaggtttgtaaagtgcccctttaaaaaaaaaaagattctattctgtcaaaaattatggaatgttcatgctttcatcaaagtagagccatggcttatattttacaacacgcatagctgtctaatttcacatactgtttttctattctgtcacattttggacaaaaatgtcttttctctaggattcaggacattgcagtgtgatgtaaaattgcaatctggaggaatatactgtgcgtggagaagggatgatgagggcaactgccccgtgactccccaatactaggccactgatttcagggaaggtctcctttttgccttaaaggggaaacacagttgtccaaagtctctatgccatcaaaaagaaacctctgatgcacgaaacttatagaacgcttgtcagtttcagcattaacataaccttcaaaataattccttctgctcaatcaggatcttcatgtcttcagtcctccttcctgtacttgccccagtgtgacatcacattccttagctagagaggtgggatgggggatggatgagtttttttcaccacccagtattatcattgcaaagaaacaaggctgtgcctgttactgtatagaatgcttatttccccacacatgtagcccagccatgttattcagtaattatgccttttgcagcttgaatatctgaaggaaaaactttcccaggtgaaaggaggcatgaccctgccagcccttgaaattctgaatggcttcaattctttacagttcaaatggttaaaaagttctgttcccccacacccccccagaaaaagccagggtttgcacttcatatctctcagcaccttgaagcaatattagagctcattaaaatcaacccagggctcaagaagggaagccttcatttagggggaaaacttttcccctgtgctgctctggaaaatagcacaatgctgagagcaggcatttttcctgactaggtttcctctaacgatttctccaaagcacagttagggtacctgcctcccagacagcacatgtccagcaggcccaggtgaatgcgtgggactggctatcactagctcaaaattgccttaatatttattgayggcctaccatgtgaaaaaggcctcttacttgatttcttgtctctgtggaggtccctaaagaaatgattctgtgtgtctctggatttctcacaatctagagacatggaaagggagctggctatctggttcgggatccgtagaatacgaagtatggtctaaaatggtgtccagctatacccctgcccccaggcccctcagctctaaaatgctcagatcccagccctgcggttctgtaaggggcccacaaaaaccacagaattggatccctcatttcacatcccagcatatccaactgcctcctactcaaatgtcctgctgcattcaggccagttgtgctcctggcctgtgactcctgaggctgtgctcaggcacaaatgagaatgaacagcccagtgggtgagagcacacacattggaggctcagacacatctgtcagtgaggacacaaagaccaaatataaagaccarattttatcttcataaagactctatggttttcatgcattgtaaatgagaaaagtagaagcacagagaggttatttgcccaagatgacacagctagtaactgccagaactggaatttgaacacaggcagtctggctgtagatcagcattgtcaaatagaaatacaatgcaatggatgcacctggaggcgawaaacgtaagcgaattaatgcaggaacagaaaaccaaatattgctgggtgtggtggctcatgcctgtaatcccaacactttgggaggtcgaggcgggcagatcacttgagatggtcaggagtttgagaccagcctggccaacatggtgaaacctcatctccactaaaaatacaaaaatcagctgggcrtrgtggtgcatgcctgtaatcccagctactcgggaggctaaggcaggagaatcacttaaacctgggaggtggmagttgcagtgagctgagatcgcaccacttcactccagcctaggagacagagcgagactgcatctccaaaaacaaacaaacaaaaacaaaaatccaagtatttcatgttctcgcttataagtgggagctaaacattgagcacacatgaacacaaacagggaaacaatagacaccatggactacttggttgggtgaggaaggggttgtgggttgaaaaactaccaattgggaactgtgctcaccacctgagtgatgggatccataccctaaacctcagcatcgtgcaatatatccatataacaagcctgcacatgtacccctgtatttgaaataaaagttgaaattcaaaaaaagaaatgtgatgcaagtcacctatgtaattttaaattttatagtatccacattaaaaatggggatacagatgaaattaattttaataatacattttatttaacccaatatatccacattattatttcaacatataatcagtataaataataattaattcatgagatattttctctacctctaagtcttggaaatcttagtatgcttgaaaacttaaatcacttcttagttcagactagccacatttcaagagctcagtagtcacatgttgctgatggctaccatattggacagtgcagctctagaacaagcccttttcatgatatacactgtgactaaaatgaaggcattaacacctatttgataggttttctgaaaaagcttctagcctagtgtctgacatactgtaggcacctgttaaatcaaaacatctattagtttcctgtstgttttgctctttgctgatgtcagaatgccgtccacccaccccaccaccatacacgcacctagtcaaatcctttttgtccttcagaatccatcatattcctcctcttctatgaagccttccttgatgaccataatacagtcaactctcttctccccactcatttctcacttaatctctgtatgacacaattagcactgaaatatactgtgcctctatctgcccccgccccctccaattctaagcccgttgaaagctggcacccgtatacatgcaacttcctcaccatgcctacagctctaattatggcgacttctaggtcagagttgatacgttgttcatggattgattaaacttctgtcttgcaacccaaggccaagcccctcacctccagggctaaaagggcactatgtaccctctttgcacatgcctgtttctggattgagtttcatgaaagtaccagttttattactttttagttaagacctgaaacatgcagggttttatgtggatgtactaatcaatcaaaaggcaggacmaaagcaatggattcctgggacaagaggcactagggatgtttatctgaagagcaaaccatgatagtcccagtggggacacttagaaatttccccaacctcctcccatccactgtggcatggagcttatgattcttcccctctgtgcactcttgtttcagggttgggagaaggaagagaaccaacccctagctctggcagttccagatgccaatcctcaagggatggcaatttgacagaagatgtcacatagaaacactcagtaagctgagaagttccatatgtggagggaggagttcctagaaggaaagtcaggcaggaagcttgagtgtgttaatcagtggcagatctggtctccatgtgacttgggcagatcatatcccttcatgggaccccagtcccctaatctgcatgctgtagggtattttcataaaagtttcttccacctcaagaatacactgactattaatgaaccaagactcacaaaataattttagaatgcaaaaaattgggagaaaggcagtgtaatctacaaaatttttcatgatgtcaagcaattggatggattctgggtaaaggcctgcaactatgggtcataaagtttggaatttcacatcttgttaaagaactcagctttttcactatttgcaaaagcccttagagttatgtactttgaaacctactgggctttgggaaaaaggagagtgatttcttttaaaaagaagtaaatatcaccaggactcattgtgtgaagaattccaccttgagtttgaattcaaaggcattagaaatcttctttattttcaacaaaggaaaaaaatttctgctttgttaaagaaaaagaatcgcatagaaaaacatccttctgtttaatgaaagcccatttgtgctcctttgagcactccccacaatacacacagatgggtttacttttagttaatcagaggaaaagaatcawtgaatgaaggtgttactttatatacacagaactggtcctttgggtgaggtatgaagaagagcagaaaactccttcaaggagaactaatagcatgtttggtgggtgcaagaccttcagcctcttcagatttggttttgtgtctggtagatcttttgtctaataagtcttgcttgtctcatggatcactgtgctcccaagagttcaccttgctccccacctcctgtgggtagcccagaaagtctggctaagtcagcagcccacagcatgaacttcaaggggaaaggaagaggttcagcatccagatcatttaggtctttctagtgttgtgaagacaattaaatgaagtcatgtgtcacactgctctatgtaacccactgtctgcaaatgcaacagctcactcttctcactaggtaaagcatgactactaagccataaaacttgtgacaaatgtgccaaaaacaacacatctacaggcacgtctgtctgcttcaaagtagtccccttgtgaagtcccacacttcttttatgagactgctgccactgctgataacagcatttattaaactcctgtttggggactactaatatgagctacacaagaaaagcacttaaaacagcacctccagggcttaaggggtccagctccatcagaagcatgtttgcctttgattcaatttaccatacttttatttagtttgtgctcacatattaatattgtttgatttgaacgccttcctccttgctttgacccagtcatttacatgcaatgggaggatccatgtggttgctttagacttcattagccaaggaaggagaccagaccttcaacattaatgactcagtgtcatatacaaccaccccaactattggcagagttacttaggaccaccaaccacagttctttttctaccactcattgtttctccaagaacaagatgtgcaaaggctgaacttttatatatatatataaaatattttatatatattatatataaaatattatatataatatatatataaaatattatatataatattatatataaaatattatatatatattatatataawatattatatatatattatatataaaatattatatataatattatatatataaaataatatataatattatatatataaaatattatatatataaatatataatattttatatatatattttttatatatatatagcacatatatatgctacaggtataatagaatgttcactcctattgatttgggataagaatttgtttcctttcttaaattaactttttattgatcactcctatgaccttaactgctacgggttttctggccttcttctattaaaaaatgtctttgatatttatttcccctttgagtagtgcagggaaaaccttatcatggcctttcgtgaaccagtagcctcaaaggaaagtaaatgtttacagcatgatcctcagaactttgctcaagtaacattccctggactttcccttgatggaaatgggtgcccccagggtttctccaaggggtagagagaagatagggcttgcatccgggggcacagttggcttgtctacactctagataccacctgggatttctgagagacttctgatctctgaagccacatgcctaggacagtgattctcaaactcaactgtgtgtatatcagaatttctggatgggcttcccaaaatgcagattggcaagccccagcctctgagtttcagattcagtgagtggacctgagagtgtgcatttctaacaagttcctaaatgatgctgatgctgatggttctgggctcacactttaggaaccacttttttagttaactcatagaattagaagtcctgggcttgtgccctagcaccaggatggaaagaataccatttctagagtgagagagacctggattgaagcctgaacacacctacttaacttgaggcgtgacccagagtcacatcatctctgagtctcagtttcttcattctggaaaagggaataataatatatgattcacaggattgttgggagttaacgtataagtgtcaggcacagagcacccccagytcctggctatgtagttggtgtaagaaagtgtcctctttragcagccaaatgtttacccttcatgggggttagtgagttctttcaggcctggttgagtgtgccatcctaggtaactagcagacacaaagagggtctgctaaaataacaggacttcggcccagaaatagttctctcaggtagattgattctcaagggctactggcaaggtgtgatttggggacaagtccttgcctgtctctctctgggcctcagtatccccacctttaaagtgaagggtttgacctaaatgatttactgtctcaaaggtttcctcctgttctgacgagtgtaggactctgtgacttagaacttgggcacttatttcagaatggtctattaaaaggagaataaaaaataagattcttgtttttaaccatttagttatttttaacgtccttaaactttccagccttcttttaaactgggatactgcacaaaaagtcagggacaacagctaaatataacaatgtccttcacagctacatctccttaaaatgctccattacaggtataaaatggtatatctgttatttcatagtgacatctagtggcttttccttatcaaagaataagatacgcattttcctatttgctcatcataagctctgctgcttctcctgcagaaattcattcaacaatcttttattaattgcttactttatgtcaaacattgtgctaggccctgaggatagatacatggttcttaccctcccagagctcatagtccagcggaagaggcagaaaaatcgcttgacaatcccagcacattgtgatacatgttacaatgggagaacaccagggcgtctggagcagagaagggggtgcttaactccatccagggaggtcaaggaaggtttcgcggaggagacagtctttgagttgagttttgaaagactttgccaggtaacctacaaaggataaatagaagccattcaaaagagtgggcactccatatacagaggcaaagcacctgtggagtcactgcctgggactttgatttggaaaattcagcatatagggtatagagcaaggttcctcaaccttggcattattggcatctgaggcagggtatttctttgttgtagggggactgtgcatgataggatatttagcaacatccctggacttgacttactagatgccagtaccaaccccctccccaagtcattacaaccaaaatatccccagatattgccaagtggcccagagttgggggtttggggagtggagatggaagatcactcacaattgagaaagacttgtatagagggagctcacttgagaaggctggacagaaagaaaggtggttgctggattccacaaggctgtctgtagcatgtggaggagcttggcttcatgtcatagttgatagggagccattgggagggcttaattagggaatgacaggtcaggtatgtgccatctgggggtgtggaagtggcatgggactggagacctgaagagtaggacgggatgctactgcaatgttttagtagagaagtgatgaaggcctgaccccaggcagtggtgcaaaggatggatttcagagctattagaaactggaaaggacttaagcgaatgtttagctcttagtagtgaggggagattagaggagtcaaggatggccctttggtttcttgcttggacaactctttcatttgttgctattatttcgacaattgcttatcagtgacaggaaaaagttggcctaaacttgtagacacaaagcaggttcactgtgcattgtttataaacttctatgggtttggtgagacagaacacactcataagcaacaagttacatgaagtgggtttattacttacagataggcagcaagggacaaaagaagcctakgatccactgtgagatggtttcccaagactcaagaaagctgcctgggtgaatgagtctcgattaagcatgcctcacttgcaccatagctgagrgaccccaaaaggcagcctttcctgagttatatacctcaggggccatgtgactcatttagcaaagctttgaaggacatcctgcttctgagagaaaggaacaaaggctgggctgtcccargcagttcctccctatctcaagatgttagattctccaggaaggactggaacaaggcttttgctgtttcaggcagttcctccctatctcaggatactgcactcccagcacattctacagttattcttaagaatgacaagcaagaatgaggggagtattgtgttggtccaaggccacccagagaactgtcattcagtagaaggtggtaaacctttaactgtgtagtgcctgtaaagtcaccatgggcatacagaagcaccaatcagccaytcaattaacccatgtaacccaatggggagtcatggctccaatttaaaaatgtgacaccttgtcattttaattaggtgatacatttggtcacaagaaagtcctgtccaattactactaagtgaaacaggtggcgtatgattttcctggggctgaactggcctcattcagttaaaattcagtcagtccattcagcggcacccttcagtttcatgtcaacctgaagaaagatttccagcaactatcagagacttgctctcacctgcatcttgctctgttttgatcaatgcctgaatccaggcattgccaacaggaacaggaaagtatggtgaagatattgggggatataatcagaatgtagatgtcttttgacaggcttagatttcctccatcaagaagagattaaacagggccacaaatacactgcatcagttcctgacaatatagattgmgttccagcgtggcatatatgtgaaagtatgaaacaattgagcttactgtgtatcagtggtgtggtgtggccgccaaaatggtccatgtgatctgaggccacattaagagaaatggtgtcaagaatgaggaaggtgataggctgtcccttcttgttgcttgtcagatcgtgcttagcaggccatgttccaataaagtggaatgcacttgcaggcagacaacaggatagcggggccttgaagctatatagagaatagttgaaaaccatttttagcataaagaagagaagccctggggtaaatgctgtcttcgaatatctgaagccacacaagtggaattttaaaaaggtccctaaatagaccatgatggtctggaaattaccactttgtgctgaccactccgtaccttatcttcagcccaggttgctctctgagtgccagatctgttcattcaactctactcagatgtcccgcaggcacctcagtccttcctccagagctctaggaggcatccttaagtcctcctcctctttctcccccgaatcccttttgtcacttttacccgctaaatatttctctagtctgctcctccttctcttttgccttgtcttctgcagtggcctcttaactaacttcacgaatttcatcttcatatacataatgatctttctaaaacacagacctcatcatgtcattcccctgcttaaagcccttcaaagcctctctgttgcctgcagaattaactttgaatgctttaatatggcatctgtggcctttcacaaccaggtcctgggctccctctccatcttcaattcctgccactactccttcactccccgggaggttttttgatgcacgtttctcttgcacaataggctggtttatgcctctgtgcctctgctcatgctgatccttctgtctcatactcctttcctctctccttgactcatttttttttttttttttgagatggagtctcacactctgtcacccaggctggagtgcagtggtgataccatggtgcactgcagcttctacctcctaggctcaagtgatcctctcgcctcarcctccctagtagctgagactacaggtgtgcaccaccacgcccactaatttttctattttttgcagagacagggtttcaccatgttgttcaggctggtcttgaactattgggttcaagtgatctgcccaccttggcctcccaaagtgmtggaattacaggtgtgagccaccgtgcccagttgcctcatctaattcttgtttttcaaaataaagctgcagaaacccttgtcttatctttaggctaggttagaaatcagtgtgaggtgtttttttttaatcataccctgcacttgctccaagcattcatggcacacacaattgaaacactttccccgggtttccatgtcttatccctgtctgtatccccagtgcctgccatagtgccaggcacacattaggtgccaagactaagcaagtcttgacctgacctgaccactgagggaaaactggccatgtctctgtttgcccccgaccccagctgcattccccagcgtgcttctctgatattgccctaaaagctcttccttggatataatgagcatcctggattctttttctgacataacctccaaggtgttatctttacctgccttcctacttccaacacaccatgaaattcaggagacccctggaccctggacacctacccttcagcagatctttctttctttctacacatggaatatttctaagcagcatcaagtgctttcagttgaggcattctgggtccccaaggctatttgccctggaagaagggggctgttgacactcactgaatctctgcaggttttgtcatatgagtctaggtggctgttatcaccaaggcagcagtgtgtgtatgtgtgtgcccctctaacttctctgctgcagtgaaaatccctacagtgwagacactgaggctgcctacgttgggctgtccgtatttcttaagggcactaggtgaccttcaagttgaatgcatactggatccacacacccacaacatgagagaccctctctgaaagtctgtctctgtgttgccttctctctatccatgttggggtaggggtggtgcttatgaaacattgattgtgtcattaaccctggtggttgggatgtatttgctctgaaaggctaggaacaatgtttaggaaggagagctgcagacttccactgtggtgcactcttaatatttaccagaagatgtcactgtaggcttaaaccaatacaagaagttagggcaagaagacttccagctaagcatgaaggtgactccattttggggggttagaacaccgagcagcccccattacaatgcatgcctggaaaagctggttgaaaggttaatccaaatgtgtcacagaccttaataaatttctttttttttttttccaaataatcagactaattgccactaaactgttgcctcagggctagcataaaggctcaataagtatgcactgaatggatgagtactaaagctaggagtggaaggagggaacccagggctttagtagtcatctttgttggtaaaggctactggagaacaaaagctgctactctttagcagtggcttctcatagagatgaattttagtggcaccaacaagatcaggtcctagggaaagtagtgagacaagtgaaagtgctcttggccccttttccatcctcactcccagatgcttctcctgtgcccaatgcttgtttcttcctgaaaaaatatataaagtgatttattttaagaaaaaccttcctgtgattttttgcaaggcacttagaagattatccagagtttttatgtcatgaggcatgtccctagctctctccttcctcttccccaggatagttcatcaagtaagcagttaaagaagttactgagattctgctttatgccagggatgaaggccaatgtacaaagctggawtggatgggatgagggctatatagaagaataggacagagcccctgtccttgaaaacatagtttaagtggaaatataaacaattaattgtaattcagtatcacacatttttgggggaggcagtggggtggaggggtagggtctcactctattgcncaggctgaaatgcagtggcacaaccacagctcactgcaacctccgtctcctgggttcaagtgattctcgtgcctcagcctcctgagtagctaggattacgggagcgcacaaccacacctggctaatttttgtatttttaacagatggggtttcaccgtgttgtccaggctggtctcaaactccttacctcaagcaacccacccacctcagcctcccaaactgctgggattacaggcatgagccaccgtgcccagccccagtatcacaaatattttaacaaaggctaagtatagaagtgctatggcaacacagaggaagaaatgataactggcaacacagagtggggtacattttttcacaaaagagatggtacttgaactggtattgaaggatgagtagaattttccagccaaagagggaagatcatggcaggcagagcaagcaccatgtacaggatagaggcataggagatagatttcaggatgcctgaggtgatggaagccccagttgggagaaacgtttcctcaatgaacatcagccaatattcagttaagcaggtggctgagcaggttccctgtggctcctcatgtatgtgtagagaacaaccactccctcagatgggaatgaatatttcagaaaagttgcaagccattctccgggtttcctttaagaagctaaatgctaatattcaatgtttattgttgctttctttccacaatatgcccttctgtggcctcgtccttcatcttctgtacctgagtggtaacccatttctcatgaaaagcacaatgacacggttctctccttaagtatgcctgattgtatcatggacttgatgtttctggggcgtgtgcctaccatgtatggtgtgagtgtgttaacatgtggtttaaatgtttgctagtctgctatttgagcaaagaactttgtttgaagccctaaagagaagacagccatacagcaaagcctccacacttgctgacatccacgtgcccttttagtagataaggaaaagggacattttgaagctgctgatagagttaagtttcctatcctgggaatattatcataggagcaaaggtggaaaccaaggtagtagcttgcatacatgccattggcagctaccatgtctatttcagtcagwgactaaccacagcgtttattgctggaggccctgggctactctgcctatctctacattccacttccataatgtatgagccataatatgacaacagccagaatcaagagtatcatatcatacactcttttaatgagttttttaaaaacaaaaagatatgcagattagactggatattagaaaaaatgctattgcatatttaataagattcgaatttgaacccacttgtcaactccatttcactccaataaagtatgtgcttccaatgagtctccatttcatgatcactaaatggtttagagtggggggcatgaaataaagtggttgcctagttagccaatggtgtcattgggaagattttgtctttggttagagagggagaaaaagaggggaagggggaacgaacgggagtgaagcatgacaaggtcaatgtctggaatctaaccttttcatacctgttttagctgaagtatcagcaaattggttgaaaaaattagctatctctaggctagtgagactcagagaggggactgcagtacagtttacaggacaaatgccatcagatccctgtcatttttgctttgccttcctttttagccagtgaacaccacatatgccatgtacctccatgactccacttatttcgcccatatctctgactgttggtttttgtgcttcatccataggaacttccactacatcaccatcctccgagacccagtgtcccggtacttgagtgagtggaggcatgtccagagaggggcaacatggaaagcatccctgcatgtctgcgatggaaggcctccaacctccgaagagctgcccagctgctacactggcgatgactggtctggctgccccctcaaagagtttatggactgtccctacaatctagccaacaaccgccaggtgcgcatgctctccgacctgaccctggtaggctgctacaacctctctgtcatgcctgaaaagcaaagaaacaaggtccttctggaaagtgccaagtcaaatctgaagcacatggcgttcttcggcctcactgagtttcagcggaagacccaatatctgtttgagaaaaccttcaacatgaactttatttcgccatttacccagtataataccactagggcctctagtgtagagatcaatgaggaaattcaaaagcgtattgagggactgaattttctggatatggagttgtacagctatgccaaagacctttttttgcagaggtatcagtttatgaggcagaaagagcatcaggaggccaggcgaaagcgtcaggaacaacgcaaatttctgaagggaaggctccttcagacccatttccagagccagggtcagggccagagccagaatccgaatcagaatcagagtcagaacccaaatccgaatgccaatcagaacctgactcagaatctgatgcagaatctgactcagagtttgagccagaaggagaaccgggaaagcccgaagcagaactcaggcaaggagcagaatgataacaccagcaatggcaccaacgactacataggcagtgtagagaaatggcgttaaatggctcaaaaaggcctgtacatacttctcccaaagcgccactgaaaagatggcatagcttaaaagatgaaagtgtccaaacacatcctgcttccttcattggggaagttttaaaaaaaagtttagatgttgcctttacagttgcctttcaattcagtgttatactgtgtgtaggtaaaacaaatctcaatatggaattaaattgtctttttggggttggactaaatatgaaatccgaaagccaaaccagactcaccagaaattgctgtttagatattttaagaagttcttaaattagttatggagacaaagtgaaaacataaaatgtgaccatttaacttatggctaagaaatggactttaaattattcatgatacactgttaaaacccaatcttggaatcaaatattttttccaggggtgagaataagtataaacataaagcaactaaaatgaaacataaaaccttttattttcttctgattttaacaaggaatctatttaaatagaataacaactgatggtgaatcttaccgagctgtagaaaataaaaaattcctctccaaacatgggtagttttatgtcaaaatattggcttttcaagaacaggactcatatcttgatatttaagagatgtttaaaaytttaaactttttctaccttctactgtttaaaggttttacacagggtgtatctcacattaaacaaaacacctttttttcaaaatgaaataccaatgtaaagatctaatttccaggcgctttcagggcactgtaatttcaacaatactggaatcattttggcgctgcttctcattcattttaaggcttctctgaattgtgctcattccaaattaacccatgtatagaatctttcttcatcatctaaatggtgtgttgctgaagttattgtggtatataatcctggattaaagtcaggactttctttctatagaattattttatcaatatttgtgtagtgaggtcctaatcaagaaacttgaacaggataatgtgtctaaaaatattgctgaagttattcttgatcagatagaatttaacctaaaatgtgaactcttacttactttttgtacatctctattgtaatgtttccagttgggccaactatttctagccctttagttctttttcatgttgacagatttgtagacaattacaaaagccaaaaaaggataaaataagcattaggaaggctagccagttattcaatagcaccttgataatgtgggcaaacccttctacaaagtttttgttttgaaaagagcaaaagtaaaaagtgttctgtagtgaggttacatatcaggaacatatgagttgagcagagtaatttggtagtgtaagtcgatgcaaaaatacttctatggtayctattacaagctgaccaagataaaaagaagtatgtaacccactgtgctgtcaagcatcatgattccgggcagttttcattttactrtggattttgctatacttatgcaaggacttacactaacctcctggctgtaaatcaaacaaggtgactgaaagtggcatttatgttttcacaagggacatgcttagaagtgtgaccataaagtcacatcttgtacaatctgctcatgtgtttcatctgtagtaatatagccacaaactggacaagaagctgggtatttgggtttaaaatagattttcttgactctgagcttgtatcagtatttctagcttttgttttgtctgacagtattgcagtcttgaaaatcctgagagctaaaaaactgaaaggaatttttccacaccttgaagtcacagtgttttagagtaaaactattttgtgtacaattgtgtttttaaaatagttagtagatcactatggtatttcaattttctttagttttaattgaaaatgtttgcttttaaaactgataggtattgttggaaagcaggatgaagcctgagccagtggaaaagcttgttacagaaaaaacattttgtgttattgctgtggtgtgcatgatttgcaaagattaagtgcattttctctgtctatactgattattgkatatagaggatgttataaatatacatatacatttttgccattatgtaaatcccatgatttcaactgtaaacatctgtccattggtgtagctttacaaaccattcactgattttgtgtaatttaacaatagatatgaaataaagtttaaattacaggctctgagtaatctcataatttcaagatttgcagctgctagacattgtgatctcacaaaccagaacagaatttttttcaacaagacatttccttttatcctcttggcagccaggtatgaaaattagatggcccattctaatccctcacactaaaatggccttaatttggggtgattccttctgggagtccatgttttttgtacaagcgtgtccaacccacaatggtgctcttcattctcccttctatccacagggtagagtttaaatgtaagcattaatgtattggtttttaaagtcccaaacacaaaatgtgcacattttttcaaacaaactcttatagttagcactatgggggagtggggtatgatttgtccttgcgcttttccaaagagactttaaatgtcagtcccaaggggttagaggaagaaagctacaaatttggttggagatgtagttaagtagccttagcctgtaaactattcatatgtattgtataagtccattttcatactgctataaagaactgcctgagacygrgtrayttataaaggaaagaggtttaattgactcacagttctgcatggttgaggaggcctcaggaaactcacaatcatggcagaaagtgaaggaaaagcaaggcatcttcttcacaaggtggcaggaaggagaagtgctgagtgaagggggaagagccccttataaaaccatcagatctcgtgagaactcactatcacaagaacagcaaaggggaaaccaccctcatgattcaatcacctccacctggtctctcccttgacacatggggattatggggattacaattcaagatgagatttgggtggggacaaaaagtctaaccatatcagcttacatggttttgcctgtcaactgcttcttgatcaatatttgggctgccaaagggcctgattgtataaagatcctacacccccttgggaggatctgtgaacaggaacataaagtccaagaacttgaaatatttcagaaataaagtttggttcccttttcccctgaggagggtaggtactcatggagagcagggcgctctaactgtagtggagaaaagataggaaacctgctaaggaaatgagctattgaggcagcccagggaggagctaaaatgaagaaacaacgaattggctcggttcctcaggacttaattaggattctcaataggggtgataaccaagtacaaccagaactacctttgggtgatgggtctaataaagctgtcacaatgggaaggatggtttccttccatgggtggagtacgggggtaaaaagaagcataaaacttgcatgctgggtctgagtcacagaagagaaccacagaatattccaggttggcgatgtgcaacccacagctttcttgcattcattgacctgaagacactgcttttgacactgaaagttgggaaaggggagacagcatattccttttgcacaaatggccatcagaggtggactggaagtttcttctctcttgtcttctctagagattgaaccaagcaaagaaacaaaagccgagtactttgtagaaagttctagcaaaaacacagagtatgctgactctgaaagtaaccctctgggactgtggaataaggcaactcaaatctctcacttggcaagaatgaggccgcctgacagttttaagtgtccaaggaatttgatcaacacctcacaatttccaaggtacatccctcagaccttcacaaatgggcaaagccctcagaacttcaggagaaaactatcctgaaaacaaagcaaatgagctgtttctcagtacaaatggcactgttctgagcagctagagcagggtccaaaaactactgtcctggggccaaatgcagccctctgcctgcttttgtaaatatagtattattggaacacagcacgcccatttctttgcatattttccctggctgctctcatgcaacagtggcaggagtcgttgcaacagagatctyatggccccaaaagcctaaaatacttattttcttgccccccaaagaaaaagttggtcagccctggaacgagagagcagatcaaaatttcctaagtattgaaaacttggcggagtttataatgaccccagagtctgagagaataaaaggatgtgattcaaacaacatactttccaataccatatcaccacaaacaacatttactgagtacctactatgtgagagtcactgcttttaggcctgaaagcacgggagaacctggtcttttctctcaggattgcagaaatcccagccacatgctgtgtcagtaattataggtgagagcttaattagttcttcattagtcttacatagctgatgcctgccagttccttggagtgtgtgcgtgtgtgtatgtgttttatcacatgcttttaaaaattaaaacaatatataagtatgtaaagtaaaaagtgaaattacctatacaactcccacttccccaaaataactactgtgattatgatttcctccagacctccttgtcctagccacattcaaatctgctatctctccccctcccccttccctcctgctcttcctccaacccaaccgcacacacaaacacatatatttatttaaaaggataaaaccatattgttctcattgttacctgatttctttttttttttatgaaaaagttcagcagtgtatcatggattcccttccaaaacaggaatatagtggatggtttatcccaacaaaattgattactgctgatgttataggttgagagtatagactctatatgcatgctgcctgggtttgaatcccagctccaccatttaccagctctgtgaccttgagaaagtctctaacctctccatgcctcagtttcttcacctataaatggagaaaataaaagctgtaacttcagagagttgttgtgaggattaaatgagttagtatctgtaaagcacttaacactgtgcctgatatagaataaactttacttttcatttttatttttttagagacagactctcactctgtcactgaggtcagagtgcagtggtgtgatcatagttcatagcagcctcaacctcttgagctcaactgatccttcagcctcagcctctcgagtagctgggactacaggtgcacgctaccactgccagctaattttttacaattttagtagagataaggtctcattatgttgcccaggctgatctggaactcctgagctcaatcctcccaccatggcctcccaaagttccgagattacaggcatgataaaataaactttatatgtgtttgatagtattataataatcattattactgttattagcataaggactagatgtctgctgaattcctatatcttcagtagctaaagactgactctgagatcaagaattaaaaatatttgcaagaaaaagagtatatttcctgttgtgactaatttaaggaaacctttctaaaaaataaaacaaatgtgtttcaaatgtaacataatcaaatgtataaagacttatcttaaagtttacttctgagcttcgaatgcagccagtgacagaaacattctgaaagatgtaacccacaaaatgccaagtgagtcacagattctctctccagcaatgaaaaggcattatctggtgtctctggctgattggggacctactttatcacacttagccaaggatgactcacttccagccccgcccgtttcccactcatctctccacccaatattgctggagtatgggcttgtctgcctgatgagatctgcgaggaccccaaaggtctagctgcttcccttatgggcctagcttggtgcctggaatgcctacactccaaggttctcttctgtgggtgaaaggagcatgtccagaagaccctattaagatgcatttatgccacctaggagggaggagagagagtaacccattaaaagttagcacatattagttttcaaattagtagtcacagagggccctcggggaatgggacacacagggcttgtaaattcagctagctcactttacttaaccaaaaaaaaaaaaaaaaaaaaaaaagaagaaaaatgaacttctgcatttatccaatttgaatttttaaattttagtcctattgccttaaggacagaataaggttcaataatcttcatcaaatctcattaagttgtacaaattctattttcattatgcctggttcaatcttgtgacttcactaatattagtaagatttaatgatgcctaactrggcctaagaaaagtttaacagtttttgtgacttaaaaatgctctactggatttcatgtaacttataaggacctgagaagaacagtcaagtcttaaaagagagtgctacaccatagcttgataggacctaaccagccaactagagccaatcttaatcagccttttcatggattcatccaaaacacaagattgcttttttttttctcagtcctgaaggcggtcttctgtccctgaaactacctagagtaggattacatgttcatcaaggcccttgagaccatatggcaaagacattatgaattcggtcaaaaagatggattctggcttcacaaggctgaacacataggaaggaagttgaaataaggagcctgaacactgattagttaagatgaatagcatttatcaaggataagcttgaaggctgggcactgtggctcatgcctgtaatccctgtaattccaatactttgggaggctgagtggggaggatcacttgaacccaggagttcgagaccagcccaggtaacatggcgaaacctctctctacaatatagataaaaattagctgggcatggtattgtgtgcctgtagtctcagctactcaggaggccgagtcaggaggattatgtaaacctgggaggtcaaggttgcagtgagctgtgattgtgccactgcactccagcctgggtgacaaagagagaccaagaccctgtctcaaaaaaaaaaaaaaaatggcttgacctaagatgcactaacaagcatcagtaagttgtccagtttcccatcccttcccagtgtccacatgctttctccaaactcccaggaccttggcatattcccagcactcccactctaaggcaggtttgtatgtagcccacctggatggtcccaatgtcttcttaactatccttctgtcttcagcctctttcttgatcaccgggctcatcttcctaaaactttctcagaacagaagctatgagcctgtggcttcagaatcctccctgatgtggttcagaaatgcagattctctaggccgcactgcagatgttctgaatcagaatctcccacctcagcctcccaagtagctgggaccacaggggcaagccaccacacctggataattttattttgtgttgagacagggtcttactatgttggccaggctggtctcaaaatcccgggctcaagtgatcctcccaccttggcttcccaacgtgctgggattacaggcatgagctgccaaccctggcctggaagcatttatttacctagctctagcttgctgatc

SEQ ID NO: 93225 - DNA, 13704 bp, Homo sapiens
aaatttaaataatatagaagtgtatagactaaaacaggaatgtatctgttgacattcctctgtaatcctattcactttcctagaggttatgattgtgattgttaacaatttaatgtgtatgcttttagacccttttctttgcaattataaatgacaaaggacagtgcattcatacacacacaaaactatttttgaataatgacatcatactatatatactattccataagctactttaaaatatttaatctttccacctcagttcttacaaatctacatcaccaccttttaacagttgtgtaatattcctcagtgagtgaaccacaatttatgtaactttcccatgttaatagatatttatgtagttttattttttttatggtacatggaacttgcatagatatcagtgtgtgtatgtgtcaggatttctgcttaataggggttttaaaagtagggagatcagaggtcttgcctatttaaaatcatgattgctactaccagattgacccccaatatggataaaccaaatcatcctcccaataacagcttataaaggtgactgtttttacccacttctttgtcagtttaggacaatatcgatttttcttaatttatcagtctaataggcaaaatgtgatatcttgtttgaattgtagttttataattattagtgaagttgatttttatgttcacaagctatttcattttcttttcctttgtatgtccttttcagtggctggtcgcttcaaaatcctcccctctccaggccactcccacactaaactcttcacctaaggcaaccactaatcagttctgttagtataatttgtgtttcctaaagttttgtataaacggaataatgcagtatatacttttcttttggtctggcttctttggttcagcatagttattctgagattaatttaagttgttatagtgagtcaatagttcattcctttttagtactgagtagtattccatcatatataccaaaatttggttgtctattcactagttaatggacatttgggttgtttcagtttgggtctgctgcaaacatttgtgtacagtctgtacgactatatgttttcttttttcttgagtaaacatgaaggagtagaaatgactgagtcacatagtaattatacatttaatttttaaagaaaacgtaaaacatttttcttaagtaactgtatcattgtactttctggaagagactgtaaaactcatgttaattctgtatatgtttggtggaatcctccagctaaactctctgggtctagagatttcttctttggaagtttttaaactatgaattgaaattttttaatggttataggactattcagatgatctatttcattgggtggtttttttttttaattcactatgacattgtatgattttacattcccatcagcagtgaaagttccagttcctccatattcttttcaacatgtggtatggtcagtctaaaaaatttcaaccattctaataggtgttcagtggcatcgcatcatgtttttagcatgcatttccctrttgacttaatgatgttgaactttttttatgtttgccatttgtatgttttctttggtaaagtgtctattcaaatattttgcttattctttaaaaactgatttacttgttttcttattattgagttattgagttttgggagttctttatataatatatatataatacaagttctttatcagacatatgatttacaaatattttaactcagtctgtggtttttcttttcattcttaacagtgtcttttagaaaatcatgagttttcaaatttgatgttcagtttattgattattttatgaatcattgtatctaagatatctttggctaacctaagattacaaagatttttctcctcgaaattttatagtttcagcttttaaatttgattatagcccattctgagttagttttcttctgtggtataagatacgaattgaagtttttttttttttttttttttgcctatgtatatcacattgttccagtaccattgctgtcctttctccactgaattgcctttgtaaaataaataaataaatttatctgtatagatgtgggtctatttctgggctttctattttgttccattgatctattcacctatcttgacatcagtgccacactgtcttaattgttgtagctttataataagacttgaaatcaggtagtgttagctttccaactttgtttttctttttcaagattgttttggctattctaggttctttgcatgtccttatacatttttgaatcagcttgtcaatgtctacatacaagcttactggtatttgggttgtgttcagtctgtagatcaattttgtgagaatttacatcttaacactattgagtctttatacctgcaaacaaaatatatctcagtttatctagattttcttaatatttctcagcaatattttgaagattttagtgtacaaaatctctctggcactttgccttgcaaattctcacttccttgtctttcccatactcccaattcagtcttctcaacgtagggatactactgggttccacttgggttccccttcctgcactgcagcctgcaaaactctaagctgggaaactcatagggctgacctcatttgtttttttcagtctctcagcattcactgtccttcactgctggatttccaatgcctttaaaactactgttgcatgtatttttcctagttttgttttgtttttacttgtttcaggctaaatgagtaaaactagtttctgtgccctatcttggccggaataagatagtagctgtttgtagtagtattttagtagtagtagttagtagctgttaatagtagtagtattttcaggtgacagtttggccttttacattagaattgcaaatgtatttgttttttgcctcagcaattccagtccctcttctaggtggtggagatagagcagtgaacatgacagacatgcttctatgttgtgtaaaatctagcttggagacagacagcaaacaaaatcaataagtaaaacgtgttatatgttagaaagtgataggaaatgctgaagagaaaaaaaattaaaatggaaggaagataggaatgcttgcgtagagggaggcatgtcattgttttaaatatattgacctggaagggcttactgagcagagtatgtttgattagaatcctagaagaatggatatctgaaggaagatcagtctgggtggaagaaacagtcagtgcaacgacctcatgtattcgaaaaatagcaaggaatatttgtaacaactactacagtgtttgagctcacaaaatggtggctctttagactattattactaatgatggtggaattaggaatatgacctagaaccgtatggcctcaacattaatctgcttgctgttaagttacattttgtcttccttacaatcatgaggcatatactcacggtttgtgattgttcatgcattgtttcttatcattgtccaccttttacacagcttgccttgtgttctcaatcatgttatttccatgcccatgtagtctgtgttgacccttgcctgatgggatattgggctctgacatttctctttacactaatcactggggttgattttgttagtctcactggctagacagtggtctcctttctccatcacatatgtgtatcatcccatagtgtatgcacttgggctaaaaggttggtctccatggagactggaaaatccttaagtacacatgagacattatataaaaattctaatcacagctccttctgcatgccttcggcacttcttatagcatccaaggcactgtgttgttgctttttaattttattttactttttattgaatagataatgtaccatggcatgaaattataaaagaacaaagtgacataggagggaaaacacagttgttctccctgtattccccagccaatcattagtcctaccttgagacaaacaatgtaatcagattctttggtatcccttcagaactatttaaggcatatgggcatgtaattgtgtttagtctccttccatgtcctacccccacccatagaaggcaccttgacagctcctttaatttctttcttaccacactctgtgaagtgggtgatgctgtccctatgttacggatgagaaagccaaggctcagagaagtgaggtgacttgcctaaggtctcccaggaaggacatggaaaatccaggactaatgccatcttttataggcattttttcttccaaactgagaagtgccaggttctgtgccttgagcatagtaggagatacctaaacatttacctgtagctagagtgattaagaaaatctctgattctttgagtcatgttagtattcacgttacaaactctagatataaggccaacaagcatcaactggtgggtagcattcagaagacaaaaacttgatctaattattctctagatatcttccttctttctccacagatctatttaggtccacctgaggaaagcgctgcaccgccagtgcctccgcctcgggtgacagcmagaaggcacaaaccaatcacgatttcaaagcgcttgctgcgagaaaggacggttttctatacttcttccctggatgaaagcgaaggtcagtactgaggttcacctttagcttctgaatggtgattagacacaaagaggatatcgaagggcagaagcggtggcatgaccatttttctctctataaaagtagacctttcctggctcctgagcttaaaagcagccagggtttgtagtttgtgctcagagaggggattaagcctttgacagcagataggatggtgatgagcttgtaaaggaagttaccacgtggaggatccctataaggccagtgcaggatccaaggtgttcttagatttatgcccccaatatattgaaatgggtgagcaaggtgaatgttgtgaaattttaaattcaaatatagcaaacacggattggataactactatgtgccaggtactgtgctaggtgaaattaagatacattgcttgccctcacagaagaaatggagacatagataagtgaagaaataaatgccttcagtggaataattgctagtgtggagactacacccattctaaatgtgcctctgccctcctactccactaagaccatttttgtcaggtttgccaataatctccatgaggccaaaccaaatagctacaacattgttctcatcatactcagtttgtgagtagcatctgacacagttgactaactcctccttcttgaaacactttattcacctggctctcaggataccagattttcctttaatctcaccagataatccatctcagtcttctctcctggttttccttctcttcccaactttacatgttagaaggtcccagagcttttttcttagtcctgttctctgatcatgttcttttcctgtgtgatctcattaaatttcatggttttacatatcatttaaatgctaaagatgatttccaaatttatctaagattgatatcttgcctcttttgtcatatcaaatttcctgctcaacagttctccttggatgactcatgggcatctcagtttacactgtgcaaaacataacttgatgcctgactctttcttaacctgctcctactctggtctcctccatctaagtaattggcagcagcagtcatccagttgctaaggtcaagaactttggaatcatccttggttactactttccctttttccttcatattgaatccattggcaattcttgtcagctctacctgcacattatatgctaacttctactactgcccactgcttctatcactgtaagccactattatctcttacctggtatcattgcttgccttcttccttgcctgtaattcattctccccggcagccagtaacagcacatcctttaaaatatggaaatcaggattctgcaagcttcccaagcacacatcagcagccggctcccttactgtctgaatcatcgacctctctccatttccaaaatgtcgctttctaacaagctgacattggacaaaccagacgtcaaagggcagcgggtcattatgagagtggacttcaatgttcctgtgtagaataaccagataacaaacaaccagaggattaaggctactgtcttaagcatcaaattctgcttggacaatggagccaagtcagtagtccttatgagccacctaggccagcctgatggtgtccctatgcctgacaatactccttagagccatttgctgtagaattcaaatctctgctgggcaaggatgttctgttcttgaaagactgtgtaggcccagaagtggagaaagcctgtgccaacccagctgctgggtctgtcatcctgctggagaacctccactttcatgtggaagaagaagggaagggaaaactctgggaacaaggttaaagtgagcccgccaaaatagaagctttccgagcttcactttccaagctagggaatgtgcatgtcaatggtgcttttggcactgctcacagagcccacagctccatggtaggagtcagtctgccacagaaggctggtggttttttgatgaagaaggagctgaactactttgtgaaggtcttggagagcccatagcgacccttcctggccattctgggtggagctaaatttgcagacaagatccacctgatcaataatatgctggacaaagtcaatgagatgattattggtggtggaacggcttttaccttccttaaggtgctcaacaacatggagactggcacttctctgtttgatgaagagggagccaagattgtcaaagacctaatgtcccaagctgagaagaatggtgtgaagattaccttgcctattgactttgtcactgctgagaaatttgatgagaatgccaagactggccaagccactgtggcttctggcatacctgctggctgaatgggcttgractgtggtcctgaaagcagcaagaagtatgctgagactgtcacttgggctaagcagattgtgtggaatggtcctgtggggggtatttgaatgggaagcttttgcccagggaaccaaagccctcatggatgaggtggtgaaagccacttctaggggctgcattaccatcataggtggtggaaacactgccacttgctgtgccaaatggaacacagaggataaaatcagacatgtgagcactacgggtggtgccagtttagagctcctggacagtaaagtccttcctggggtggatgctctcggcaatatttagtacttttctgccttttagttcctgtgcacagcccctaagtcaacttagcattttctgcatctccacttggcattagctaaaaccttccatgtcaagattcagctagtggccaagagatgcagtgccaggaacccttaaacagttgcacagcatctcagctcatctttactgcaccctggatttgcctacattcttcaagatcccatttgaatttcttagtgactaaaccattgtgcattctagaatgcatatatgcatattttgcctgttaaaaaaaaagtgagctgtgttagcttagttctcttttgatgtagcttatcctgattagctttgtcactgtttcactactcagcgtggaaacaagatgaaattccatttgtaggtagggagacgaaattgatgatccattaaatagacaataaaagtgtccattgaaaccatgaaaaaaatggaaatcagatcacatcattccctctgtgccaaattttcagtaacctcccttcatacctagaataaaatttgcattttattcttcattatatgactgttgcttatttctgtgaccttcatttctgaactttgctctctcactgtctcttttgctctctactgtaatctcattgttcttgcaggtccttacttgtgtcaaacttacctaagggcctttgcatttgctactctcttggccctaaacattcttcctccagaacttcacaaggctcactctttcattcaggtgtctactaaatgctttcttctcatagagaccttttcttaacattctacttaaatagttctttctcctcctccaatcactccctatccctttatatggcttaatgcaactcatatcccctgcttctgtttgttcacatgtttattatctctctctcccattagaatgtaaaatctatttgattaccaggccctagaacaactcctggtatacatatcatgtatttagtaaatattctaagaatgaatgagtggatgtataaggaatgatgaagagattatcacttaggttaagggatcaactctttgacagaggaggtgagctggcattcaggagaaagtggaggggaacattggatgcctgtctgttgttccatagtctcatttttacagaatgggtttgtttatttacagtctccccaaatataaactctatgccagtggccacttgttttttttactatatccaaagcatgggcacagtgccaggcatatagtaattccttaataaatgagtgcaaaaaatgaatgaactgtgtgtcagtagatagaaggtctaatttaatcttggctactagcctgctgaataacttgagctagtcacttcccctctctggacctcaatttgcccctctgtggtgatgagggctttgggacagaagatctccaatgaggttacccagtctagacattttttatttttaacttttttaaaaactgagctataattcacataccataaaatgcaccattttaaagcgtacagtttaatggtttttagtaaattttgtgcaactatcttattccagaacatattcatcatcccagaatcccaatacttttaaatttacttctcccccaacctctgacagttactgatctactttctgcctctacggatttgcctattctgaacatttcatagaaatataattatagaatatgtggacatttttgggtggcgtcttactcttagcataatattttcaaggttcatccacattgtagaatgtatcagtacttcattctttcttatggacaaataatattcctttgtatagatgtagcacattttatttatccattgatcagttgatggacacttggattgtattcattttttggttattataaataatgccgctgtgaacattcatgcacaggattttgtgtggatgtctgtttttaattatcttgggtatatacctaggactggaattgtaggttatatggtcggtctatattaaaacttttgaagaattgccaggctgttttccaaagcagctgtacctttttttttttttttttttttttgagatggagtctcacagtgtcgcctgggctggagtgcaatggcgcgatctcagctcactgcaacctccgcctgccaggttcatgtgattctcctgcctcagcctctcgagtagctgggattacaggtgcataccaccacaccaggctaattttttgtatttttagtagagatggggtttcactgtgttggccagactggtctcaaactcctgacctcatgattcgcccacctcggcctcccaaagtgctgggattacaggcatgagccactgcaccaggcctcagctgcaccattttactttcccaccagcaatgaatgaaggctccaatttcaccacatcctcaccaatactttgtatagtctgtcttatttattctagccatcctatgtgagtgtgaatccataatctcatttaatgttcagcactcccatgcgaggtaggtatgctgaattctgttttatagtgaaggcactggaagctcaaagatgatgagtagttttcccaactaacacagctactaaatgacagaacaatttgcactcatctatcttatcctaaagcttatttatttactataatatcacacttcctataacctgtctgaacactgttctgagaaggaaccaatcctgctcaccagtagcatctcattatctcactctgaaatttgatatcccttttgtatatagtatgtcagtgactcctttcaccctcgtcatggactccatcacacctccataactaagccctgattattccacttctttaacctctcttgaatctgcctctcttttctgacgcagctctagtttggatccttctcaacagcggtcccctagcttgtctttctgccaccagtctttctggtccaagctacttttcattggaacgagcctatttttcattacttttcgtaatgaacccaaagggatgtttaaaaatgcatatttgataatgccacttctccccacccccagccctctgccccccaaaatcattgtcttctgtgactcaaaggcagagtttgtattcctgagcatggcattcatggacttcatgatatagccccaacttattgcaacaacctcacctccagctacccacactttttcatctgtaattggtccctatgctcaagccaaaccaaacttttaattatattttcttaggcaaagcatggtctttcactcctccaagttgttttttgtttgaatgccctttctactttgctccaccttttggaattcttcaaggcccagcttaaaagttacctgttttataaagaccctctctaatccttgcagtcagtattagtactgtcttactcctagcacttatttgcatgaatctacatgtattataataattgatttatttctattactgtaccagtgtgtatcctctcaaagcttctccccacctcttacccacccatggaagagaggcctccactttaagggttggccccacgcctatttatgaggcctccctgtctcatcctgattcactcccagttcttcgtagtccctgagacttgtctgtgtgttttcctgtagaaatgggtggctggttagggaaaggggatggcaccgaacttttattacctgacagagcaatgaactctcttcagaaagagtaagtagactctggaagcagacttcaagatttgaaatttggcgtttccacttagtagttttgtgacatggagactgcgggtgtcttagattccttatctgtaaaatggggctagtaacaatgtactactttatagagctgttttgaggattacatgagataatccaggtaaagcacttagaacagggtctgccatggtataagtgctcaagtaatggtatgtgttgtctttatcagtattattctcattattactgtcattgtcactattatcattatttttattcaccataccccagaacctagaaatagtttccctgctgaaaggcctggctccgaagtcatcatggcttctatcattacatttcctattttcccgagccagcagaagatactttcctgagtggaaggtagcagcctctctgaggctgtgtatgtgggtcctctttatgaagattggctctcttgagatggtgatgttactctatggcctgtagggcacaggcaacctttatttccctaagggagagcagagatggagtcacttgtccagaagaaagtattcagataggaacatgcagctgagatgttgggctaaagcatgtgagggaaagaatttatgtcaccatgcactttattgtttggagagagtagatgtgcttgagttactcctgagtgctgtgtttaaagatggcctctgccacaaggcacgtcctggaagccagaggctctagttatttggcgctcttgtgctcatgttcatgccattatttgtgagcctttggtagttttttgtttgatggcctctgtctggttgcacttatgctagggttaataaataaagggctatgtgtctactttgggacaaaattagggagactataggggaactccccttggttccggcccctttggcagtggcatcagtggtggcaaattcccaaggagaataaaactgtctaggggacaaaaacctttgcagcaagacttcccccatggaaacttttgcctcactgcccacccaccacataatagtgtaaataataaccaccaattaatgagtgtctgttatgtgccaggcactgaaataagtatacctaccatctcctgtaatcctcaccataacctcatgagaccggtattctttattattcccgttttactgaggagaaaatttgaggtacagagagaatagggaacttgtacgaggtctcacagtcggtaagaagcagaactgagattcagacctggccacctggcttcagagcctgcatttcttttaacattttattgcgaagaattccaaacataaacagaaattggaaacaaacgtattgaactccccacatttcagcatttaaaaacatatatcaagtcttatttcatctatacccctacccgttcccccaacctactcatcatgtcatttcatttgtaaatgtttcagtgtatatctctaaaagaaaggaactcttttaaaagcaaaaccgcaatatcatcatcatacttaaaataaaacaaaacagtgattccttaagatcagctatccagtcagtatccacattctcctattatctcattttgttaaaaaaaatatcaagatctaaataagatccatgtattgcaattggttgatatatatctcaggtttcaatttgctggccggaacctctgttctttttttttattattattatactttaagttctagggtacatgtgcacaacgtgcaggtttgttacatatgtatacatgtgccatgttggtgtgctgcacccattaactcatcatttacattaggtatatctcctaatgctttccctcccccctccgcccacctcacaacaggccctggtgtgtgatgttccccttcgtgtgtccaagtgttctcattggaacctctgttcttaaccactgcactcgaagttttttatgactatggaaggtgacaatttctttacagcaggcattctcaatctggggtttattgacagcttcagaaggctctgtgaatcactaaaaaattagttttcaaaatttttgctatatttgtgtgggttaatttttctagagagatggtccctaggtctcattagggtctcaaaagctttaagtaagtctcagaaccactgaaagacatgtactaatgtcagaggaaattgtagaccacaaaagctggggaaagaacagttggaggtttccttccgggttggagaacgaagttaaagtatgttatgttgattaacttaaaatttgagagaccttaacaaaatacttttcagagaagtggttaagaattaactgatgatgtcttcatttgcaaagaatagaatatgccattgactggggactttaagtcttttttgagtgacatattcctttaataaaacctcttggtttactgtggcttattgaattgtggtggtgaaaatcatacgcggatcttgaattccctatttggattggatctgtggctttacatgaactgggaagggtagagaatgattttgtgggatatagttggtttgtgccacagtgacataactgctttgaaaatgtatacaaattttcaaaattaagtatgtatgcatgtatcaaaatgaaaaggttttaaaagttatcattaatcttccctcttggcaccaacttttcctagatgaaatccaacatcaaacaccgaatggtactatcaccagcagcatagaaccccccaagccaccacaacaccccaaactacctattcagaggagtggggaaa

SEQ ID NO: 93226 - DNA, 22685 bp, Homo sapiens
caggcggatcacaaggtcaggagatcaagaccatcctgggtaacacggtaaaaccccatctctactaaaaatacaaaaaattagccggccatggtggcacgcgcctatagtcccaactactcaggaggctgaggcaggagaattgcttgaaccctggaggcagagattgcagtgagccgagatctcgccactgcactccagcctgggtgacagagcaagactccatctcaaaaaataataataatacaaaaattaccccgctgtggtggcgggcacctgtaatcccagctacttgggaggctgaggcaggagaatcgcttgaacccaggaggcggagcctgtagtgagccaagatcatgtcaccgcacacccgcctgggtgacagagcaagactatctcaaaaaaaataaattggctgggtgcggtggcatactcctgtaatcccagctaatcgggaggccaaggcaggagaatcgcttgaacccaggaggcagaggctgcagtgagccaagatggcaccactgcactctagcgtgggtgacagagcaagactccatctcaagaaaaaattgtatacatatatttatttaatataatgtatgctaggtaaataattgttacattgtatagggaacagtaagcaaaaaagtctgtacatgtccaatagagatgtgatttgtttccaaatattttctgtctgtggttggctgaagccacagatgtggaacctgtggatacggaaggccagctgtactaggactcttcactgtccttattttctctattttactacttgaaaatatcagctaatgtggggctctgcatcgagcactgtgctgtgtcacctggtttattcctcatagcaatcctaaagtgggtattattgctttttccattttacagatgaggaaacggaggcctagagaagtttagccattagcccgtcacacacctaatgtatccatgtcccaatgctgccgtaacactaccacaaactctgtggcttcaaacaacacaaatgtattgccctatggttctgaaggtcagagtctaaaatgggtcgaccaggctgtgttcatcctgaaggttctagggcagagtccatcttttgccttgtccagcttctagagggtggtggcattcctgggcttgtggtctcccatccctccaccctctgcttccaggctcacgtctcctcctctgactctaatcctcctccctccctttttttttttttttttttttgagacagagtttcgctctttttgctgaggctagagtgcagtggcgccatctcggctcactgcaatctccgcctcccgggttcgagcgattctcctgcctcagcctcctgagtagctgggattacaggcacctgccaccacgcccagctaacttttgtattttagtagagactgggtttcaccatgttggccaggctggtctcaaactcctgacctcaggtgattcacccaccttggcctcccaaagtgctaggattacaggtgtgagccacgatgcttggccttttttttttttttttttttgagacggagtcttgctgtcacccaggctggcaggctggagtgcaatggcacgatgtcggctcactgcaacctccgcttcctgggttcaagagattctcctgcctcggcctcccgaatcactgggatttcaagcgtgcaccaccacacccagctgatttttgtgttttcagtagagacggggtttcaccatgttggtcaggctggtcttgaactcctgagctctagcaatccgcccccctcagcctcccaaagtgctgggattacaggcatgatccaccgcgcccagcagacatacttctatttaaaaagtgcaggggaggctaggcgcggtggctcatgcctgtaatcccagcactttgggaggccgaggggggcagatcacgaggtcaggagatcgagaccatcctggctaacacggtgaaaccccgtctctactaaaaatacaaaaaattagccgggcgtggtggcgggcacctgtagtcccagctactcgggaggctgaggcaggagaatggcatgaacccgggaggcggagcttgcagtgagccgagatcacgccactgcactccagcctgggcgacagagcgagactctgtctcaaaaaaaaagaaaagtgcaggggaacaactgtggcccctgctccagctcttggcctggctgggtgggcaggaggcccactgtcccctcctctcccctctggccctcagtcttcctgtctctctgggtaccttgtttctaatgtttgttgttactattatgaaagtcgtatctatctcttaaagaagatctggaaaccaccaagttgttaaaagacaaagtcaggccaggcgcggtggctcacaccagtaatccaagcactttgggaggccgaggtgggcagatcacctgaggttagaaattcgagaccatcctggccaacatggcgaaacccgtctctactaaaaatacaaaaattagccgggcgtggtggttggtgccagtaatcccagctactcgggaagctgaggcaggagaatcacttgaacccgggaggcagaggttgcagggagccaagatctcgccactgcactccagcctgggtgacagagtgagactgtgtctcagaaaacaaaaaagacaaaagtcacagagccccgcccagtcccaggcaggacagtaacaggaggaggaggctgtggcagggagtggttccggtgagtcagacttctggacccaggttcgattgcatgccataagacccaccaatgtgtgagcttgagtaacgttccctgagcccttctgcctcagtatactcatctgtaaaatgggtatgttaatagtatccacctcctcccagtgtcgtgaggatgaaatgaactgatcatcgatgtcagagccgtcgaagcatgatggaaggctcacagaaacgtgcactgaatgccctgtgctattatcgccgtgttgacgtgtgattccatccaggcttttgtcctcttccaccatagtcacgctgcatagatcgttttttccctggcttttgccagtcaacaccaccgggagcaccttccagatgacagcatgctttctgcaaactactcctttgacggcacttacatggtgcagtccctactggcacccagtgaggctcctcccctcaccgccacgattttcagaattagaccatcgctcacatgggaggattttcctggagaaagtgttttctctgcacagaggcgcatttccttaggggacatccccagaggtacgtctactgctcaaacgcagtccacacgtcaccatcaccagagccatttgttcatccactaaccacatcctcagctgcttatgggagaggcccccgtgctgaatccctcaagggctgtggaattgtggttttcaagatttcaccttggacaacaaactgtggtccaggacaggctgtgccccatcgtccctgccaccctgggccctgcctggcccacccttaacctctaagcctttatttatttacttacttatttatttatttatttatttactgagctagggtcttactctgtcgcccaggctggagtgcaatggcacgatctcggctcactgcaacctccacctcctcggttcaagctattctccctgcctcagcctcccaagtagctgcgactacaggtgcccgccaccaagcccagctaattcttgtatttttagtagagatggggtttcgccatgttggccaggctggtctcaaaccggacctcaagtgatctgcccaccttggcctcctgaagtgctgggattacaagcatgagtcaacgcacctggctgacccctagcctctaagcctttaaggttaagcctccaggaaggagcgggagttccccagaaggaagaactggcagaaggtagtggacagcaaagggcagaagtcggcctggggctcaggaaagctggaaccacggccacctttcttctgtgaatacggttttacttagacacagccacgcccatctgtttacctattgtctgtggcgactttctcactgcaatgaaaagttgcatagtagttgcaacagagaacttaggaccagcaaagcctaaaatagggaccatctggccctttacagaaaacacttgccagcctgagtgtggtggcgctttgggaggctgaggcagctggaccccttgaccccaggagttcaagacaatcttgggcaacatagggagacctcatctctacaaaaagtaaaaaaattagcccagcatggtctacgtacctgaagtcccagctactagggaggctggggcaggaggatcacttgaacccaggaagtcgaggctgcagtgagctgtcattgtgcctctgcactccaacttgggtgacaaagtgagaccctgtcccaaaaaagaaaaaaaaaaaagaaagaaaagaaaggagaaaagaaagaaaaaagaaagagaaaacatttgccaatagcaaggacacaggaatgcctaagccttgtgaagtcaagtaccaggaaacaagaaagaattaactgtgtgagatggacttggtataagaaacagcttatcaggctgggcatggtggttcacgtctgtaatctcagcatttagggaggctgaggtgagaggatcactagaacccaggagtttgagaccagcatgggcaacatagtgagaccgtgtctcaaaaaaattttaaaaagggctgggcgcaggggctaacgcctgtaatcccagcactttgggaggccgaggagggcagatcacgagatcaggagatcgagaccatcctggctaacacagggaaaaccagtctctactaaaaataggaaaaaattagccgggcgtggtggcaggcgcctgtagtcccagctactcgggaggctgaggcaggagagcggcgtgaacccgggaggcagagcttacagtgagccgagatcatgccactaaactccagcctgggtgacagagcgagactccgtctcaaaaaaaaaaagaaaaaaaggaaaaaagaaaaaaaaaggccaggcatggtggctcactaatcccaacactttgggagaccagggttggtggatcacttgaggtcagaagcttgtgactagcctgaccaatgtggtgaaaccccttctctactaaaaatacaaaattagcgtggtggtgcacaccggtaatccagctacttgggaggctgaggcaagagaattgcttgaacccaggaggcggaggttgcagtgagccgagatcgcgccactgcattccagcaagggcaacagagcgaggctgtctcaaaaacaaacaacaaaaaaagaaacagcttatcagagagacagtaaggcaggggtgaggaccacagtctggaaagcacatggcctatttaaagagggcatctcaagtcagggtgataatctctaagatacaccggaaatctagatgtttctgtaaaccagaaaaaggcagtagagggtgagcacacagactcagagcggcagagactctgccacctcctcacctgaccctctcttatctatcagcttggggtagtaacagcacttacttcacagggcttgattattaaacaagttaacatctttgggctcctagaacgatgccatgtgcagagtcaggactgggtaaatatttgctaaagcaatctcttcatgtttttgacgctgcaacttaaaacacatggcgccaatcgtggacacggatatcccgctagccagctgtggggcctgggtttgctcaccccagcagagtggttgagggcgtcagcttggaggtgggagcccagctgacgagggggccttgggcccctggttctacttggggattattgtattattaggctggggtcattgtggggattagaagggtaacagctcctgctcctgctgcagagaagcctccaggtgggggtcacagcaagtgcagatggagctcagattcttcggttaactgtcaccctctcccctcccccatcacacacaccaggccctgccaggayaaggcagctcctggaagctccaccaggacccacgtccaccaggtgtcacagcaggctgcttctctctctctctgccccccgtgggctcttcgcaccgctccctcccagccatcttccctgcctgrccttggtctctctctctctgtctccgtcaccttcatgcctgtgccgtctttctcgctctctatcaactctgctgtgtgtccccctggggaaagtgggggcacctcctcctgagccccctgcccaagtttcctgctgggacgggagccacttcaccccatacacactccctgaagcccctccaggactccagcctggctgcaaacacccatcctggactttgcctggccctccrggctctgctgggggaagcgacctgasaggcccctgcctgggctgtaggtggggacagggcagacccttgggcagcggagcctctctggatgggtgttgaggcaccctgcagaaacagctccccacaggcacccttgccacacccctgggactacaggcacttagggtacaccagaggcatgaagtgtggagggggttggccaacggccaagctcaaataggggttcagataggagaggtcaatgtgggctcctctgagccccagtgacccccttctccccacccacctggtgacaggcatctcgaacccttggcccccatggaccccctgaggcgctccccctctccctgcctgtcctcgcagccctccagccccagcaccccaccctgcgagatgcttggtcctgtgggcattgaggctgtgctggaccagctgaagatcaaggctatgaagatggggtttgagttcaacatcatggtggtgggtgagtgagaggtagggcccacggcaggacagacccacagtgctacgcgtgcctgggcgtgtggcctcacctttggcagcctgtcgcccctccccatctcttaggtgggcctgataatrgcacctcacagggatgttgtcattgaaaatttgagaaatgctgagtcattaaaagacaaaaatgtgcctggagcggtggctcacacctataatccagggttttgggagactgaggtgggtggatcacttgagctcaggagtttgagactagcaaaacctaatgtctacaaaaagtacaaaaatgaggccgggcatggtggctyaagcctgtaattccagcactttgaaaggccaaggcaggagggtcacttgaggtcaggagttcgaaaacagcctggccaacatggggaaactccgtctctactaaaaatacaaaaatttgccaggcgtggtggtgggcgcctgtacttaggagctacttaggaggctaaggcaggagaattgcttgaacctgggaggcagatgttgtagtgagccgagattgcgccactgtactccagcctgggtgacagagcaagactgaagcagaaggatccctggaggccaggagttcatgaccagcctaggcaacacagcaagaccccatctctacaaaaaaaatttaaaaattagccaggcatggtgacatgcacctgaatcccagctacttggggggctgaggtgggaggatcgtttgaacctgagggtggaggttgcagtgagctgcgatcacttgagtctgggtgacagattgagaccctgtcttaaaaattaaaaaacagtgcaaggccgggtgtggtggctcacgcctgtaatcccagcactttgggaggctgaggcaggcggatcatgaggtcaggaaatcaagaccatcctggctaacatggtgaaaccccgtctctactaaaaatacaaaaaaattagccaggcgtggtggcgggcgcctgtagtcccagctacttgggaggctgagacaggggaatggcgtgaatctgggaggcggagcttgcagtgaaccgagatcccaccatcgcgctccagcctgggtgacagagcgagactgcgtctcaaaaaaaaaaaaaaaaaaagcagtgcaaaaatcagctgggtatggtggcgtgtgcctacagtcccagctactagggaggccgaggtgcgagaatcactagagtctgggaaggtcgaggctgcagtgaacggggattgcatcattgcactccagcctgggtgacagagtgagaacctgtctccaaaaataaaatagaaaagtaaagagttagagaaaaactgcctaaaacgcccaccctaactgctgtcatccggttgccactcccagggcaaagcgggctgggcaagtccacgatggtgaacacgctgttcaagtccaaagtgtggaagtcaaacccaccrggcttgggggtgcccacaccccagacgctgcagctgcattcactgacccatggtgagtgagcccctgcccacacctcaccccaccctgccccaccccatcccacctgggtccagtctctcccgactctgctctccctccacagtcatagaggagaagggtgtgaagctgaagctgacggtgacggacacgcccggcttcggggaccagatcaacaatgacaactggtaggttctctctctttttttttttttttaggcagagtttcactcttgtcacccaggctggagtgcaatggcatgatctcggctcactgcaacctccacctcccaggttcaagtgattctcctgcctcagcctcccgaagtagctgggattacaggcgcccgccaccacgcccagctaattttttttgtatttttagttgagatggggtttcaccatgttggccaggctggtcttgaactcctgacctcagatgatccacccgcctcggcctcccaaagtgctgggattacaggcatgagccactgtgcccgcaacaagtggtgggttctcaaaggtgggggccaagccatggctgtcccctcctgtccgtgcccctcccccttcaacctttgggaaacaccccagacctggaacagccaggctgtgtgatcttttttttttttgagacagaatctagctcttgtcgcccaggccagagtgcagtgacacaatctcggctcactgcaacctctgcctcctgggttcaagcaatttccggctaatttttttttttttaagacagactcgctcttgtcrcccaggccagagtgcagtggcacaatctctgctcactgcaacctccgcctcccggggttcaagcaattctcctgcctcagcctcccaagtagctgggattacagacatccgccaacacgctcggctacttttttgaatttatttagtagagacggggtttcaccacgttggccaggctggtctcaaactcctgacctcgggtggtccgcccacctcagtctcccaaagtgctgggattacaggtgtgagccactgcacccggcccaatttttgtatttttagtagagacggggatttccccatgttggccaggctggtctcgaactactgacctcaggtgatccacttgcttcagcctcccaaagcactgggattacacgcataagccaccgcacctggccctggtttcattttatttatttatttatttatttatttatttatttatttatttatttagagacagtgtctcagtctgtttcccaggctggagtgcagtggcgagatcatggctcactgcagccttgacctccccaagctcaaggaccctcctgcctcagcctcctgagtagctgtgaccacaggcacgtgccaccccaccgagctaatttgtgtattttttgtagagttggcgtttccccatgttgcccaggctagcctcgaattcctgggctcgagcgatcctcctgcctccgcctcccaaagtgctgggattacaggcatgagccatcgggcctggcctgacacctgtttttaaaaggatctgtttggctacttacagtgttgacaatacccaagaggggaagggactcgaagaggaggagggagacccctgcaaccatcagrcgcgaktccttggtggtttgggcccagctgtggccctttaayacagttaatgctcacccytcccttacttgcaacgtaggtgctactattgtctccattttacagacagtgaagccgagaatggcaggaggtctccctgtgtgtctctgatgatgcagggaagtgggggaaagtaccggggtgacccacaggtcccgggccaaccgggacgattcrtcrtcccaagggaggaccgcccagaggacacagaggagaggggtggggctctctgggcacagcacagttctgaggggagggtccacctcccgcctcagctgggaccccatcctgggctacatcaacgagcaatacgagcagtacctgcaggaggagatcctcatcacccgccagcgccacatcccagacacccgggtrcactgctgcgtgtactttgtaccacccactgggcactggtgagggggctgcacctgcaaggcgaggaccacctgcacggggcagggaggaggagaaggggtccccaccatgggctgccggctgcccccacccccgtgccctgctgctgtcgtttatacactcaccaccaccgccacccccatcactgccctgcctccggcagcctgcggcccctggacattgagttcctgcagcggctgtgccggactgtgaatgtggtgcccgtgattgccagggccgacagcctgaccatggaggagygagaggccttcaggcgcagggtgatctggatgcccgggcagggctggggtcagcrggggcagagggcagagtgggcagggtgggctgaggtcacctgtgtgggatctccagatccagcrgaacctgaggacccactgcatcgacgtctacccccagatgtgctttgacgaggacatcaatgacaaaatcctcaacagcaagttacgggtgagaggctgtggggcgggaggcgggcgaggtgatttcctycccacacatcmtttccatccaaagactcatctttctctacatctcagggaaatgtgcacatattcctagcagatatgattctctactcatccacaagctcaaggtgagcaagaaataacagctcacactaacaacccacagaatcggagaaaatgtctgcgaatcacatacccaataaggggcttgtatcctgaatatrtagagaacattgggccgggcacagtggctcacgcctgtaatcccagcagtttgggaggccgaggcaggcagatcgcttgaggtcaggagttggagaccagcctggccaacatggtgaaaccttgtctctgccaaaaatgcaaaaaattggctgggtgtggtggtgcacgcctttagtcccagctactcaggaggctgaagcgggagaattttgaaactgggaggcagaggttgcagtgagtgagctgagatggcgccattgcactccagcctgggcaagaagagtgaaactccatctcagaaaaaaaaaatgtgttggccgggcgcagtggctcagccctgtaatccctgcactttgggaggccgaggtgggtggatcacctgaggtcaggagttcgagaccagcctggccaacatgacgaaaccccgtctctactaaaaatacaagaaatcagctgggcgtggtggtgggtgcctgtaagcccagctactcaggaggctgaggcaggagaatcggttgaatcttggaggtggaggttacggtgagccgagattgcgccactgcaccccagcctgggcaacaagagcaaaactccagcttaaaaaaaaaagtgctgtggaagatgtggaggaactgaaaccctcacctactgctggagggaaagtaaaatggctcagccactttggaaaacagtctggtggttcctcaaatgcttaaacatgcagttactctatgacccagcaactgaactcctacgtgtatacccaaaagaaacaaaaatgtacattcacagaaaaatgtgtacgtgaatgttcacagcagcattatttattttagccccgaaagtggaagcaacccaaatatgcatcaacagatgagtggggaaacacagtgcggcctattccctaccatggactatcccttaaccatgaaaagcaatgaagttcaccctttaaaagtgtacagttcaaggctgggctcagtggctcatgcctgtaatcccagcactttgggaagctgaggtgggcagatcacttgcggccaggggttcgagaccagcctggctaacatggtgaaactctgtctctactaaaaatacaaaattagctgcgtgtggtggcacgcacctgtaatcccagctactggggagactgaggcaggagaattgcttgaacctggaaggtgaaggttgcagtgagcagagattgtgacactgcactccagcctgggcaagggagtgagaccctgtctcaaaaaaaaaaaaaaaaaaaaaaaaaggccgggcacggtggctcacacctgtaatcccagcactttgggcggctgaggtgggcagattacctgaggtcgggagttcgagaccagcctgaccgacatggagaaatcccgtctctcctaaaaatacaaaattagccgggtgtggtggtgcatgcctgtaatcccagctacttaggaggctgaggcaggagaatcacttgaacccaggagatggagattgcagtgagctgagatcacaccgttgcaccccagcctgggcaagggagtgagaccctgtctcaaaaaaaaaaaaaaaaatgaagcactgtcaccctgtcacctgcctgctacagcgtgggggaaccttgtaaacatgtttctcagacaaaaatcartcagacacaaaaggtcacgtattatgggattccatttatatgaaatgtcccaaataggcataggcaaatctatagagacagaaagtagattggtggtagtcaggggctgtggggaagggagaaatggggagtgattgctaaaaggtatggggtttttttggggggacgtgatgaaaacgttgtgaaattagattgcgatgatggttgcataaccctggtcaaatactaaaaacccccgtaccgtacaatgttttgtttgttttgtttttaatgttgttttttttatgagatagggtcttttttttttttttagatggagtctccctctgtcacccaagctggagtatagtggcgtgatctccgctcactgcaacccctgcctcctgggttcaagcgattctcctgcctcagcctcctgagtagctgggactataggtgcacaataccacgcctggctaattattgtctttttggtagagatggggtttcactatttcagccagggtgatctcgatctcctgaccttgtgatccacccatctcagcctcccaaagtgctgggattataggcgtgagccaccgtgcccagcagagacagggtcttgttctgtggcccaggctggggtgcagtggcaggatctccgytcacagcaayctccaacctcctgggttcaggtgattctcccacctcagcctcctgagtagctgggattacaggcatgcgccaccacacccagctaattttttatttttcctagagacagggtttcaccatgttgaccaggctggtcttgaagtcctgacctcaggtgatctgcctgccttcacctcccaaaatgctaggattacaggtgtgagccaccacgcccaatattatcaacatccacattactccccatcacagatgaattcagaagtaaaaacccatatatgtcacttcggagtttgcaagtttgaatttctgcttctggccatgagcaagtaaacaactggagtttacggtagggttcaacaaccttttctgcaaagggccaggtagtaaatgttttagactttctgggccgtagggtctctgttgtgatgattcaactctgatgtcatggttcaagagcagccatagacaaaaatgactcataggctcaactatgtgccaataaaactttatatataggaagacaggcaggctgggtgtggtagctcactcctataatcccaccactttggaaggcagaggcgggaggatcacttgagcccaggagttagagaccagcctgggcaacacagagaactcatctctactaaaaatgtttaaaaagtagccaggcatggtggtgcacacctatggtcctcactcctcaggggactgaggcggggatatcacttgagcccaggaggtcaaggctgcagtgagctatgggattataggtgtgagctatataatacgctatataatataatgggattataagctcagctaattttttagtttttgcagagatggcstttcaccatgttgcccaggctggtctcaaactcctagggctcaagtgatcctcccacctcggcctcctaaagtgctgaaattacaggcaagagctacctcactcagccagaggcaccaattagactttatgtctttgaacttgggaattctgtgcactttctaccatgttccctcctcgaaaaggataggactcccctctcctgcctgggtgccttgacttttcttctcttctccccagcgaagtcaatcctcccatctctgtgtcttctcctttcccaggaccgaatcccttttgccgtggtaggggctgaccaagagcacctggtgaacgggaggtgtgtcctgggccggaagaccaagtggggcatcattgaaggtcagtgcggggcccctgggtaggatgcaggtggggtcagtttggaaacyagagcagccttgggcaaccttcgcacccatcacagggcacagaaaggtgaagcccactagacaaagagccctggggaatggtccctctttccagctgggaggctgtggcaagtttccggaccctctgggcctcagtttcctcacagtaaagtgggcatcacagtgcatcaacttcctagggtgttggagcggggagaaccaccattttgcacaatgcccaatacccaaggctgccctagtggctggccggaaattacgatgggcctactgtgtatcaggcaccgctatgtgcagttactgcagtgcacggtaaagggaggactgacagggtccctgtccccatagagctgacaggacaaggacaggtcggggaggcacagtgaaggcgattgtggcgggagggagaggagactgccttagggagctagggaaagtgacacaggaggggcagcgaggatgtagcccctgatgtattattattattttttatttttatttttttgagatggagtctcgcagtgtcacccgagctggagtgcggtggcgtgatctcggctcactgcaacctccgcctcctgggttcaagtgattctcctgtctcagcctcccaaagagctgggattacaggcacctgccaccacgcccagctaattttttgtatgtttatgagagacggggtttcactatgttgccaggctggtctcaaactcctgacctcgtgatctgcccgcctcggcctcccaaagtgctgggattacaggcgtgtgccaccgcgcccggtcaggtgatgtattattataattattagaaatattctatactatatatatrtatwtttttgagacagagtcttgctttgtcactcaggctggagtgcagtggagcgatcttggctcactgcaacttccgcctctcaggttcaagcgattctcctgcctcagcctcccaaatagctgggactacagattataccaccacaccyggctaatttttgtatttttagtagagacggggcttcactatgtcgtccaggctggtctcaaactcctgacctcaggtgatccacccaactcagcctcccaaactgctgggattataggcgtgagccaccgcgcccagccagaaatatactatactattgcctatgatatagcacccatgctatcckcagagggtggttccaggacccccagggataccaaaatcggcagatgctcaagtcctacagtgggcacccatggatacagaggccgagtgtacatataatacaataatgattggtggattcattcattctacagctatttgtaggagccgcctgtaccaggcactgggaacacaacagtgggtgaatgaatgaatgaaccaacaaagggaaggcaggatagggtaaagagaaatgtgggaaaagggctaagggaaatggtgtcaggtggtgcatacagtaggcacttactcagtgctcactaagcagcgcccatactgagtcccatgtcttgcagtggagaacatggcgcactgtgaatttcctctcctgagagacctgcttatccggtgagggtgtggggagcctggggctagggggctggcgaggggccctggggacaccaccatcggggctgaccgtctccggtcccccagctcccacctccaagacctgaaggacataacccacaacatccactatgagaactaccgcgtcatcagactcaatgaaagccacctgctgccccgcgggcccggctgggtgaacctggccccggcctccccaggacagctgaccaccccccggaccttcaaggtctgcaggggggcccatgacgattctgatgatgagttctgaccaccggcggatcccggggctgctgggcttcctgagtccccagcggctctcaacacacacctatgtaccagagcatctattaaatgtgagccttgctttttatgaaaagctgtgctttgaaaacaaaaggcattttgtaaatgacttctttgagctatccacaaataaaaaggctgggtgtcactctgttacccaggctggagtacagtggcgcaatcatgactcactgcagcctcaaatttctgggctcaagtgatcctcctgcctcagcctctcaagtagccaagactatgggcatgacaccaccttgatgggctgatttttaccatttttttttgtagagataaggcctcactaggttgctcaggctggtctttagctgacctcaggtgatccttccgcctcagccttccaaaacactgggattaccactgctgccaaccaagtatgtttttgtggtggttgttggttgttgtttctgagatggagttttctggggtttttttttttttgttttgtcttgttttttgagatggagtttcgctcttgttgcccaggctggagtgcgatggcgtgatctcggctcactacaacctctgcctcccgggttcaagtcattctcctgcctcagcatcccaggtagctggggactacaggcatacaccatcatgcctggctaatttttgtatttttagtagagatggggtttcaccatgctggccaggctggtcttgaactgacctcaagtgatccaccggcctcggcctcccaaagtgctgggattacaggcatgagccactgcactcagcctctgagatggagtttcactctgtcgcactggctgaaatgcagtggcatgatctgggctcattgcaacctctgcttcccgggtttaagaaattctcctgcctcagcctcccgcgtagctgggattacaggtgcccaccaccacgcccagctaattttgtgtttttagtggagacggggtttcaccacgttggccaggctagtctcaaattcctgacctcaagtgatccatctgcctcagcctcccaaagtgctgggattacaggcatgagccacagcacccaggtttctttttgaataatgtgagacccaaggccctaggaatcttgaaggcctgggaaggcatgccttggacaaccagccccctctgccccagagccagacccaagtgacaaaatcagctctcccatctgtcccagccccttactcctggcccggggctaggcccacaggccaagaacactttcaaaatccccatctttgtggcctgatctctggctgtcttacctgatctctgtgttccaccatcccccaccttcctcattcccctgccccaggggccagcatggccagcaaacagctcccactgtggagcctggcaatgccagtgtgaaaatcccagcaggcaagtcagttacttatgctccccttgcctcactttcctcatctgtaaaatggggatcatggtaccaagcacatagcactgttgttcagacaaaataaaatactccctaggatgtgccgaccacaacctggagaaatggcatgaagacagaggctacatgatcaagatggagcagcagtccagggtggaggacctgctgcagaatgtgtgagctccacagcccagggactctccagaaagctagaaaataggccgggcacggtgctcacgcctgaaatcccagcactttgggaggccgaggcgggcagatcacctgaggttaggagttcgagaccatcccggctaaaacggtgaaaccccatctctactaaaaatacaaaaaattagccgggcgtagtggcgggcgcctgtagtcccagctacttgggaggctgaggcaggagaatggcatgaacccgggaggcggagcttgcagtgagccgagatcccgccactgcactccagcctgggcgacagagcgagactccatctcaaaaaaaaaaaaaaaaaaaaaaaaaaattagccgggcatggtggtacgcacctgtaatcccagctactcaggaggccgaggcagaagaatcacttgaacccagcaggtagaggttgcagtgagccgagatcacaccgttgcacttcagcctgggcaacagagcgagactccatctcaaaaacaaaacaaaacaaaacaaaaaagctagaaaataaatggatttcacagaatcccacaccatgggggccaaagctacattagtcattagtttggtaataaaagaaagggctacccctctaatctaggaagctgggtgcaaggtgagccttcaacaaatgacaacaatgagtagcagttttgttccaactaaaagtcaccttctccctgaagccctccttgccttccccaggcaacccactcactgccccctctgagtgtgtgtcacctagtttgtttcctggtcagtctcccccattaggctggaaacatagtgagggcagagatatgtcagtttcatccctgcatccagtgcatggcaggtggtaagaacagggctgctgactgaacagaacggaccctgcattgcctgccctacagcgatctgctggttgaattcacaaaccagcttctccacccacaccgcaggctgactccaggactggggagcttccagagcccgtgggcactcaaaccacccacgaccaacatctgagttggctgagacactggcccacgtcacagcacatcccaaggtttaagattagccctgggcccgtccgggagggaggtgggggtgtcagccccccgcccggccagccgccccgtccgggagggaggtgggggggtcagccccccgcccggccagccgccccgtccgggaggtgaggggcgcctctgcccggccgcccctactgggaagtgaggagcccctctgcccggccaccaccccgtctgggaggtgtacccaacagctcattgagaatgggccatgatgacaatggcggttttgtggaatagaaagggggggaaggtggggaaaagattgagaaatcggatggttgccgtgtctgtgtagaaaggggtagacatgggagacttttcattttgttctgtactaagaaaaattcttctgccttgggatcctgttgatctgtgaccttacccccaaccctgtgctctctgaaacatgtgctgtgtccactcagggttaaatggattaagggcggtgcaagatgtgctttgttaaacagatgcttgaaggcagcatgctcgttaagagtcatcaccaatccctaatctcaagtaatcagggacacaaacactgcggaaggccgcagggtcctctgcctaggaaaaccagagacctttgttcacttgtttatctgctgaccttccctccactattgtcccatgaccctgccaaatccccctctgcgagaaacacccaagaatgatcaataaaaaaataaaataaaataataaaaataaataaaaaaaaaagattagccctgggcaatatggaaacatctacagcatttcaaaagcacacaccctttggctcagccgttgcatttctaggaatacatctcacagaccaggtttctcaacctctgcaccaccagcacttgtgctagatcattctatttcttctccttcttcttcctcttcttcctcttcttcttcttctttttgagacagggtcttgctctactgcccaggttggaatgcggtggctcaatcatagttcactgcagcctcaacgtctcaggcccaagtgatcctcccacctcagcctcctgagtagctgggactacaggcacatgccaccacacccagctaattttttttttttttttaagatggagtttcgctcttgtcacccaggctggaatgcaatggcacaatattggctcactgcaactctgcctcccgggttcaagagattctcccgcctcagcctccctactagctgggatcatgggtgcgtaccaccatgcccggctaatttttgtatttttagtagagacagggtttcaccatgttggccaggctggtcttgaactcccggcttcaggtgatctgcccacctcagcctcccgaatagctgggattacaggctcccgccaccacacccggctaatttttgtatttttagtagagacggggtttcaccatgttgagtaggctggtctcaaactcctgacctcatgatccgcccgtcccggcctcccaaagtgctgggattacaggcatgagccacagtgccaggctttttttttttttttttttgaaagttaatcaagaaggctgggtcatgcctgtgtaatcccagtactttgggaggctgaggtgggcagatcacctgaagccgggagttcaagaccagcctggccaacaaggtgaaaccctgtctctactaaaaatacaaaaattagccgggcatggtggcacgcacccatgatcctagctactagggaggctgaggcgggagaatcgcttgaacctgggagatggaggttacagtgagccaagatcgcaccactgcactccagcctggccaatagagtgagactctgcctcaaaaaaagtttattaagaaagcaaaggggccgggtgctgtggcttatgcctgtcatcctagcactttgggaggccaaggtgggtggatcacgaggtcaggagatcgagaccatcctggctaacatggtgaaaccccgtctctactaaaaatacaaaaaattagccaggcatggtggcgggcgcctgtagtcccagctactcaggaggctgaggcaggagaatggcgtgaacctgggaggcggagcttgcagtgagtggagatcacgccactgcgctccagcctgggcgagagaacgaaactctgtctcaaaaaaaaaaaaacaaaaaaaaaaacgaaagcaaaggaataaaagaatgactactccacaggcaaagcagccaaagatttttttttcttcttttgagatgggttctagctgtcactgaacctggaattccgtgggcatgatctcagctcactgcaacctctgcctcctgggctcaagcgatcctcccacctcagcctcccaagtagctaggaccacaggtgcatgccaccatgcccagctaattttttttttttggatttttggtagaaacagggttttacaatgttgcccaggctggtctcgacctcctgagctcaagccatctgcccgcctcagcctctgaaagtgctgggattacaggcttgagccaccgcactgggcccctcagctaatttttatctagtgttgtagagatagaatctcactatgatgccgatgctggtcatgaactcctgggctcaagagatcctcctgctgcagcttcccaaagtgctgggattacaggcacgagccacctcacccagtctagatcattctttgtggtggggactgtcctgtacactgtaggatgtttagtagcatccctggcctccacccaccagacaccagtagcaactctcactttgttgctaattaaaaattatcctggggccaggcacagtggctcaagtctgtaatcctggcactttgggaggccgaggcaggtggatcacctgaggtcaggaatttgagactggcctggccaaaacggtgaaaccccgtctctactaaaaatacaaaaattagccagacgtggtggcaggcgcctgtaatcccagctactcgggaggctgaggcaggagaattgcttgaacccgggaggcagaggtggcagtgagccaagatcgtgccattgcactccagcctgggtgacagaacaagactctgtctcaaaaaaaaaaaaaaaaaaaaattatccaggacaagtcacgtgtcccctgggggaagcatagcacccccacattgtgcaccactaactgttatgcgcatgtgttaggggatcccccaaggctgtccagtgttgtaaaggaggggaaacagcctccctggccacccagagcactacattccatatgttttcacttcttgtggctgctgtaacaaattagcacaaatgcagaggcttaaaacaacacacgtgtatcctcctatagctccagaggtcaggagtatgagatcaatatcactgggccagaatcaaggtgtctacagagccctgcagcctctggaggctctt

SEQ ID NO: 93227 - DNA, 40751 bp, Homo sapiens
aaataataccagctgccattggtctgagggctggctgtgtgccaggcactatgagcagtgacctaaatgcattaagccatcccatcctcgcaacagccccatgaaattgctattaggtttaccctcatttggtagttagaaaaattaaatatacctatttttcagacagggtcaggctctgtcacccaggctggagtgcagcagcgtgatcaccaggctcactgcaactccagcctcccggtcttaagcgatcctcccacctcagtctctggagtagctgggaccacaggcacgtgcaccacacccagctaatatttttgtattttttgtagataccgggttttgccatgttgcccaggttggtctcaaattcctgtgctcaagtgaactgcctgccttggcctcccaaagttcttggattacatgagtgagccattgcgtccagccagaaaaatgaaatattttggagagggccgtgaagtggtgtgtcctaagacttgaacccagttccagctcactacatttctggttctcactggctctcaaaccctccgctactcagtgggctccagagatcagcaagttttcacccagtacatagcatggtaatgttcacgttgactgttctatttgacttttactgcatgggacacttgggaccaaccctttgcctaccctaggccctaccccctctatgacccctccttagtttccacaggtccttcctctggatccatcctagagccccttcccttcccagtgggtcctcctgcctcaaatttgcaccccctccacactgtcagaatgatttgtctaaaacatgaatcctggcggggtgcggtggctcacacctgtaatcccagcactttgggaggcctaggtgggaggatcacttgaagtcaggagtttgagaccagcctggccaacatggtgaaaccctgtctctactaaaaatacaaaaattagccagttgtgatggtatgtgcctgtaattccagctacttggatggctgaggcagaagaatcgcttgccaagaggcagaggctgcagggagccaagatcgcgccactgcaatctctgtcccaaaataaaataaaatttaaataaaaataaaaacaaagataaataaataaaatacggatcatggctaggtatggtgactcatgcctgtaatcgcagcactttgggtggccaaggtgagaggatcacttgagcctaggagttcaagaccagcctggcaacctagtgagaccctgtttctattttaatataaattaattaattaattaaaataaaacaagaatctagtcatattactcagcccaaaattctcaacattacatcacccactacctacccaataggatacagtctaaattccacagattggtctataaggccctcatctttcctcaccctctgccctcctctttcatatcctaccacccaaccatacagaactgcttgcatttccccacacactctgtgtttcatttctctgcaactttgcattagcagctctaactacttggagtaccctaccccacttctttcacctggggaatcctacacatccttcaagccccaacttaaacgtcctcctctctgaagccttccttgttcgggcactccctctcctgaactctcaaagcactctgttttgacatcttgaacataagctattatattagtctcccgtgctggactgtgtgcgctttgaggacagagattgggctttattccattttgtgtatttccaggcctagaacaggaccttgcttggtcaaatgagtaaatgaataaatattctagatctgtgctgtccaatacagtagccacaagccatatgtggctactgagcccctgaaatgtgactgctccaaattgagatgtcctgtaaatataaagtacacactgcatttcaaaaacagtgtgaaaaaagagtaaaatatatcattgataatttttttttttgagacaaagttttgcttgtcgcccaggctggagtgcaatggtgtgatcttgcctcactgcaacctccgcctcccagttgaagctattctcctgcctcagcctcccgagtagctgggattacaggcgcctgccaccatgtcaagctaattttttgtatttttagtagagacggggtttcactatattggccaggctggtcttgaactcctgacctcaggtgatctgcccaccttggcctcccaaagtgctgggattacaggcatgagccactgcgcctggctgataattttttatgttgattactgaaacaatattttgcatatattgagttaaatgtattattaaaattaatttcacctgtgtctttttatacttttaatgtggttactgggaaatttttattttcaaatttttatttatttatttttttagagactgagtctaactctgttgctcaagctggactgcaatggcgcaattcttgctcactgcagtctcaaactcctgggctcaagtgatcctcctgcctcagcctcctgagtaggtgggactatgggcatgagccaccacagctggctaattttttaattttataaatttttttgtagagatgggagactcactatgttgctcaggctagtctcaaactcttgaactcaatctcccaaaatgttggtattacaggtgtgagccacagggaccagcctggaaatttctggattacatatgtgctggtcgcccagccttctatttgcctctcttggtctaaaccattctccacactgtagtcagatgatcctgtgaaatgtcaatcgaatcatataagtggccacaaacactgaattaagcaaacactgaaccactgcttctgggggaacaacctaggttcctgtgagcctgtggacacaacatttttgtcaaccaatcaataaccttgtttataggtgtttctgtttaaaggcaacttagttaatatacactgttgattcagtgcaattgaactcaattgcctgcaccaagctaactgagcacagctgttttctctataaggcaaatcaccaccttcttgcactgaggaatgctagacagcacttctgcacaacactaagggccattttaaacaccagaatcaccaataaaaagcgtaaaaataaatgagaaaaagatgacactaaatagaccaaaaaggagacttgtaggcagcgctgccctattatttttagagacagggtctcactctgttgcccaggctggagtgcagtggcacaatcccagctcacagcagcctcgacctgctgggctgaagggatcctcccacctcagcctcccgagtggctgggatagaaggcgagtgccaccatgacagcccagtgttgccttatttgacctcagtggagaatgtgcaggatcgttatgtccatgaatgaatgagaaagcaccacaagtattgattttgggattagaaataaatgttagtgagtaggcaaatttgcaaacacaaaatccgtaaataatgaagattgactgtaactctactgcttaaaactcttcaagggctttaaattccacttgaaataaaatccaggccgggcgcggtggctcacgcctgtaatcccagcactttgggaggcagaggcgggcggatcacgaggtgaggagatcgacaccagcctgaccaacatagtgaaactcagtctctactaaaaatacaaaaattagccaggcgtggtagcaggtacctatagtcctagctcctcaggaggctgaggcaggagaattgcttgaacctgggagacggaggttgcagtgagccgagatcgagccactgcactccagcctggtgacagagcgagactccatctaaaaaaaaaaaaaaatccaaactgtagacaggtatggtggcttatgcctgtaatcccagctacttgggaggctgaggcaggaggactgcttgagcctaggagttgtcacagtgagctatgatcatgccactgtactccagcctgggtgcctgatcaagatcctatctcaaaaaaaaaagaaagaagaatccagagttttattttattttgagagagttttgctctgtctcccaggctggagagcagtggtgtgatcttggctcactgcaacctctgcctcctaggttcaagcaattctcctgcctcagcctcccgaatagctgggattacaggcgtgtatgccgggctaatttttgtatttttagtagagacggggtttcactgtgttggccaggctggtctcaaactcctgacctcaagtgatctgcctgcctcggcctcccaaagtgctggggttacaggcatgagccaccacgcctggccagagttcttaaaatgacctacaaatctcaacatgacttggatccagcctgccccactgacatcctcacctttctgactctctcacccaaggcaatccctccctctggaatgcccttccagaatagaatgtcttttcaatttcatgcccctgcctcagcatcgcctcctctgagaggccttttctaaccaacctgtctagtggcaccaccccgtaactctgttagggcgtcccttcctctccttcacagtcctgggcattttgtggtttccttgtatactgtctgtaacaaaggaagtacctgagcaagtagccacccagtgggttcttcttcctggctgcccagatagagccaatgtatcaagacaggggaactgcaatagagaaagagtttaatccacacagagctggctgaatgggagaccaaagtttcattactcaaatcagtctccctggaaattcagagcctagagtttttaaagggtaatttggtagataagctgccaaggagtagggagtgctgattggtggggtgggagatgaaatcacagggtgttgaaggatgcaagaactggttgagtcagattacagctctaggtggccttggctggtgcatcagactgcagggtcagaaaaacacctaagagtaccaatcttaggttttacaatagtgatattatacctaggatcaactggggaggtttagaatcttgtggcctctgggtgcatgactcctaaaccgtaatttctttctttctttctttttttgagatggagtctcagtctcttgctcaggctggagtgcagaggcataatctcagctcactgcaacctccatctctcgggttcaagcaatttttgggcttcagcctccctagtagttgggattacaggtgcgtgccaccatacccggctaatttttgtatttttaaatagagacatggtttcaccatgttggccaggctggtctcaaactcctgacctcaagtgatccacctgcgtcagccttccaaagtgctgggattacaggcgttagccactgagctgggccctaaactataatgtctaatcttgtagctaacgtgttactcttacaaaggaagcctggttctcaggcaacaagggggtttgttttgggaaagggctgttaactatctttgtttcaatattaaactataaactaagttgctcccaaagttagttctgcctatgcctaggaatgaacaaggacaacctggaggttagaagcaagatggagtgggttaggtcagctctctttcactgtcataattttctgttgtaatttttgcaaaggcagtttcaagcgcagggacagtgaccgtgtggttcaaggttttatgtaatgcacctcccaaactcaataaatattagtcgcataaaagaaaaaatgcagccctggaggaagatgccctgccctgttgctggcatgagtgaagaggaggcgctcacagggacggttctttccctattctccagcctcgtgtacattgggcaaacaggccccgaccatcccacgtgctcagccccagctctaggccaaatcgcctccgctcccactgacgtcatcacggcgcatcacgtgcctcccgagaccccaccccccaccgtgacgtcccgggcctcggccctggtccaaagtctacccgcctccttgtgacagaagtgcgactgccagctgccgaggcgttcggtcctgctgttgcggccgctgccccagggctgcggggacggtgagtcgactggacgcattcggagacggcttcgcgcgggagccctcctccccgggggaagggtctgggcgccagctctcctcaggtcggggcgtgacctcggaccgtggcgccccctccccgcccccgcccgcggsgcctgggcggtgcatgccgggcaccgtagtccccagcctctcagagcgggttgtggtggggggggtgaccgggcggactacaagtcctagaagcctctgggcggtggggtgggcggtgggttggggggtttcgttgtgcgcgcaaagccgcgcggggctgagggtcttgttstgccggcgcctgtccggacccgggcccctctccgctttcggccggcctcgggcaccgggcttctggaggtaaagcggggccggcggttggggcgcggcatggcggggcccgtcctcccctcagggcgctgccgagacctagcgcggccctggggatgtcgaagccgctscggtggcggggcccgggcgggcgccccgctgtgtgccgcggggttgtgcgcccggaatggcagcctgctcgcccgcacgtttttccgtcagggaaggttgtggaaattgccatctccgtcttgcagggcgagacggggaggggaggggtgggagttgttttctcaaggaaagggggtcgaggaggagccccgtggccgagccagcccctgccgagccccgcgggtgaccttggccgtcccggagcccagcagtgtcctgcacccgcgcccggctcgccgacgtgtggagtcgggatgtggcgctcggccgcgcatccccggcggagatggcgacggcctggcctagcttkgggctaggagtcgcgccttcgaggaccttggcttagcgagttccttggggggcttctcaacagstgttagatgaggtggggcgagyggctgtgagttcctccaaaggtgggctcaagatcctctgcgtcagaaccacctggggctcttgggaaacgggcagattcctggggcccaccccaggtgttgggatgctgtagttccgtcgcgctgcccaggaatctgcatttagtaggctccccagatcattcccgggcgcagctggggctgagaacctgtcccagtgagggggwtggcgggcccgggggcagggacgttccatagtgtttctgccagtttcttctgtattctggggcctgatgctgggcggggcggtgcccgggcaagttactgctctcctgggttctttgctgcttcccttggggccgatctaggtagaactgggtggagggaggcgtgccagctctgccttgccctctgcccttaatcggaaaggttatgcccagtcacttgccagtctcagaagactccccctctacacattcagttacgaaaaacgtgaaacatacaaaagttgaaggaattttacagtgaacacccacagaccaccacctagaatgtagagttaacactttattgtatttcatcacatatttgtccaaccagcagtccctcttgttttttgtgtcaaagtaagttgcagatatcagtgcctttccctcccaaataagcatgcatgtcattaattagagtcttagaattgttgtttattgggtttgacttttttatcttcttaatggtttttaccttaatggaagccctgggtatttagaaatccgtctctcacccttgagaatttgaaggagttcggaggttttccacaggatgggagaaccagggaagagctttacaggttctcttacaaaggttcatttatttatttagagccagggtcttgctctgtggcccaggctggagtgcagcggtgccgtcacgacgttcactgcagccttgaactccttgtctccagcgatcctcctgagtacctggaactacaggcatgccccaccatgcccggctaattttttttttttttttttttttgtagagatggcatgtcattattttgcccagctggtctctaactcctgggctcaagtgatcctcttgcctcaccctcccaaagtgctgggattacaggcaggagctaccgtgcccaagttcttacaaggatttaagagcagccagccgtggttctagaatcaccataagagcagaacattgactgtatgatgtaaagtaatacttcagggaacaaaattgttttgagaaggagctaacggaatgcrtcccgaaggccagcttgccccagcagatcacgttggcaataattgaagctagtcatcagcttgcaactccctgtcggctctttacactgtaagcttgtccaggttgaacctaccagttcagtgtgtgttttctaaggtctaggggaactggggtgtgtagtgcaatttagctcatggtgttgatggactagaggccgtggctttgagacccttgggcccaggtactttgttccttagccacaaacaccagcccttcaccctactcagttgcctgagtgggagagaaaagataggccctgtgaaaatytgtctccactttgaggaacatggttccaagggtaaggacatgtttttactcatagaagacacagggaaatatggtagttaaagttgtggcattttatagcatgtcactgtcctgtaggtggaggaagtgctggtgagaaggtggcaggcagggagagctctgcagaggaccttggcgctccatggggaggatggagagagagagccaggccggcagtggtgacaggaggttccctttcccccacgaggggacttggaaatagattactcaaaatggaaatgtgcccctttctaggatcccacaaaaagtttctgtttctgtctctgcctagtcaggagtctccaagccacagtctctgtgggaggtggtaaaggctaccttgcaatacagtgcagcagaggtggaggcgcctagggcctgggccagaacctccccatgcccagagggctgtccactcttggagacactggtctggtggctcctgaacccgtgggcctgatggccccggtcaccacttctcctactctgtgagtcatcaggcagtggtccatgacattggtggtgtcctgggaccagggctgcctagacgtggagacctctctgtcatgttgaagctgtgtgacagacaggccttgctggccgcgtctgtgataggtgaagagcatcacccaggccacaggaaggcctgcatctgctgttagcgctgaagagatgaagggtccctgacggcagacaaagcaaaaccaatacagagcctgcagtgcagggtgagggggtccagsagcattctgattctttccttgaaagcagttgtgatgcatttttggtaatactggaccatttttccaggaaacatttcttgtcaccttttcagtgctcctgatttgtgggtgagacctggcttggtctgtacattgagtgattcagtaccatcgattcttactgcaaggaggtgtaatgggggttcagtaaacactgagggtcttcctgagatgtaattgttcaatcaatgctaattaagtctgaattcagatctagtcccagtgtctgggtttttcccccaagaaggaaaagaggccaagaaaggtggaagtaggtagagaagagtgcgagagctgccttgggagggtttagggagaatttcarcccgtattacttcaggaagaaagcgagcttggttgtcacaattctgattaacatgcaggccgggtgctgtggctcatgcctgtaatcccagcactttaggaggccaacgggggcggatcacctgaggttgggaatttgagaccagcctgaccaacatggagaaaccccgtctctactaaaaatacaaaattagccgggtgtggtggtgcatgcctgtaatcccagctactccggaggctgagacaggagaatcagttgaacctggcaggtggaggttgcagtgagtcgagattgtaccactgcactccagcctgggtgacagagcaagactctatctcaaaaaatcaaacaaacaaaaaccaaaaaaaaaaaaaaaaaaaaaaaccatgcaaacagcggcctcacaggctggggaagcaggaggaaatggggttctttgcagtgtaccgccctatgaacatgcgttgttctcacctgtcagccagggaggtagcagcacagtgggacttggccagctgaggcagcagccagagtgtctaagtgacttgcccatggttgccaagtaatggcagagaagggcccatggctggccctgaaacagcaggggtggcggaagagcagctgagggagacgtgggctctcccagccccattgtgatcactgcatcacrgagttgactggaattcaagaaatggtgttttttcctgtctggatatttggctgtgaacgtaagtactttcctgaggaygcagtggagtctmtctcggctgcggctgtgttctcaccctgggcagtggcctttgggttaagaatggcacagaaggggctgggtgcggtggctcatggctgtattcccagcactttgggaggctgaggtgggtggatcatttgaggtcaggagttcgagaccagcctggccaacatggtgaaaccccgcctctactaaaaatacaaaaattaaccaggtgtgggggcaggtgcctgtaattccagctactcaggaggctgaggcaggagaattgcttgaactcgggagttgggggttgcagckagccgagatcgcaccaatggactccagcctgggtgacagagtgagactgtttcaaaacaaacaaaaaagaatggcacaggaggtccacttaggtcaaccccaaacctgtgcactcatttcttcaacacacatggactaggcaccaagcagggcccaacaatacaagtgggagagtcccaggattcttgaggggagataagacaagggacagagaatcccctggcagcagaatcctcaggaaggcccaggtttgcagggaagtggggtgtgggcgtgtttggaggccagggaaagagtacgggggtgggcttgggaagggtggggggatgagatagtttggaggagtgtgagttacgatccggtggtagatctgggatatggtccaagtccagactcttccctgtcacccttgactgttagatgagatagtggatctgagggcctttgaaccatggagttagtaggacttgctgactggtcatggtttaaggagacgagaaaggtctggagcgcctctcagccatccagtttggcaatgggagtgaagtgaacagaagggtcctctggctggagagcagagttcctgcctagagcagcagccaagctgcagcccatccacccactaacccatgtttcacaggctgcccggtgccctggagaaactggccccaaggtctgaccctgccctgcaggagctatgggtctgactgggagatggccttgatcacaactttctaattctgcatgttatgagtgactccattgccctagacccagaattccctggccacctccctgcagggctgtgaagcccatgacaggcctcaccttttctctgctggagcacctgctgtcacagaggcgacagctcctgctgrgcttgcctgtgtattttttataagttcttctcaagtgtcacttgtcttgccaggtagatctgcagctccctgagggcagggaccatgaggtgagtgacctccatggagggtctgatgagtcttttcaaacaggtagtcacttaaacaaaaaagagaggaacttggatggtgatggctctgctgagtgaaacggcctcatccttgaacctgaagagtcctgccctgttcaggggagaaggcctcaagtgagcacttctcagatctcagattccccaggcattttgtgtcacctgacctcaggccttagtttctgtccccagcatggtcaagctcaggttctgtggtgtgtgtttagctgctttgcagggacagtggccacaccatgacgcatttctctgtggccccagtaaaattggccaaaaaggaactatacctgctggaggtggtagccgagtgctctcaggctccccagctctaggagccacctacttgatgtcagaactttggagaactggattagcatggcaggtgagtgcggaaaatggagagtcgtggggcraaatgatttcccaagctctctgcaagcctctcggcttatcagggtaaaagtgggcatcctgctgtggccagaggacccggctcacccatcctccaacacggagtgttccctgctcagtggagctatccctggtgacaactgcagccctgyggcaaccacttccttgttcttccttcttccatgccacgctttgttctgtgccaggcccgatgttttatttctgtattttatgccctctactcagccccccactgaagctgcctgccattaagacagacgttgatctgccatcttcagtgcctaggaaatgcctcacgcatagtgtgtggtccatacttattggttgaataaaatgatacaccatgcctgcatttcagccgtctcatcttcctaagagccaagacgcagggaccgtggtcttcatgtgctccgtcattgcctgagtgttgggggtgctgatttgcatgctgtgttgaattcttcagtacacattcagtgggttaggttctaaagtcaactagcagagcaaagacctcataagtcaaactgtcctctaaagtccttgaattgcctattagctcagaggcactccccctgctagaggcccagcggggcctgaggaaacagcacgttctgtgtcccatttccctccccagggaaagcaggggaccgggcactgccacttcagctttttgtcctgggtaccatgaaatctatgtaaatggaacgcatgtgaaggaactgcactgtgtgagctacactgtgtgaagcactttattgggagtgtgagatcccactcaagtgtattttgaaaaccatttctggagaatgtgtgagaaaagaaacagggctgacagtgatgtggaaggagagagtcaggacagctgaggtcctgtcttggctctgtcatctccaggcagctggggtgcccggggcagccacttctctcctcggagactgctccccactctgtgccactgcttgctcgcccaccgtcatctccagcacttcacagggcacctgtcttccatgggtgcttagtaaacatttaagacagaaatgaatggcagcttagacttggacccagtcatctctgatggccttgcaacctccaaaaggtgttctctggccaggagcagacactcacacctataatcttagcactttgggaggctgaggcagaaggatcacttgaggtcaggagtttgagaccatggcaaacatggcgaaaccccgtctctaaaaatacaaaaaaaaaaggccgggcacagtgcctcacayctgtaatcccagcactttgggaggccgaggtaggcggatcacgaggtcgggagatcgagaccatcctggctaacacggtgaaaccccatctgtactaaaaatacaaaaaactagctgggtgtggtggcaggcgcctgtagtcccagctacttgggaggctgaggcatgagaattgcgtgaacctgggaggtggaggttgcaatgagccgagatcacgccactgcactccagcctggtctctgatgtctgagtcatagagaaatatatacatggccaagcagatggcagtcccaatcatgacgtgmgctcctgttttcccaagcttccagaataagtcttctgtcccagccagcatgagtgaactcagggccagatgttgacttagagttacaggaacttaggcaaaaactgcaattacttttgtaccaacctaataaacttctatatactatttctttctttttttttgaggcagagtcttgctttgttgcccaggtggagttcagtggcgcactcagttcactgcagctttgaactcctggtctcaagtgatcctcctgccttgacttcccaaagtgctgagattacagtcctgagccacagtgcctggcctactgtatactatttctgttttttttgtttttgtttttttttttgagatggagtctcgctctgtcgcccaggctggagtgtactggcgcaatctcggctcactgcaagctccacctcgtgggttcaagtgattctcctgcctcagcctcccgagtagctgggattacaggcatgtgccaccacgcccggctaattttgtatttctagtagagatggggtttctccatgttggtcgggctggtttcgaactcccgacctcaagtgatccgactgcctcagcctcccaaagtgctgggattacaggcgtgagccactgcacccagtctatatactgtttcatataatgcagtgtaaactactaattcagtttgtttcacacccaaccaatgtaagtgaattcttagggtcagatgccaactaagagtgatagaaactcagttaactaatttccatatgctatatactgttgcatctaatgtagtgtaaaatacaaattagattcccactctcagttcctagagcgctttcttcacccatcagaaatgtcttcaaaataattgaaagaatgccctgtaacatgagagatctaaatgtcgcagggatgagccactgtcctcactgttctgagggaaaattgctggagggggagcttctgtgtacaggtatgtatggtgactgacacatttggaggaagaaagcctagaggtttgcttttccacatcccaccccgacccacggaatagggggactcaggcaagacctggccgcgggcagagcccagctccctggctaaggacggccaggagacatttgtgtctgaattaagactcttccacctgggtggccgtgagtggccacgtgtcttgactgcacttaacggcctggtgcttttttgtaggttgcagtggtgtgtcttgatctcatccaacagacagctggttgaatagagtcaacccaagactgtccattttgtgtctgctcagtacaggcagacagaaggattttttttaagggctccattttgagcacttaaatgatggttctttaggttcatgctgtttctaaaattagtcagccttgtagttaccaaggcctgcctgtgggacaggtgcagatgacttgtttattcacttgtggttgagctgtgtctgattttttccttttgctctgcatttcccctcctgtctgtgcttccttcattttctctgctagcaggagagcatgcaggaacaagctcttgagcagcgttctgcctgggaggtagttcagagtcctggcgagatcactgggcgagttgggaggccggggctgtgtcctcagcatgggctctatcactcgtttttattatgcatccaacggggactttcttaccagccctctttggtcaggtgacctcctgctgggtctcctggcggggtctcctaggctagcaggactgtgaggtcattacattccaactttacagatctaaactttccatttgcctggagtaccgggaggtgatctggcagaactgactcatttgaccaaactcatgggagacctatggccataaggggctggctttggagaggaggccactaaccagtccaggcctctggcttgctctgcagagcattttctcctgtaggtgaaattagattatagtctgaggtgtgtttctggattgaggagtatgaggagtagtatatatatatttttttgagatggagtttcgctcttgttgcccggcctggagtacaatgatgcgacctcagcttactgcaacctctgcctcctgggttcaagtaattcttttgcctcagcctcccaagtagctggaattacaggcatgcgccaccacgcctggctaatttttgtatttttagtagagatggggtttcaccatgttggccaggctggtctcgaactcctgacctcaggtgatctgcgtgcctcagcctcccaaagtgctgggattayaggtgtgagccaccgcggccagcctttttttttttttttttttttttgagacagggttcttccccactgttgtccatgctagagtgcagcrgtgcaatcatggcttactgcagcctccacctcctgggttgagtgttcctccctcttcagccccccaagtaactgggattataggcgtgagccactgtgtctgacttataatgagcattttgaggaaggagtcatgtaaaggtgctgcctaccattaaaaaactagaaactccacatcagtagaacgtttctgtatgtgtacttacatataaacaaatcccctaaactcctactgcccagaaaaactgttaatatgtgttatggaagagtgcagtggctcacgcctgtaatcccagctcttagcgaggcagaggctggaggatagcttgagctcaggagttcgagacctgcctgggcaatatatcaggacgctgttctccacaaaaaggaaaaaacaaagacaaaaaatgtgttacgtatgtaaatacatctaaagaagaatcacactgtgctactgcttttttattcttcactcactgctatattaaaaccatttttctatgtcaatwaaaatctatatcattggccaggcatggtggctcatgcttgtaattccagcactttgagaggccaaggtgggcaaaatcacctgaggtcaagagttcgacaccagcctggccaacatggtgaaaccccatctctactaaaatacaaaaattagccaggcttagtggcgggtgcgtgtaatccttgttattcaggaggctgaggcagaagaattacttgaacccgggaggcggaggtcgcagtgagcctagactgcaccattgcattccagcctgggcaacaagagcgagactccatctcaaaaaacaaaaacaaaactatatcattttttaggggctgaatacagttacattatatagctaatcacatgcatgtaaccagttccattttcttgaacatcaagacagtggtgcatataaacatctttgcctgtgaatctgtgttcacatgtccatttacctctagaacgaatacattgaagtggaattgagtccataagagtgtacaggtagcaaggctgtccaggaaagttgtactgatccactatgctgtggccccgtgctgtggacggagtgtcaccaagtgagagtggtttgccaggaggttttactaaaattcagcatgatataaattgcacagtaattgtcatcatcatagttcctagaggccttagtacttttaggtttagaaccattctttgagtcctgtctgccttttgattttgcttctgcttaagagcaacagtgtcaccgggtgcggtggcacttgcctgtaatcgcagcactttgggaggccgaggcaggtggatcacgagatcatgagatcaagaccaccctggctaacacggtgaaaccccgtctctactaaaaatacaaaaaattacccaggcgtgttggcgggcgcctgtagtcccagctactcgggaggctgaggcaggagaatggtgtgaacccaggaggcggagcttgcagtgagccaagatcccgccactgcactccagcctgggcgacagtgcgagactccgtctaaaaaaaaaaaaaaaagyaacagtgtcttcttttttctcgtgtacttcctctctcaggctcctgtggcaggccttcagtggtgtgctcttcacccatggcctctcccgtgactcatcacaattcttgataaggggctgctcctaccgccatatcacagatgaaaaaaaatctgagactggagagtcaggtggcagggcagggtggtgggcgtggggcctgatgcctgtgccccactcggtgcaagattctgcccctgcagctctgcctgcgacacagggctcatgcttctgttggagggcgcagtggtgkttggggccatggggttgggctgatgtcttttttattttatttttaattttatttttattttattttttattttatttttatttatctttttttttttgagatggagtctcactctgttgcccaggctggagtgtagtggcgcgatctcagctcactgcaagctccgcctcccgggtttgcaccattctcctgcctcagcctcctgagtagatgggactgcaggcgcccgccatcatgcctggctaatttttttgtatttttagtagagacaggttttcaccatgttagccaggatggcctcaatctcctgatctgtgatccgcctgccttggcctcccaaagtgctgggattacaggtgtgagccaccgtgaccrgctattttttatattttgagacagattctcagactattgcccgggctggagtgcgacggtgtgatctcggctcactgcaacctccgcctcctgggttcaagtaattctcctgcctcagcctcccgagtagctgggattacaggcggatgccatcatgcccagctaatttttgtattttttgtacaaacagagtttcaccatgttggccagcctggtcttgaacttctgccctcgtgatccgcccacctctgcctcccaaagtgccgtaattacaggcatgagccaccgtgcctggctaggctggtgtcttatttccgctgagactcatcatggtcgaggaggagcatgtagggttgggtgggaggagagctggcagatgggaaaaccagatctgttttctggtcctttctgtgacttaagttgagcttgttttgaagtgtttagaattcccaaggcatcagatacacccatcttcaagtgtaaaaataaataaatggttcagagccacccgcgatgttatctgagggagggactgtctcgtcctgcctccatcaggacaatgggaaatgggccatgttcaggattttccaggcctgcctgtgctagaacttggcagccgaggacaacggtcccagagaaggggacacattggcaacctccctgagtcttgggagggctcagcctcactagaggctgctctgcaactgagtggacctttgtggagggcctcctctttcctgctcatcacccagcgttgggaatagggtccctctggtcagctgcgaaaggccacagggaatcctggcctggtcccacatggacttgggtggctggattagccccaggtttggatagggcatggtggagaggggagtggagagggtttggggcccaggagcagtctcacagcaggggctcccttttgagcacctcctcacttggagcacttccttcatgtccctgtgctgggcacctgcatccaaacagtgcatgctctattaacgttcactgcacgccatcgtcctcctcagctcctccttgagccagtgctcatgctgaaatgagcactggagttgcagaagaatgtgtcctcgctccaaggcaaccagctgcacttctctcggggcctgttttaactacggaagcatctgctccagccttcccgccagggagtattccccatgccttggcctctgtactggctgaggctgtgtcatgtgacctaaagaaagccatgatccttttgatcatggatcacttraagagaacttgtgttccttcagacctaaggaactgtagagatatatttttgtggtggaggggggatagagtctcactctgttgcccaggctagagtgcattggcgtgacatakctctttgtagcctagaatccctgggctagaacaatcctcccgcctcagcctcccaagtagctgggaccacaggtgtctatcaccatacctggctaattttatttttttgtagagatgggatcttgttatgttgcccaggctggtcttgaactcctagctttaagcagtcctcccaccttggcatccaaagtgctggaattacaggtgtgagccactgcacctgtctgtgctgtatatttgtaatgacacttgttaatacttaacctgaaaataatttaccaataattaaccagtaaaccaagttttattactcatgtggaagatgtgggaggtggtcagttagttgctggtgtggtgtcccatggctgtcctaggcactggcctccatcccaaggccctcatggtgaagcacagctactggagccatggcatctatcttccaggtggtagatgggaggaaggcaggaaagatgaagggcctggctccgggctgagtcggcttgccctgaatgccttcttatggtctggacacttctgcttacagctcattagccaaagctttgtcactctaagaaagctcggggaccctcttggttgatggacttgccctgagtgaaagtggagttctgtattcaagaatgggggagagagtggatttgggtgcagctggcaatctccagtctgtacttcattaggcggaacattgctgtttgagatcttgttattctgccttcttcctttgcagtgtgatgtggaggagcacagcacagctctgtatgggtggtggtatctgcgtagtaattcatggaaggcgtctccagcaatacagcctggacatctacatgtgggattttgttcagccttccaagaacctcattttgcacgtggggaaactgaggctcagagaggttgaggaatttgtctagggctgcaggccatcagcggcgaggcagggtcccagggagacctgtgctctcccaatattctattgacagtcaagcaaagaagaccgctgtctttgtttccaagtgccacaatgcaacaaggctgaatggtgccggaggtctcctggggaagcctaaagcctgaggagaagggcctgggacactgyccagctggccttgtcatccttgtcctggagatctgaggtatttgagctctggaacaaaccctgtggctgggtcgctgtgagggccccaggctgccatctggccaccctcaggggcacatccctccttccttaggccttgtgtactcactgttccctctgctgtccccatccctccctttgcctgctggtctcattaactcttccgccacctcctcccaggtttgcttgaagagatggtgttagagctccagaacggcgatcttgctgtccttctactgtgccctggactttctcgataccactggtcacagatgtaattgtgtttgtggttttttggcgaggggggtgattatttaacgctcatcctcttcacttgaccgtaagcttctggaaggcagggacatgtctttttttttctttctttgagatggagtcccgctctgtcgccaggttagagtgcagtggcgcgatcttggctcactacaacctccgcctcctgggttcaagtgattctcctacctcagcctcctaagtagctgggattacaggcacgtgccaccacgcccagctaatctttgtatttttagtagagacggggtttcaccrtgttggccaggatggtctcgatctctggacctcgtaatccgccctcctcagcctcccaaagtgctgggattacaggcgtgagccactgcgcccagccagggaygtgtctttaatccccagcctgtatctggcacggaggatgtgctgagtaactatcagaaggaagcaccatcccccgccctccccttagagggcctctgttacgtggtcacctcacagactgtgcttcagcccagccctggggtgcttgggagaataggcggaacagctacgtggtcagcggccatccctygcaagtaacagtccccctcctaatgaccctcacgctgcatggcccgttacagtggttcagtaagtttttatatccatgccttacttaattctcacaccgccctccaaggtgggtttgaactaatccgtctgtgtgttggatggagatgtcacaggatggaaaggcctagtgtgggccaagcctccctggaagggtccccttcaggcctgcacccttggtggggattctgtgctctccttttcccgctgccctgtccctgcagggtgctgctatctggactgagagcatcttccctgaggcccacgtgagctcctgcttgcttctggctcacttcttgctttggccttttcctccagacctggtttgggccttgccattctcttttcagacccaagaagcacagagagtgtttgtcttttacctcggctctgcccctcrtggagcagtgggcacctcctttattcagcacatggaagctgcaggcaaggcagaaatcggcctttcagttttcccagcaaagcagaaagccctgttcctggctggatgcctgggacctgcctcctggggacagaggagcccctctgaggccagctggcgtcctgacgccatggctgccacgtgggtaagcacctcctggggatgcagcaccaagccagcccagctctgagaaatgtgtctgggcagcagctgctgcagagcccctgccaccagggtgtattggtggagcatccttccaggggcattgccaaccttgggcactcccaggcaggcccctggcatttccacagcccaccaggagagatggcccttggaggactgctagtgtctctgccttctcaaagagttgtctcgggttaccgtggagcaggtggcccagctgagctgtgctgtgagggaacgctgctgagctgagttcttagggagggttttgattgcaagtccctccagaatccggtagaggcatccccttgtagtcatattagtgaacatgcaccaggacccctcgttgggaatcagaaggcactccatggcagaggcgtcaatacctgttgttttcctccctgttggaagttgcctaataaagcataataatagcagtttccatttatttagcgtcattgtgtgctaggcccagcgtttctgctgcaggcgtttcacacacagtctctcttcaacctcactcccaccctgagaggtaggcatgatcatctctgtttacagaggaagaaaccgaggctcagctcgctcagctggaaagtggtgggtcttgggggtctgggtttgaattaagctgatgcagagcgggcccccccgccttttttttttttttttttttttaatattgatgacgtcttgccatgttgtccaggctggtttcgaactcctgggctcaartaatcctcccgtctcggcctccccgagtgctggaattacaggcctgagccaccacacctggcccagagcccatgttcttgactgcttgtttcatttaaagccttccaccgggtggcaagcacatccctggggtggggccttgccagaacaacaaactcagggcctccccaggagcgactccaagacttgcaggccactcttgatccttctggttgtgaagtcctgtcccagccctgcacttggctgatacgcaccccttaacttctagtgggggttcctctagcacagcagttcttgaaatgtgatctgcagtctcctgggggcttcctgagaccactcggggggctaggatcagaactgttttaataataacacggccatgatttgttaccatgccyctttgtttgtgatggctttcacattgatggtgtaggagcagtgcggaaacaagctgtggggcctgcactgactcaagactggcaccacactgtgctggtcttgttgtaattgagtcttcaccaccacacacacagtacacacacacacacacacacaccagtgttgcatcagaaaaagcagtaaaaatcaactttattaagtcctgacccatgagtccacagctttttaagatcctttgtgacgaaatgaggcacacatgaagtatgtcaaatggagtttgatgctgtcgtgaggaaaagcacacgtgcattcatttgaagtgtgggccgaactagctgcctttttcatggactccatcttcacttaaagaacaactggcacacaccgtggttattcagatttggatatttagcatacactttcttgaaaatgagcaaagtgaacttgctacttcaagggaaacaactgaccttttatttttgtatatgttgctgtttctatatttgttagtgctttgttgccagtgatgaaattcaagctttcaaatgatgattagcgttaacaatatttagtgactttaatgacattggtagtgataccagcaatgtgatttaaaaaaatatatattgttcaatgagatgtgtcaacattggtagatctgcattacaggaacccgtattttcaggtgacccacacatgatgttaagaaatcatgtctatgtaaaagacccattccaaatgcaaggtacaccaatgacttctaatgtaacacattagaaaaaaaccattgttaaggcttccaattcctgtggcaactaacccttaagaaactaccacttgtcggtcaagtgcggtggctcacacctgtaatcccagcactttgggaggccgaggcgggcagatgacgaggtcaagagattgagaccatcctggtcaacatggtgaaaccccatctctactaaaaatacaaaaattagatgggtggcatgcctgtagtcccagctcctcaggaggctgaggcaggagaatcgcttgaacccgggaggcggaggctgcagtgagccaagattgcgccactgcactccagcctggtgatagagcgagactctgtctaaaaaaaaaaaaaacctaccacttgtcaagtcttgatgtagtattagtccattgtgcttctctaacagaatacctgagactgggtcattcataaagaagaggaatttatctccttacagttctggaggctggtgtcttagtctatttgtgttgctataaattacctgaggctgagtaatttataaagaaaagagagtatttggttcctggttctgcaggctttataggatggcacggtgccaacatctgcttctgttgagggcctcaggctgcttccattcatggtggaaggcacggggggtctctgtgcagagatcacatggcgagagagggggtgagaaggggaggggaagcgctgggctctttctgacaaccagcaaggatgcggggactaacagagtgagaagtcactcgcttctcctccaccccagggagggcatttatctattcatgaggaatccacctcccatgtcccaaacaactcccattaagcctcaccatcagtcaycaaaactgtggtgcttgggaagtccaggatcaaggcactgccagcatctggcaagggccttcttgctgtgtcatcccatggtggaagggccgcggggagaggcacccacaaaagactagctaatcctcttacaaggaatccgctcccaagatagtgatttgtagccagtctgtcagaagcgcagrtcgcaagctaggaattgcgatgatcagaagtggggggcagtcatggaactgagccctcaacctgtgggatctgacacggtagcatcagacttgaatgccactagaagaygtccacctggtgtccgctgcagaactgactgcttgcttgttattggggagaaacccccacatgttttgccacagaagtcttttctgttgattgttatggtgtgaaagcagaggagaaacaggttttttctccacaccttcacatgccacagaacccagagggtgtggaggggtagactttgcagaggcctctggtcttccataggagtgacttactattaagtttgtgattgacttgtaaagattttcaaacaggcacctattttgtttgcaattaataaatccaagatttaaagcaagaaggccaagaagcctctcttggatttgtcagggctgcaagttgacttcagtgggctccccagaccccgcaagtctccccttcctcctctgttgggaactgggcagatccccaggtctcctagccccctccctcaccagcaccttcccacagcagaggtgctggggctgcattttcagatcagacattttccattttgtagcttaatttgaacagtactcgttttattggaaaactattttgcttctgatcgtgtgattgaaasattattcttgtagtttttattacaccctacacaacatggttttgtgggaatgcatgtttgattttgtattggaaggcactgggagaatgggtgtttgaattcgggaaatcttcatgagctgttttccagatcctctccttggtagagaaggacctgccctgcagtctctgctggggttcaggaaggcagcaggaggacgcatgtggatatggaggggtgagggggagcagtgagtagcaggcatggccctaggtggggaagacacggaggagcaacagggccctgcggcccccggtgaggggcaaagagaaggtgggctctggtgtggccatcgagctggaggggaagccagccctgtgcaggtccagacccttccctgtggcctgcattttctgtacccaggttgggtgaacaccaaaggagggctatgccctgtgggcttacaccctatcatcatgggcaaggctgtatgtggaattccagaaatagaatttttgagctctaggagatcataggattatatctgttgactttgatgaaaagatgggccagagaaaggcaacacctgcattctcagagatggggtgtgtgtgcacacgtgtgtgtgtgtgtgctccctgcaagggacccaggctgggatctgcaggtgcttcagtgactcaccaagcacagtgcagcttattttcctggtctgctcagagcatcccagggcctggaccattccccgatgagcaagaccactgcagaccacagtgttgggccacttggtggacggtggtgccacccagaggcgccagagagcattttctgggagtctgggagtttgtagcaggggctggcacttattccaactcaacgtattggagcagttttccagacgcaggtaaagccccatgaaaggctgccctcttctcccctgcaggagggcacctggcaggctaggagcagcctgggcaagggaccccaggaccagccccaagaggcactgctgctactccctgttctgttttttttttttttgttttttgagacagggtctcgcactgttgcccaggctagagtgcagtggcctgatcatggctcactgtatcctctgagtcttgggctcaggtgatcctcctgcctcagcctccccagtagctgggactacaggcatacattatcatgcctaatttaaaaatttttcttttgtagagacaagagtcttgccatgttgaccatgctggtttcgaacccctggcctcagttcatctgccagcttcagtctcccaaagtgctgagattagattacaggaataagtccctgcacstggccactgctcccttttcttaaccctgtgccattggaattcactgtgcaggcaggagggtgggagagtcatgctggggtcctagacttatgccccgccccatccttttctaggcctccatgtcttctgtggataataaggcaactcagaagaggtgtaatttctgaacacttggaaagatgttctgtctcctgattgccaaagaaatgcatataaaaataagtgacattttaatatgaaaattaataactggcactataaattggcatcctttcaaaaaggcataaaatgctcatgtcctttgacctagtcatctcactctgacaagcttagcctgaggagataatctaacaaaagggaaagagcggtggacagaggtgttctcttgtatttcatgaaagcagcaagtagggccttgcctaaatgtcttaatagggtttggtcaagtatgcccattttgtggaatattaatatcaacggtcacggagtcttgtaagatggaatatgtgtgacacagcattaaaaggatttaccagcctggtcaatgtggtgaaatcccttctctactaaaaaaatacaaaaatcagccagtcgtggtgccgtgtgcctgtagtctcagctacttgggaggctgaggcaggagaatcgctgggacccgggaggcagacgttgcagtgagccaggatcgcgccactgcactccagcctgggcaacagagcaagactctgtctcacaaaaaaaaaaaaaaaaaaaaaaaaggatttaaaactgtcaggacagcaactatatttttatatggtatgggctgggcgcagttgctcctgcctgtaatcccaacactttaggaggccgaggcaggaggattgtttgaggccaggagttcgagaccagcctgggcaacatagtgagacccccgtctctacaaaacaaaaccaaaaggtacaggtgcctgtgcatacagaccagcagggacatgtggagatgggctgcagtaggactaattttcttttccctcattttttttaaaaataagttttattgacataatttacgtaccattcaattcacccatttaaagtgtacaattcagtggtttttagttattcacagaatcgttcaactgttgctacaatcggtttcagagcatcttcgttaccccagaaggagattccatgttccccatttcccctctcccccagacctaaacagctactaatgtactttccgtttctatgggtttgcctattggggacatttcatataagtgaaatcatacagtatgtggccttttgtgtctggcttctctcaccaagcatgttttcagagttcatgctgtagggtgtcagtgcttccttcctttttatagccgaatcgtcttccattgtctgggcagcctacggttttgtttatccactttgttgatggacatttgggttgtttccactttttggctattatgattcatgctgctgtgaacatttgtgtacaaatttctgtgtagacaggttttcatttcttttgggcagataactaggggtggaattgctgggtcatctggtaactctaggtttaaccttttgaggaactgccagactgttcctcaaaaggggaacaggggctggcagttcttcaaaaggtttgcaggggctgtcccctaccagcagtgtatgagggttccagtttttctacataatgcctattactgtctttttaaattttagccatcctagtagataggaaatggtctccttgtggttttggttttcatttcccttatgaaaagacgctcagtagtttttcatgtgcttttggccatttgtcttttgagaagtctttgttcaaatccttttaaaaattgggttgtctttctgttattgagttgagttctttgtatttcttaatacaagtcctttatcagatctatgaattataaaatgtgatggtatcctttgaagcacaagagtttttcattctgatgacatccactttaagttttctttcttttgttgctttgcttttggtgtcatatctragaaaccactgcctaatcgaaggtcataaagattgatgcctgcattttcttctaacagctttttgatctctttcagttttcaaacttccatggtactttatagttgaacccaagagcttggacttggttcctctggccctgcccctgatttgttaaactttatattcaaacttatgtgccctccatcccctgcaggtgctgggctgtctgggaaacactcctttccctgtattttttgttccactgaaactgatttttgtctcattttattacttttagctaaggtaactgaaccccacttcccaagtcctttatgatgctaagtaagagcaaaagcttcccacctttctgagctgtgctcagagagtttggtgacagaaatgagggaaaagatttcacttgactcttcttccccctgacccccacctcaacaaacaaaccagaagggcacaggccagagcacagcttgcctggcagtccagtcctcatgcatgggagctcaggcctggtgggaggggaggcagagggcccagccgtggcccttgggtgccagcagtcctgggggagggaggaagcagacctgcgacgggaccgaggaatggaggggtggtcgggtgtgtggatggcagagtgacagctagggagaagccggatgtggaaggggaggaactgtgtggtatgcccaggcccctgggcccagccctggcttggcagcccttgctccctgctgagggccctgcctttccttcccctgaaacagctcccggagccctgcctgttccctgtccatccaggccagcagctgaaggagcctcacctgcctcccttctctgagtagcacggatttgaggtaagaaatcccccagaacccccattcccagtgcagcctgtggcagagatcggtccagtgtctcctccgactgccttagtgcccgctaaacgtttggggaggggagagctcggtgccaaactgctctcgtgtggggcaagtgctgagttaggctccttgggggactttacctcactgggccctgcttcctgggttctgtccttgcccttcagcttccaaacagggaagagcaggtgactactgagaggtraggatggtggctctgggctaggtggccctgggaaaggtgggggatccccagtgcctggaggcagacccttctgaggatggtcacacgccttgtgcagcatcttggccaccccacagggctgaaggagaaggaacctggctgggagcttagttcatgtctgggttttccctccatgtccaggagaagcagcgaagatgtccagcgagcctccccctccttatcctgggggccccacagccccacttctggaagagaaaagtggagccccgcccaccccaggtagggggtcactgttcctgaggctccatattgcagccccctgccgccatggcatggttgggactctctaagtggtgatgcccactccagggttacccctgggccccatctgtgtcccaaaacagtggcctctggtcgagctcatcgtgcagaggctccagctcagtctcctctttctgcctctctctgtccaggccgttcctccccagctgtgatgcagccccctccaggcatgccactgccccctgcggacattggccccccaccctatgagccgccgggtcacccaatgccccagcctggcttcatcccaccacacatgagtgcagatggcacctacatgcctccgggtgagtggggaagggatctgaggggagcatggggaactcctggctgctgtctggcctgcgctggctgtcctcagtacaggtgggcatctgctgtagggcagggactccaacacgcccaaccagcccttgcctarggctcaggctgtgtgtggacagggactgtggacgtgggaaggtgggactgctcttattcaggctggtcaggaagggctggtccttggcacaccaggacctgacatgggtggggaggggcgccttgtgtgcaggagaggggtgggtgacccgcaaggctttccctctcttggtcatgggcttgaggctgagtgccctgtccttgcatgctggagacagacagaggagcagagggaccgggccatgtgcctggctctctgccacatctgtcatgggccccaaggggtggggaccaggaagggctgggagaatgtggccccacttgacttagggccccagctgtaaggcctcccactggcccgttaggagggcggtaggaggtctgaggcgtagccttgcacgctgggcgctgtggaccgtggggctttgcgccaatctctttgtctggtgcaggtggcaggccagtgacctctcgcctccatcttctgtgccattccaggtttctaccctcctccaggcccccacccacccatgggctactaccccccagggccctacacgccagggccctaccctggccctgggggccacacagccacagtcctggtcccttcaggrgctgccaccacggtgacagtgctgcagggagagatctttgagggagcgcctgtgcagacggtgtgtccccactgccagcaggccatcaccaccaagatctcctacgagattggcttgatgaatttcgtgctgggtttcttctgttgcttcatggggtaggtggtgtgggcactggtagggtgggggctgcaccagggtcarctggctgcctctgcctcctcygcagcaggcctcagcctrttcttccctgtctctgattcagatgtgatctgggctgctgcctgatcccctgcctcatcaatgacttcaaggatgtgacgcacacatgccccagctgcaaagcctacatctacacgtacaagcgcctgtgctaacggagctgggactcgggactcccccgcctgtcagtctggccccctgtgctttgctccctgygctcagtggtcactttcccgctcccacttggggctgggagcygtgccaccatcccctagaagtcctgtcctcttcaccctgccctacctgagccgctgactcttctggcaaaaattctgttgggatttaaggccaagggtcagtgggtggcagggggctgrcaatgagcttgtgtgttgttggtctgcttggtgtgtgtgatcgggaagataagctgggaggggtctcctgctggggtcctgatgcctctgtttccaaacaaggtacaggttcagtccagactctttccccctgggaccaacagcagccagagcagttagccagttagtccccaggcctgtggccacaggcgtttctgacctgctgggccgagaatgggtaagttgtctggagtcaggtgggcccacgtaggacagggtcacaaagcctgggtttgtttctgggtactttgcgcctctggggtgctagaggtggggcatggtggctggaagtaaaactgccaactctggccctcagaactctcaggtatagaagcccaggatgtctaataccctgtcccagtgcccgagagctgcctggtgtcaggtagagaggacactgtacctgggtgaatgatcagaccctggtagctaagaaggaacttgtccctttgagtcagtgtgcagaccccctttcaggccatgcctctgtgaaccctgtattgctggggccggaaggagcccctgagcctagccccttcccgtctgccctgtgtcctcactgcgtgtgggtatgacctctgcctggtggctggtgtatcccaactgggcaagagatggcagagggtcccccttgtgggtgcgcttggatgtgcagagccttctccatggattttcttccctgtaagtgccgggcccctcaccccagctgacaggctgttgctgwgcctgctcacacctgctcctgcaggcacactgggctagggacgaggaaggagcagccacaagtggtagaactgccttggtggacaccagcctcgccctgtctttatttcctgaatggtttgtgaacttgctcacctggaccactgtatcctgccactgtccttcctggtctcgcactgccactgcatggcctcctgtcactgtgaatcgtggcccagtctcagtttgtagtttctcattaaattggccctttcactcccccgccctgggcctctgctctcttgcctggcttccttcttttttgagggaaagagggtggggctgcaggcagtctactggcaggacgggaggctgagtcctcagggtctcacaccctcagtgctgatgccatgccaactgcctgggacaacaccaacacgtaaggacctaattaaaccaaaccagagtcgggtgtagaccagccctgggatttccagctgtgactgggccagggcacacgttggtctcggcagtggctgtaaggtcaccttccttcctctgatgctggtttcaaccatctatatatggcatccacgcatgggatctgcaagctggagccctcctacccgcaggcttgagcacagcatcatccagccctggggaggcgcacccttaagcaasacagactgggctgaggctgacaggcagaagactaacagagcgcagtctgcacacgcaggttctgggcgmcctctggccctggccatctctgcactaactcatctgaattatgaaggtggcagtcttggtcagtagtttaaagagtttccctactttttaaccctttttgaaataaaacttttacaggtagtagattcctattaataaaattatttaagttcatgtttctcttttagagaatgaattgtttaaatacaaatatgtgcttttttaaaacccttatttttaaatatatatatatwttttaaaaaaaccttttaagtaggaaacctctaaggtatttctgagctaaaaaatagcagtgctggatacactttaaagatctttgcaagacggttagagtgactttgctttggagactagaggtgctggagagtagacccagagcaggaggtggctgctgggagccatgatggacgatgtccactccccacacagacataacatgcccttgcttctgagggactctcctatggggaggtggcttgacccacccggtgccaggaggcagggaaggaggtagcttgcaaagcccactttattgagtgctggagcatttacacagcgyggaggaggagataagctggggctgagcaaaccgcacccaaggggttagagggattctgggtgagagggatgagctcccaaggcctctgaggcttccacccacacccaccctcactcccagggtccaagagaggcccagaagttgtacagcagcatccagcaaggccccctcgcacagcttggacttacaggccactcacctccaacaggggagatagtcacccatgtactgcaaaaacagggactaccggaagcagcctagggcccagaagtgtggaagcctggagtagagctgggtcgggggccaggcttgctgcactgtgccgactgctcccagggtgacggcctgtgcccagtgcggaatatggcccatagagaggatgctgtcaggcagaggctctagcatctggcttttattggttgcctttcttaaacccagcattttttaaaaagtcacctgaggtggtagtttagtcagggctggagaaaggggtaggccagtggtcagtcgggaggagggtaccggtgtggcatgatgggtgcttcacatgtagtaccaggccaagagtccagcagctagggccacaccagcggccaggatgaactggaggctgggcttcctcagcacagccatagctgttcggaagggacagctgctgccctccagggcacctgtgtggcagcaccaataggagacatggcatcagtggagtctcctgctacacctgccccaggaggggagctcaggacacacagacctacctttgtcttgttcagcagcgtagaaagggcatttacgcatrtctcctttcccatcgtgtacagggaacccatcctccaaggtctctctggccagtgtggagccggcctggtccagttcattgaatatctgcaggagcagaggatcgactgagccatctttgggctgcccatactttttttttttttttaaatgtcttttgagatgaggtctctgttgcccaggctagagtgcagtgttatgaacatggctaactcactgcagcctcaaactcctaggctcaagtggtcctcccaccttatcctcctacgtgtgtgtaccaccatacctggctaatttttaaattttgtggggagatggtgtctcaccttggttgcccaggctggtcttcaactcctggggtcaagtaatgcccctgcctcagcctcccaaagtgctgggattacaggcatgagctactgcgcctggctacactctccttttagaggacgccctccagagagagtgagctggagcaggtgagcttgctcaggtgtgccaactacacagcaagcagcactggtgggcggcagctgcactgcctgatggtcttccctccctagcaagagctctggggaggtgtggatattggtaccccaagaaggctgccaaatgctgggtctcccctgggaactgaccagagatgtagccttctctgaggtggctcaagccactgaaactaccacagcacagacaggagggcatgagtacatccccatttctaggtgctggttatttttttatcaagaagcaacagaaaacctggaacatgggagaatgagactgtggcagggcatactcatcctgagtgccctgggaggcctcagtggaagctgacaggacctggggacagagtaagcttccccaggttcagcctcatctaaaggctacttgtaaacagagcttatttactctccttggtggcactggctctctattaacttataaagcagggcttctcagagcaaaacttgaaaagaaaattaaccattcttcaagaccagcatcctgcaatgagggaggaagccagctccattcttccagacccctctatgtgcgagaggactcacccttcccaaaacactacccactggcatctatcacaccaggcctccatgctgggaaccacccactgggcccacaagctctggtggccaatctggtggccaccttcctctcggcaccctgcagctcatctgtcctaatgccatgtgtgccttcatgggccactatggatctgctaccactgtcaaagtttccctcttcagccctagcagctggcagcccccaatagtacctgcatgttatactcaaaagccttgttggcctcctccacgatcctctctttggtcttcatgttcaggtccagggcgttcatcctggcccggtagagctgcttgaactgctgggcattgtccacattctcaaacaggtagaaytgggtcccttcccctgtgctggggagtttcagtgctcgctgggccaccttcttcagcacctggccccccgagagatcccccatgtagcgggtgtatgcatgggccaccagtagctccggctcgttctgccctatgtagtggatccgctccacgtacttctgggcagccttggggcactgcacctgctcctcccagttttcaccaaagaaatactccatgtccttggtcagcgcctccttccggtgyagctccatggggaagtacaaaggggcaaaggctggatggtccttgttgcgctccatttcctcctcgagggctgagtatgtgaagtaaagtgccgtggtggccagctgtggaggtgacaggaggaggccagctatgcctgagcacaccacatccgagcagctggatgcagaggctcaagtgacaacccccaaccccaaagacccaatcctatggtccatttttatgtagtgaattatttaacacacaaggaagcttttgtttcttaaaggaatggcatggtgaagtctttggaacacgcatacttttgcttccttcacaccactatgttattctatctaagccatgagaaccaattttttttttttttggcggggtaaagagtctcgctctgtcacccaggctggagtacagtgggacgatctcggctcactgtaacctccgcctcccaggttcaagtgactctcccacctcagcctcccaagtagctgggagtacaggcacgcgccaccacacccggctaatttttgtattcttagtagagacagggtttcaccatgttggccaggctggtctcaaactcctggcctcaagtgatccacctgcctcggcctcccaaagtgctgggattacagacatgagccactgtacccagccgagagccagagcttaacgtcaagaaggaatggagtgtggagaaaagcccagcttttccctcagagtggctccaggggcacttttctcatgggaccaaggcccccaccccaaccccatatgacagtctggaacccaatgcggggcacaaaccttaaacagctccttcttaatgttgcctttcaagaagtccttgacaaactgggtgttttctgcccggtcgtgtgcttccttggtcccttccttcaggagctcygagaggtcagccattctgtggagagatgggaggtgtttgtgtgtcaattagcccttcccagctttccagaaaggaccatagagagaagattgagtccacaccccaaggtgaccacctgttgtactggaggctggggcttctcagacacttcactccaacacaaatagcagcaacttgtcagggaacacaggacaagcagacatgacattctgctccaaggactcaggacacaagggataactgtggcctgctccttgagagtagtacccacgtccatgtgtctgtgttgggaaccacccaaatgagcaatgctttgcttctgtggccacctagtggtcgaagagacacacatctgtattcccttcagtatttgctggcttctctaagaacagcctgccttggaacgtgtcttctggaattcacacacctcagtaaggctgtgaccatgggtctcctcagatggccctactgccttcctcccaccttggacccacagcttctttgagactatatgtgactaggaccaagcacggaaggatgcaaaggagacaaccgagaggctagggccaggacgctgggtttgtgctgcttaacgaaattacacagttgtaaaggtgtgtggatggatggacaaggtagaaaacatgtgatcctaaagatggtggtacttgggcaggggcttacatgtgtccacacaatccatctacaagagtgagaaaaatttggccttatcatggtctggcttctgctgtcttctttaggagattagctcgttatcatccatgtgctgagaatcaatttattattagcaattatttcaagggataaaaaaaaaacttggccaatgacagggctatgagaggctaatgatgcagaacagggcctggaagctcaggtttagcatgagctgtccctatacagagtaaggaaaggctgccctgcagtcttttatgtggtaaaagactgaacagagccagctttgcctgcgtttaccctttctcagcccagatgaggaaacgcacaagtttttaaaaagaaaaaaggataactaccatcaaatcctatcagcactcccaggagcacctgccctgcctccttggatgagacaatggaccagtggggagagttctaagcagccgaagctgtatgcggtccctgcagggccaagcaggcacccaggggtccagagctcatggcccatggccactccccagtgctgccaacagacaaaaccaggtgtgctgagcacgacaggtgctgggcccacctgattcagtgcagccagcccccatcgctcacctcatttggttctccttttctagggccccagagttctttttttctgactcgtctaccccctctgaggtttccacttccgctgacattgctgctgggtgtggttcttgctgctctcgctcctctggtcctgcagagacacaaggagctggtgatgtggcacccacggcagtcacttccccaaatacctgtcggttctgctttcctcagagcgaatgtaaccaaggtgacacccacacaccccaggattgttttctttaaaataaagctctgccattactgggaccatagtggaatatggaaaaaatctgaatatgaacaatgtattaggtaatagcattgtattgacattaagcttgctggtttttaaaaataattgtactgcgattatataagagaatgtctttgttcctaagaaatacacactggggtattcagaagtaaaggtacactgcctgcaactccctgtcagatggttcagaagacagtgtgtgtgcatgtgcatatgctgcagggtgggggacactggcaagtcagaaaagcaaacaaggcaaaatcctagcagtgaatctggggaagaggtatgagagttctttgtactattcttaccatttttctgtatgcttaaaactgtatcaaggcagggcacagtggctcatgcctgtaatcccagcactttgggaggccgaggcagactggagtttgagactagcctggttaacatggtgaaaccctgtctctactaaaaatacaaaaaatagccgggcatggtggtgcacacttgtaatcccagctactcgggaggctcaggcaggagaatctcttgagcccaggaggcagaggttgcagtgagccaagatcacgccgttgcactccagcctgggcaacaagagcgaaactgtcttaaaaaaaaaaaaaaaaaaaaaaaaaagaccgtatcaaaattaaaagttaggccagacacggtggctcatgcctgtaatcccaccactttgggaggccaaggtgggtggatcacctgaggttaggagtttaagaccagcctgaccaacatggagaaaccctgtttctactaaaaatgcaaaattagccggatgtggtggcgcgtgcctgtaatcccagctactcaggaggctgaggcaggagaatcacttgaacctacgaagcagaagttgcagtgagccaagatcgcgccactgcactccagcctgggcaataagagtgaaactctgtccaaaaaaaaaaaaaaaaaaaaaaattgaaagttaccaaaaacaaagaaaacctcaaaaaccttagggaaacaaaaagcttggcaagcaacgcacagttccacccctctgcaagcgtgctgaggccagttcatcctacctgtgagaggctgggtgccttgtgcagaaggcagcctacaggagttaccaaaaaagcagactgtccctagcctactcaggactttgctaggctgaaggaaatattaagttggccaatcaattcccattgcctgctgcaaatgctgagcctttgtcagccagggaaacacagtcccataacaaggcaagctcatcctccatccctcggggcttctgctcaggcaa
